United States Patent Application Publication US 2020/0377945 A1 - sequence listing, part 13

SEQ ID NO: 2594 - DNA, 17425 bp, Unknown
  gut microbiota DNA sequence
acggcaaccgaatgagggtaaaatataccgcaaagtggggcttgcagattgcggaaatgatttttcagacacgctctagtctcacactcttactcatccagcagaaaatccgccatgatcggattgctgacgctgatgcctgcccgggtcagtgcgatccggtcacctttgatctgcaaaagtcccatcctgctgtatttttccagcaccggtccgtagatttctcccacagacactccgaagtttttctgaaactcacttctcgatacaccgcggatcagccgcagtccgagaatcatcgtctcttccatctgctcccgcactgtcagtgtttccaggtctcgccggatcgattccacctttccgtcaaaggctgcgtacgcgctccggtctctcagattggtaaaccgctggttctgaaagagcgacgcgcttcccacaccgaatcccagatattctcttctggtccagtatcccaggttgtgctgacactcttttcccgactttgcatagttggaaatttcatactgctgatatccataagactgtaaaatctccccggtccgctcatacatctgccgttcttcctcctcatcgggaagttcgagtgttttctcagcaaacggagttccctcctcgatgatcaggctgtacgcggaaatatgctccggttccatccgggcaatggtttccagacttttctcccaggaagccagatgctgacccggcagaccagacatcagatccacattcagattggtaaatcccgcctctcgcgccatccggaaactctcctgaaactgcgcccaggtatggatccgccccagtagtttcagttccgcatcatccgtggactggcatcccaggctcaggcggttgatccccgccctccgatagcctgcaagattctctttcgtcaacgttcccggattggcttccatcgaaatctccgcatctttcgccagacagtagccttcccggacgcccgccatcagtttctccatccagtctcccggaagaagcgaaggcgtacctccaccgatatacacggaggtcacctcatagtcttccgcctgtggtcccaccgccgcaagttcccgcaacagggcatccagatacgttctcctgttcctctcatcggcaggtccggataaaaaatcgcaatattcacattttcggatacaaaacggaatgtgcagatataattccagtgcttttttcatcgctcatactcctctaaaaacgccaaactgccgacagaaacgttccttctgccggcaattattttctcacatgttatgatattgggggcaaaagatattttgccccctttgataccggattgttccgtacttcgtactctcacaatccacaaaagcattcgcaatccgctcatttttcttcgaaaaatggctacttactcatgttttttggcgggtcccaagttcagaaatcttcctgcaagcaagcttgcgtcagattcccgaccttttgaccctggtatcatgttattgcaataccttctgcatattctttttgattttttctgtcagatacgcatactgcaacagttcgtcctcgctgaaattctgatagcgtgtctcgtcatactcccgctgtacgttggcaagcgcttcttccacctgcgctgcttccggcagcatccagaaggtgagtctgcgatcctgtgcctttttttctctgctctcctggatgcggatatatccccgtgccgccagtttttgcagatacagcgccagacttctcctgctcatattcgtataatcgctcagctctcttctgctgaccggctgtttcagatgactcagatacaacagtaaccgtatctccggaaaggtaagatcaaactggcttgccaccggctccagataccggtccagaagcttccggctccgatattcatccatcagaacgccctctccctccacggcttccagatacaggctgcttcgttcttccccaagtttctgtgaaccgggcaggatcgtcggcgctaccatgccatcccccgccgcatcgatgagaaaacgatagacctgtaagcgatttttctcatattcctcttcgtccagaacatttttataaaaatcattatagtaggcaaatacggtcagcttcatcttgatcgtcttcgacaggttgatgccctggctcgccagagaacctttggtcttcacataatagtagatcggcgtgtgcagcgcatagaaccttctggcatgacggatatattccagattaaacataaaatcctcacaccagttgatctccggattcatctgtaactgatgctcctggataatatcccgccggtacagcttgttccagagcacaccgtaataaaaatccgccggtttctccatcatacagcccacaaaggcttcctgatccatcacgccgtcgattccgatgtcgcctttatgagacagacgctccccgatcacccgataaaagtcagcgatcacaagatctgcctgttcttccctcgccgcccgcaccagaagtttggtcgcatccggcgtgatccagtcgtcgcagtcgagaaattgcagatattccccgtgtgcctgggcgatcgccatatttctgctctccgaaactccggaattttccttgtggatcaccagcacccgctcatccgaagcggcataccggtcacagatttcccttgttttatcggtactgccgtcattgaccagaaacagttcaaaatcttcatattcctgtttcaatacactgtccacacaccgctccagtgtcttttctccattatagaccggaacgataatacttactgcaggtttcataactcctaatcctcatccagcttcagtacactcataaatgctttctgtggaatctctacatttcccacctgacgcattcgtttctttccttccttctgtttttccagaagtttcttcttacgggaaatatcaccgccgtaacattttgccagaacgtcttttctcatcgcacggacggtctctctggcaatgatctttccgcctactgctgcctggatcgggatctcaaacagctgtctcgggatctcttctttcagtttctcgcacatctttcttccgcgctcatacgcggatccctcaaatacgataaaggaaagggcatccacttcttctttatttaccagaatatccagtttcaccagttcgcttctctcgtagccgatcatctcatagtcaaaggacgcatatcctctggaacgggatttcagtgcatcgaagaagtcatagatgatctcgttcaacggcatatgataggtcagcagggcacgggtagtctccatgtattccattccctggtactgtcctcggcgctcctggcaaagatccataatcggtccgataaattctgttgtcaccatgatctcggcttttaccatcggctcttccatatattcgatcgtggacggatccggaagattggacggattcgtcagatccatcacttcaccgtttgtcttatgcactttatagataacacccggtgcggttgttaccagatccaggttgtattctctctccagacgctcctggatgatctccagatgcagcagtccgaggaatccgcagcggaaaccaaatccaagagcgatcgatgtctccggttcatactgcaaagacgcatcatttaactgcaatttttccagcgcatcacgaagatccccgtattttgctccgtctgccggataaacaccgcagtataccatcggatttactttcttataacctggcagcggttcactgcacggtctgttgttgtcagtcacggtatcaccgacacgggtatctttgacatttttaatacttgcggtgaaataacctaccataccggcggataactcctcacacggaataaactgtccggctccgaaatagccgacttccacaacatcttccaccgcaccggtcgccatcatgcggacagacgttcccttgctgatctttccttctttgatcctgcaaaatacgataacacctttataggaatcgtacacagaatcgaaaatcaatgcctgtaacggtgcattcggatctccggtcggtgccggaactttttctacgatctgttcgagaacttcttccacgttcagtccggtctttgcggaaatctgcggggcatcctgtgcctcgataccgatcacatcctcgatctcattgatgacacgctccggctctgcgcttggcaggtcgatcttattgatgaccggcacaacatccaggtcatgatcgagcgccagataaacatttgccagggtctgcgcttcgattccctgtgcggcatccacaacaaggatcgcgccgtcacacgctgcaaggcttctggaaacctcatagttaaagtcgacatgtccgggggtgtcgatcaggttgaaaatgtattcctccccgtcttttgccttatatacggttcgcacggtctgtgccttgatggtaattcctctctcacgttccagatccatattatccagtacctgggactgcatctctctttctgtcagaagaccggtcatctcgatgatccggtctgccagggtagattttccgtgatcaatatgggcgataatacagaaattacgaattttactttgatcaaaatctgccacttttgtacctccgatttctttttatattcaggtgattgttactgtttaattttttacattgccttttattataacatagtttttactctcccttcaatactttatccagaatcacactgaagggttccatcgcgttcatcgcctcttccaccgtattcgtctgcgcgcccacttccagcaggatcgaacgcggccgtacatgaagattgtagcggtagcctttcagataaatgcaccgtgtcagctgcggataataccgcgccgcctgataggacagctgaaaggaaaaagaaagattatcctcgatataggggtttggcagggtatccagattgccgttttttacggttctgctcagtccgttaaaatacatgatctgcgccgtcggtttcccgttgatctccgtcaccagatgtttcccctccggcaccccgtctctgtgaaggtcgatgaccacctggatcgtcggattttccgcaagcacctgttcgatcaccggcagggcataattatacgccttgctccggtccagctgtccttccatcagatcaaaggcatcttttcggtggatcacctgatacccgtagacatcctgcaggatactcgtaagatagtcacccacaccgatcacactcgttgcctcatccccctcagtggaatcggcaaatccttcctgcgagtgggtatggtaaatgaggatctgcgggacactgctgtcctcttccagtgccagggaatcccctaaaaatgtaccggcattgatctgtgaaccgtccacggtggtgttcggatccaccacaaagaaattattgagtaaatactgaaaatcgctgagacgatccagggacagatccatcttcggcgttgcctccacggctgtcgtccatgccggaagcggcgtggtggttgtagctgcattctctgagtcactttcctgccctgcagtcgtttcaccttctgcctgcgccgtctcctctttttgcccgtctgtctctctgctctgctcctgttgccgggtttctgtgttcccgtcggttccactctttttctcctgctgtgtacccggatcgttctccgtctttcccttcgccgtttcattttcctgtgttaccgcctcactctgattttctcccagcagccggtcggcgatcgtattgccgttggcatggatcatctcataacaggtactctcgtcttcgatcaccggatgggattcttcctcctgctgttctttcagatacgcgccgagcggataccagttttcaatcttcgtccacagttttgttatcatcggcgtcgtatttccctcttcataaaaaatccccggcatgtaccacagatacgcttcccgttccgtctccatgcagacatccccgaggatctgctgcgcacgctctcccggtgactgcctcaggtacagatatccccgcgctgcaagatacccgcccagacagacgcataatccccatactactgcctttataatctgttctgatcttctcatctttccctcttttatatttctgactccttgttcgcgtacatgcaagaaggacaggcgcttcctcacgacctgtcctcctgtctgactttctgtcctcccgcagttttccaactcttacttttgcacctgattgcacaggagtacatacttgtattatatgagtttccccgtctcttatgcttccatcgcgatattgatgccctccgagatcgtataactgagccgcttgaccgtctcatccacatccttcggtgtgacaaacatgctgtgcagccgcggtgtgatcagttcctgtaaaaattcttccatctccgactcttccagattttccagaaggtgagcaatcgcatcgtgcacgatcgtcgctccgtctactacggttggcacaccgattccgatcaccgggattcccagggattcctcattcagcccgcaccggtggttgcagacaccggatcccggattgatccccgtatccgtcacctggatcgtgcagtttaatcgccgcacactgcgcgccgccagcgcatcgatcgcgatcactgcgtccggatcggtctcccggatcacgccccggatgatctccatcgtctccatcccggtctgcgccataacgcccggaaccaggctgctgatctgatgcaccctctcctttcccatccctgcttttccgtactctttcacaatatgtctggtgatctttaagttctggatcacccgcggaccgagcgcgtccggtgtgatctcccggttgccaagccccaccaccagaatggatttttctttatccagatggagcagttcccgcagatgatgagcaagtgccacggaaatctcgcggtgataatcctcatccggcacgatcagattcggagcttccatcgtaatatacgttcctcttggcttttccatcgcccgcgctccctgttccgtctgaatccgcacaaccgtcgtattcaggtccagagactcctcatattcctcatgaatcgccacacccttaatctccacattgtccttctcatacttctccttactctccactgcaagatccgttcgtatcccaaaactcccagacatagccgtcacccttcctttctgcacgccgttttcccatctgtgtccttttctccttttagatttcccgttttcctgcagattatccctgaaaatccttgtatttttgcacctttttttctgaaaaaccattgacaaactccggtaaatggcataaactgtatgggtattttgagattagcctgtccgtgtctgggctgatgaatatgataaatgattgaataatttattggaggttatggaaaatggcaaacattaaatccgctaaaaaaagagttatcgtaaacagaacaaaagctgaaagaaataaagcaatccgttctgaagttaaaacatctatcaaaaaagtagaggcagcagttgcagcaaaagatctggcagcagctcaggcagctctgaaagtagctaccgctaccatcgaaagcgcttgttctaaaggtgtataccacaaaaacaacgcagcaagaaaagtttcccgcgtatccaaagcagtgaactctattgcttaattctaactgatagaataaataaagaattttaaaaagaacagtcatcccgtcagtgactgttcttttttgttactctgtattccttagaagctgccgtggcaacttctgcaggtatgcaaaaatcccggaacctgtccctttcaaacagttcccgggatttttctttatccatcacaccggattcttccgtgcatatttcacgatcagaagttccacactcagcacatcgctcagccttccggtcttcacatcttcctctgtctgtgtaaagtcttccaccgcctgacgaagctgcgcggtcgtatatctgccggtacagccggtataattgcggaccacaaagctttgcagtcccgttcttgatgcgatggttttctgatcgcagccgagacgttgcagctctttcacctgtaacagcagattgaactgccgcgccagcagaaagaggatccgcatcggcggctccttcagggcaagcagatcgtaatacagatccagtgctttcttctggttctgctccgccactgcctgcaccatcgcaaagattcggttgttgatctgtgtcgtacacaccgcatcgatatcttccccggtgatcaccgaccgatccatcgtatagcataacaacttttccagttctttctcgatgttgctcatatccgtaccggttttcgacagaaaacgttccatatccctctgggtgatctgttttccctcgcgtttcaggattccaagcacccagcgcatcagtgttttctcatcctgcaccgagaaatccaccacccggccgatctgtttgaccattttgaacattttgcttcgcttatccacctcttcttctacaaacagaagatacagatagtccggcagactgttcaggtattctgtcagttccgggcactgattcttgaaaaatccggtattttccatcaggatgatccgccgctcggcaaaaaacggcatcgtctctcccagtgaaatcacttctttcacatcaatcccttttccctcaaaccgggaatagttcatcgtatccccgtccgggttccacgcctggatcagcttgtcgcgatactgctttttcagatatccttcctccccgaaaaagagatatgcctgcttatattcctgatttttgatatcttccaatacacttttcatcgaatcttttaacctttcacccagtttttctcatatggatttattatactgtttttttcccggttcggcaaccggcatcgtcaagaacactgccgttgagcacaaatcaactcctcactgtccgccagtcacatattcttccacccggatctccttccccctctgccttaccgtgaccgcaccgcctttcatcgtatagcggatctcgcatccgtttttttccagccgttctaccgtatctggtgccggatgcccataccggtttgtcagcgcgcaggagattaccgccagggaaggttgtacccgatccagaaactcctgacaggtggatgtggcagagccgtgatgtcccacctgcaggatctcacaggcgggcagtttttgcagcagttcccgctctttctcctccggcagatccccggtaaagagagtccggactcctgcccattcccagcaaagtaccagggatcccgcatttggctccgtaaccgtttcttcgtctcccggatagattaccgcagcttctgcatttcccagttctaactgatcgcctgcccggatcccctggcaggatgctcctgcttctttcgccagtttttgcagttctctcccctgttccgtctcttccatccagcagggatacagaagatgtttcaccgtcaaccagccctttttcccttcttcaagcacttccatgacaccattgatgtgatcctgatccgtatgtgtgagcaccaccgcttccagacaggaaatgccctgctgtttcaggtatggcaggatcacatacgttcccacctttttctggctggtgcttcccccgtcaagcaaaagtgcctgtccaccactctgtaacagactggcatctccctgcccgacatcgagaaacgtgatctgttccctctgctgccagggatgtgccatcattgaaagcagcagcaccatactgcacagttccaatgccagacagatcttcccctttttccaacggttttcactctttatcatctgtttctccaccaaaaccaccatgatcatcaccagataatacacagtgatcactattttgggaggctgccccggcgtccacatcccaaccggcagtttctcagagatctgcccgatccactgatatacttttaagagcccgtaagccggacttcccgccacactccccaaaagtacattccagcctgccagaagcactcccattcccccggaggcaatcacgatcggaagcagcgggatcaccaccagattccacagaatgcccgccactgacacctgataaaaggtatccagcatcaccggcagcgtaaacatccacagataccagccggtgcgtatatgttccggtattgctctgacaccgctctttttttctttcttctttcccttctctttcttcccaagtccccgaaagattttttgtttctcgctgacataccatcccacgccgatcacagcacaaaaggacagcttgcatccgccatcagcgaccagatccgggttatccagaagcatcaggatcccggcaaatgccagcgcggataagagatcgtaggaacggcccagcagccgcccgccctgaagcacacaaaacatcagaagtgcccggaccgctgtggtcggctgtccgatcagtatgccgtacccacacagcacccccacagatagcaacacccataccggcatcggaagtcccagccgtcgaaggatcccggcagctgccagtgcaagaagactgatatgcagaccggatatggcaagcacatggctgatccctgctgcctgataaaatcccttgacctccccggtaagttcactcttttccccgaacagcatcgcctcaaggatccccgcctccgtgtcgggatagagccgtttgcaccgtttctttatttcttcccgccacgctcgcagcatcccggtgctcccggaggatccttctttgatccatacaattgccggatcttccagataaaaatcgatctttttcccgctttcatagactctccggttaaactgtccgggattgcgcggaagttccggaagcgcaagggttccttccagccggacacgcatgccttctctcagactgttcagtgcttctttttttcctgtacatttgatatttcgaatgggatatttttttgatgatccggaacggatcagaattgtttttttcagataaatcattgtgcgggtgtctttttcgatgcggtacaccacgccttccgcctgtatgctctgctcttgttctgcccactgccaggattccttcccggcgggagatttccaaagccaggaacctccgcaccagtccgtcaccagaatacacaggatcagccctgcaaacagcaggcagagaggacgtttgcttttcagtcctctcctcctttctccagttcatgattcacctggaataactgattcatatctacttcgtccttaaataccagtgaagtatcgccgttgatcgagatctgcacctgactgacatttcccgctgcgatcagcgaattgacgatcgaatataccgggatctgtgcatccacaggcagcgcctcatcgacaaactgctcgcccagattcacataggcgatcccgtccgccaccgacacgccgacgattcttgtatcggacggcagtgtggcataatgtccgctctctcccggtccgcgaagcagctgctccacgatgactttttcgatcggtgtgttgccgttatagtaaacctgtcgggtctccggcaccagctgattcccttcctcgttggtaaaataaaggttcagctctttatactgatacgccatgatctcttttccggtattttccagaaaattatccagactcatggctccgatctcctttccctgcgaatcgacgatcggctctcctacgacagtgatcgtaacgagataaatatccggaatctgtacataatcttttacgatcgatgcccgcaaaagcacctcatccaccggatttagctcccggtattccggtgtaaagtccaccagaagcattccgtcatcgttcacacattcccggatctgcacgccattcggaagaagggtatgtccttctgcatttttcttatttaatttatccgtcatctcatctaccatcgtcgatgtcttctcttcggacggcagaaaactttcggcaaggatctctccctgatcttcgttgacataatatactttgtatttgctgtccgcatcctttctcccgcagccggaaaaggcggcaacgccaagcaccagtgccatcaccagtgctgtgattcttctttttctcatattctcaccgtccttgatcagtcgataaatgtcagcgggatccgcacggaaaatgtcgttccttcacccacctggctcttcacccggatcgctccgtgatgcatcatgatggcacttctggtaatcgccagtcccagaccggttccctcgatctcggtggagtgcgatttgtctacccgatagaatcgctcgaagatatggtcgatggattcctccggaataccacagccggaatcggttaccgtcacataaaaatacttgtgatccgcgttcaacgatacacgcacccagccttcgtccttattgtatttgatcgcattttccaccagattgctgatggcaagggacaattttgtctcatcgatctccgcatccaccggccggaagccttccaggatcagttcgatatttctcttcgccgcgatcggccgcagccgttttaagatcagatccagcagctcattgatgttgacctgttcgatgttcatgttcgaagctttcttattcagctttacgagtgtcaaaagatccgtgatgatcttgctctcccggtcaatctccgctgcgatatcctgcatgaattcctgatacagttccaccggtacattttcctgtcctaccagcgaatccgccagtaccttcatcgaagtcagcggtgttttcagctcatgggacacattcgatacaaattcctgacgggaggtgtctaacgactgcacacgccccagcatcttgttaaatgcatccgtgatcagttccgtctccgtataatccggaaccgagattttctcatcttggaatccgtccgtgatatcttcgatcgctcttgttacctttgcaaacggtttcatcagaatccccgccagaagatagccgaacaccagcaccagcgcaccgatgatcacaaggatcgtcagacctttctgttccagaatatcaatgctggatacgatctcttccgtggaaatgctgatcagcagcacaccctgtgtcgtctccccgtccgttcccggaatcggcatcgtcagctcgatgtagctgtttttccggtcataatgactgctctctttcatcttctggaaacacttgaccacttcctttgagatcatgtattttcctttatccagatcataggtgtccttgatcacctgaaaatcctgattgacgatcaggatccgtccgctgtacacgtttgtgagcatcgtcagctcgctgttgatcccctccgaagacggatcttccagataattctcttttgccagctgattgaccagaatatcacactggttctttacattcagctgccggttcgagactgcccgatcctcgtaactgtttacgattcccttttccacgatgatactcggcacgataccgataatgatcagaatcaccaggatccggaaccgcagacttttgacaaacttaaatctgactttccaattcactttcatatctgttcctcactgccattcattaaaaagaaaatgcaggctaacacgcctgatacaccggctgtgtttgacctgcattccggatcttacgcctgaaaataatatcctacgccccatttggtatgtacatattttggttcgctcggattgctctcgatcttctcacgcagtcggcggatatgcacatccaccgtccgcacatctccgggatactcataaccccatacgatattcaacagattttcacggctgtatactttatttggattaaataccagaagttcgagtacatcgaattcttttgcagtcagattgatctctctgctgccgataaatacccggcggctttcgcagtccagtcgaagttctccgacttctaccaccttggctttcgtctcctgagccgctgtctttccggcacggcgcatgatggctttgattctggctttcacttccagaatattaaaaggcttggtaatatagtcatccgctccgtactccagaccaaggatcttatccatatcctcacccttcgccgtcagcatgatgatcgggacatctgaaaattcccggatctgctgacatacctcaagtccgttcatcttcggcagcatcagatccagcagaatcatatcatattctttattctttgcacattccagggcttcctccccgtcataggcacaatccacttccatgccgtcctgctccagactgaaccggattcctttcacgattaatttttcatcgtctacaaccaatactttcttcgccattctttactcctcaattgatcctgatctgatttttcagcttttcatatgttttttctttaatgccttccacctgcatcagctcctccacactggaaaatttcccgtgggattcgcgatatgcaagaattgcctgtgctctggtctctccgattccggtcagcgtcatcagctcttcttttcccgcccggttgatatccacccgaccgtctgaagtggtctgactgtccgtctccatcccctgcgattcgtcccgcagatcatctcccatctgctccgcttcctctctggtatagatccgaatcttctgaccgtccgataacagatctgcctgattcaccgtctccagcgaggcatcctcggtacagccgcccgcctgctctaacacctgaaatacccggcttccggcttcgatccgataaactccggggttttccaccgctccacagacatccacgtagatccattccggcaaagattcctctgtttgttccggattttcttcctgcccgtctttggtctctgcgccgtctgccgtttccggttctttctcctgagtttccagcaaactactttcctcctgcgtgcgtttcagcacactgccttgcgaaccgcacccgccaaataccagcaccggtaaaagcatccatagaattttctttttctgtttcatctgcacgctccttatcgcttccgctttagggctccctccatgcatacacaattcattttacccaatttttctctgaattacaagaccataaacctgaaataattattacgatcttctcccaaaatcactcccatttaaaaaggataatcccgccgacaacgatcgccgtacctgccagctttttccagtcaaacggctgtttttccacgccgaagattccgaacagttcgatcagataggaaaccaccagctgggcgatcacgatcagcatcgttgcctgtgccggacccagttttcccatactctggatcacggtcacggtgataaatgctcccaggattccgccgagcagggtatatttgttctctacctgccacagtgccccgaccggatctctcccggtaaaaaaccaggctgccacacagaccagaagtgccgtcagctgcacccagcccgtcgatacccacagactggactgtttggtcacctgcgtattccacacgccctggatactcatcaaagctcctgaaagaactgcaatccatattccaagcataaaaaatccctccataccatagatgtattctgtactatagtatggacggattttattcttttatgatgataaaaacagattattttaatttccagatatcttcattgtactgcgcgatcgttctgtcagaggagaagaatcccgcctttgcaatgttgatcagtgcttttttgttccaggtcttacgatcttcataatctgcatagaccttttcttttgttgtgatatattcttttgtatccaggagtgtcataaaccagtcttttccgatcagttctctgtgcagacgggtcaaactttcttcatcaccgattgcaagcagttcttctcctgtgataaaatctaccagtttgtggataagcgcatcctcttcatagatttctttggaactgtaagtacctgcctcgtacagatcgatgacatcctgtggttttctgccgaaaatataaatattctcttcgccaaccagatcccggatctccacattggctccatcttcggttcccagcgtcagcgcaccatttaacatgaacttcatattaccggttccggatgcttctttggatgccagcgaaatctgttcggaaatattggctgccggaataacctttgctgctttggaaacattatagttttcaatcatcagtacgcggaaatacggtcttacctccggatctttctcaatcagttcctgcagacacaggatcagatgaataatatcttttgcaatcacatacgccggtgctgcctttgctccaaagatcattgtgatcggtgtggacggtttgttgcccgctttgatgtccagatatttgtagattgcataaagtgcattcatctgctgacgtttatactcatgaagacgttttacctgtacatcaatgatggaatgttcatcaatcgtcagtccctgggttttttccatgtattctttgaattccagtttcttttccatcttgatttcttccagcttgttcagcactgcttcatcgttttcaaaagccaacagtttttccagttctgtggcatctttcttgaatccgtttccgatcagagattcaatatatctggtcagcatcggattacaatgcatcagccagcgacggaacgtgattccgtttgttttgttgttaaaacgttccggatagaggtcatagaaatttttcagttctgagtttttcagaatctctgtgtggagtgctgccacgccgttgacagaaaatccgtaatgaatatccatgtgtgccatgtgcactctgtcctgcgcatcgatgatgtaagtggactcatcttttactgtttttcgaactctttcatccagttccttgatgatcggaacaagattcggaaccacttcttccaggtattccatcggccatttttccagtgcttccgcaagaatggtatgattggtatatgcacaggtcttacttaccacttccactgcctcatccatagtaaatcctttttcttcggtcagcagacggatcagttccggaatcaccatggaaggatgggtatcattgatctggatcactgcatgattatttaattcatgcagatcatatcctgcgtcctccatctcctttaagatcagctgtgccccgcagcttaccataaagtactgctgataaatgcggagtttgcgtccggcgtcatcagaatcatccggatacagaaagagcgtcagattttcctgtacttttttcttattaaaattgatactgttttccggtacgatactttcatcaatagtatccacatc

SEQ ID NO: 2595 - DNA, 3616 bp, Unknown
  gut microbiota DNA sequence
gctgttgtaaactccgattcttatgcggatcgctcaaaatttttgccaaatacaacaacgccatattcctgtatagtatacgctgttttacggggagttgtcaatatttttaccgaatcgctgccacgatcgcacgctccattacataagccgcaagcgttcctgcaacgttcagatctgcttccacctcacccgcagatgccgcgtaaatgctgtcaccatctgccatagttcccaccgggttaatgcagcgggcataggcatttctggtcatggatgcgatcttgttcatctgtgctttgttaaattttccgtttgtgatcacggctccgatcgtcgtattgccggtaaacaagttttctctctgccccattttccacagttcctcacagctgtcactgaacgcagtaccgtcctccgtccggagtccggcgatctttcttccggtagaagaatcaaaaatatctcccagggcattgaccgccacaacagctgccatccgcagttctcccaactgtaccgcatacataccaagccctgatttcatcgcccgttccataccacagatttttcctaccgtagcacccgttcccgctcccacactgccactggacggattgcctcctgcaagcgctttctcacaggccgcatatcccatctcactgtccgggcgcacggtagcacttccgtacccgaggtcatagatacaggactggcacaccagcggaaccttcgcatatccggtctcaaagccgatcccatgctcttccaggcaacgcatcacaccgtccgatgctgccagaccgtaagccgatccaccggataaaacaatcgcattgattgggttatctgctgtaaccggggaagtcagcggagtctcacgggatgccggacctccaccactgatatccacaccgacaacagcacctgttttcttatcaaacaaaagaactgtcacaccggtttttgcctcttcattctgcacattgccgatcgaaacctccggcatttctgtcattgctatttcacgtattccactcatttatctcaaatctccctttccccaaaaatgttgagagcatgccagactccccgctggaaagttccggcatgctccgtatattatctcaaatccagttttttctcagattctgtgcagtgccgcactcagtgctcttgagattgctcctgccaggataaagcagacaattgcctcgatcagtccctgcacaccgacaaatgccacaacaaacgtaaacgggttacttactcccagagacgttacaaatccctggatataatctgtattgtaaaaaatcagcaccagcgtactcataaaaaacagcgtgttcagcaacgggcacgcaagacttgctaccaggtaagcaccgtttttcatttttccgcgaattgcattaaaaatcagtcctgtgatccagccttccaggagtcgtggaatgatacatactactgctgttcccagtgggttgatgctgaataacatggttccgaaagcgcccataccaaagcactgcataaaactggtgataccgaatgctagaccacagatcgcaccgcctgtcggtccaagaatcatcgcgccaaccgctaccggtaccgtcagaaacgtaatggataatccaagtgtccggaaatatcccagcggggtaaatgccataacgaaaataatggtcaccatcagtgccagttccaccagataccgtgtccgtgatgcatgtgtgttgttcatagtttctttttctcctcttctgtccgatgaaacggcgcactgccagaaaatatggaaatacgttccctgtctctcggctcattaaattatagaatattgggaatcattttgaacataacatacctgtagaaaagcagacatactgacagataactgtaccaaaactatacagttacggataagattttatggactttccgtatagttgccgccaaaacggtcagcactatcctctttccatattattttaaatactgaaaatgttataatagaatgatgcgttttcacacaggaataacgttcctttctactataacatttatttttcaaatggcaagaagaaaatggaaaaagattgtatttcttcgaatacccgctaccgaactgttttccgtaacatttttttcggattacggatcaatatttgttttgtataatcacgtcccatatgtttttccatatactctgcacatcttcccatctgtggcatccggtttttcatattatgtgcatcgcttcccacaaaatgcagcagatcacgtttcatcacctttttgcaaaaccatttcatacgcagtccatctgccccgctgatactgtctgcattcatctgaatataggctcccatatcatgcagccgctccagataatccatatttttctgtaagatcggatatcgttccgcatgagcaatcaccggagtgtaaccgttcgtgagaagttcatgacaggaattctctataaactgaaaggtatgcagctgagaaaattctgtcagcacgcaggaagttccgttcagagtcggacgttccccatgcttcaacatctgaaccatctcggtatttacatgaaattcgcatccgagaagcacctgcagatccggcgcaagttccgctgcaagttcctgcactttctgataaccagcctgcactttcgtcatcggcggttcaaacattcctttacgaaaatgcggtgtcagaacaatagtacgcacgccatccgcatattctctccgtatcatctttttcgccgttttcaatgtatccgcaccatcatccactcccggaataatatgtgtatggatatcgtatattcctttcattcgctgccagtaatcctttctctttttcacaatctcactgtactacttcgcttattatacgaaagaatccatcaaattacaacctcatataaccacaaaaagagcaggacatcgactgccctgctccccgtatgcgccttatttatgctctttttcttcctgcaactacaactgtcattccagcaagtccaattgctgcaaacattgcaaccatcatcatgatattgccttcacctgtttttggagaaacggtggaagtgttacttccgcctcctgtagaagttgctgtattgattgttccagctgtcttaccatctactacaaaagcaaccagagaaagggaatttcttcttgaattcttttatagttgtttgttctggcaacaatcgtagtatctttaacactgatactataatttttcatccaaaaatcataaaactgatccagtgtccaattattcaggttggttacactgttcgtttcatataaatgtttcatttctgaaaatttcttttttaaagtttttaagtcaaattcatatatggtatgagtttttccatcaacggtaaaacgagccatataccttccatcttttctttgcgtaattccgtttccaagttcttttccctttaaatctttacccattaaccgctccttttctgagccatggaactcttatcgtttacttaggtttatattcctttttcaagccattttttgaattttggtttgtagatataaactctgtttcctattttcttttt

SEQ ID NO: 2596 - DNA, 472 bp, Unknown
  gut microbiota DNA sequence
aatatattctgatcctgggggcacgtctggaaggagacaagcataaaacaacaggaagaaccgtttattttacatcagatgatcttgcagactgggagtttcagggggatttctgggcaccggatctgtttacgatgcatgagatgccggatcttttcaagatgggagactggtggtatctgatcacaacagaatattcccatgcatccacacaggtgtaccgtatggcaaaaagcctgaaaggaccttggatcgcaccggatgacgatgcttttgacggaagagcttattatgcaggaagaaccttcatgctgaacaatcagaggattctgtttggatgggttccgacacgtgccaacgagacggacagtgcaaatctctggtacagaccggaggcagataaagaagattttatctgggcaggaacttttgtcgcacatgaactgtatcagagaaaagacggcactttagg

SEQ ID NO: 2597 - DNA, 2385 bp, Unknown
  gut microbiota DNA sequence
cctccggggctcgccactggttttggcaggaactaatgtggtgaaagttgctgtttttgatagtatattttgggaaaatcagaagagagaatagaatgtaaaaaacatgcgatttttttactcagaggtaatggatacccagcaagaaggcgggcaaggttcccctggaggagacactttgttgcattgcatccggaaggagctgccagtggcaggtcctgtaggtgtgcggttagagtgagctttaagatcctctgcttacggagacttaggctcgagcgctctcgcgagagtcttagtcgcagttagcagatagcttaaagtcactctgcacacgtctccccaggggaaccttgcccgccttcttgcgtccggggaacgattatacctccccggtgatcttccggtagaagtttgccatcgtaacctgcatataagggatcacccacaaaagtccgatcccgcatgcaatcgcgcccaacaaatagattccgatgaagctgagctgcagataaaagaattttcctttctttcctttcatgatccgcacgctttccttgagtgcctgcatggcttcgatgtcgatgtagtcggtcaggaagaacatggtctggctgaacatcagggagaggatcaggtagatcacgagtcccacgcacaggacggcggtgccggcaaggaggagagttacagacttctggcggtagccgtagatgcaaagtccgctgcccgggaggatgcacaggtaggtcagaagaaggatcacaccctgcgccaggatcacgcggtccgggtggtgtttgaaaccgtagaagagatcctgaaagcggatgtcgtagcctctggcggtatcaagggcgatctttagcagaccgatattcagtaccgagaggatcagtgagagaataaaggtcgacagataataaaccacggtgtgactgataccaagcgtttccacggtggcggaagtagcagtcagcgggttcaggatggatgaggttccgagtaccagatccatcagattcgaagcgaccagtgtgatcaggatgtagagcacattggttccgataaacgttccgtattttcccgaaagctggtttcgggccatttttttcagttcttttgatgaaatattcataagtcaaaaacctccataaacaattacataccgccctggtacatctcataaagctgctgatactgctgaaggagttccgggaaattctggtagacggtgactgcggcgtaaataaaaataacaatgccaaggcaaagaccgatgctggaaagaatacatcccagtcttgcctgcgaatccatcttatcccctttgcgggagagcagagcgaataaaatgccgagcgctcctaccgggaaagaaagtccgctgaccagaaagaacagggaaagcgttccggcggtcatggaagcggaactgaaagcattgccacgcttcggcggcggagtcatccgctgttcctcctcctgccaggagccgggatttggctgttgatcgttgtacatgatgataacctcctgtttaaaaatcgataatatttatgaaaaacagatttgttttaatttttcagttatctttcagtataccacagaagtaacgcggtcgaaagcaggaaaatcagaatttgacggaatctggcagtgatcacagggggacaggaaaaatcggcattgacaaggaaacccgccttttggtaaggtagtacaggacacaatgaaagaaaaacgtaactgtgaagtagtggacagttacaaaaggagactatacatggatattattcaggcattaacacaggaattacaggtagaaaagtggcaggtagaagccgctgtcaaactgatagatgaaggaaatacgattccgtttatttcccgatatagaaaagaagcaaccggttccctgaacgatgaggtactgcgtaacctgcatgagagactgctgtatctgagaaacctggaagataagaaaaaacaggtactctcaagcatcgaagaacagggaaaactgacggaagaactgaaaaaatcgattctggaggcacagactctggtagttgtagaagatctgtaccgcccgtaccgtccgaagagaagaaccagagcaacgatcgccaaagagaaagggctggaacctctggccaatctgatcctgcttcagatgacagacaagtccatcgaagaagaagcggaaagttatgtatctgaggaaaaagaagtaaaaaatgtaaaagaagcgattgcaggtgcatcggacattctggcagaatctgtggcggatgaggcagactaccgcatccgtatccgtaagatgaccgtaaaatcaggctccatcgtatccagtgcaaagaaagaaagcgaaagctctgt

SEQ ID NO: 2598 - DNA, 5712 bp, Unknown
  gut microbiota DNA sequence
tcggtattggtgaaggacaagaatatttatggtacgaagatgcttccgcttccatcgcctacgtttgtggtattttataacggaaagcagaagatggatgaggaaagcgagctgagactttcggatgcatttgtgaagaaacaggagaatccgaatctggaagtgattgtgaaagtaaaaaatatcaatatgggaaacagccaggaactttttgaaaaatgcagaccgatgcgggattatatgatctttgtggataaagtaagaaggtattcacaggagcagaccttagaagatgccgtggaacagacgattcgggagtgcatggaagaagacgtgatggctgattttctgaagagaaacagggcggaggttgtaaaaatgtgtctttatgaatatgacgaagaaaaacaaagagaattcgacagggaggaaggcagagaagaagagcgccagaataccctgagagaaaaagcacgggcggatgaagaaaaagcacgggcggatgaagaaaaacttcgggcagatgaagcctttcggaaaattgctatgttggaaaaacaactggcagagttaaaagagtaaaagaaaaaatatggtaagtgactgtgttcggtattacagattcattcgttgactgacagatatgctattctatataatgtaattatacatactgaaaaatgaacctgtgggtgtcagaggacttattttacgagggataaaaatgtggaacgaagagatgatcataaagttattttttcaaaaacataaaaaagaaagacttctatgggaattatcaacgaacaaaagagaagaagcattgaagtctttacatgatttaaaatatgtaaaaaaagaaataatgcattcgataccatactatacagaaaaatacttggagaaggaacttggaaaattcggaaattttacaaatgtatattacatgggattgtcgtataccggaatgttacccctgaaaaaagcaatcgaaagatcacgggaagaagatgagggatgcattatttattgcggagagggaattggatactgccatacggaccatgaagaaggtgctccgctggcatatctgttaaaagtgaaaaattacagggatatcgagaaaaactatgattgcacatttggaactgaggggatagaagaatggatgctgcatgagtagagatttttggggaatgtttcattggcagggaacaggttattacatggagtttagactgctgtctttggaaaacaacaaatattaagaataagactacagaaaggatgagatgcatttgcaaaactcttctctgtagtcttaaaagcatcacaaaaatgaatgcaacgagtaaaatgggaaacttttaggagaaatggagaaagtgtaatggaaataaaaagtctgttgattgaagatacaacgaaagaagaaagaatccgtattgtgcaggaagggctgaatcagtgcggcggagcatgtgatttctgtaatggttgcgacaacctgggtggcggatccgtggatactttttatgaaccgtatattaacggagaaaaagaattgcgtgagattaacgaagagtacagaaaaaatatgggacttgtgagataggtggtgagtatatgagaccgccggagatagaacattctacggaagaagagcgaagacaatatataaaaaataccttccgatgcattgcggattgtgatatgtgtggattgtgtacggtattccacggaaaagatccggaacttgcctatgcggattatatcagtgggaagcgggattatctggaagtatcgaaggattacagataaatgtaaggtttcctggttttctatggtatatagaagaaaacaggtgtataatgcagggcaaagaccgtgagaaacgcgggtgcacctgggaaattcataagaaaatatcgggtgcaaaaagaaaggacgaggaaagatggacatgacgagaatagaaaaagtaatcgaaggcatgcgccagatgaatctggaacagtttcttgtgacggatccgatggcagtgtattatctgacgggacagtattatgcatgtggagaacgtatgatggttctccgactggatgtggaaaaagagccggtactggtgatcggaaagctgtttccgcaggatgaagaaaaactgggaatcaaagtcgtatactttgatgataccgatgactgtgtggaagttctggcttcccatatgagaaaaggcggaaccatcggtatcgacaagacctggccggcgcggttcttgcttcgcctgatggaactgcaggtgggagatgcttatgtcaatgcatccacaattatcgaccatatccgtcagatcaaaacagcagaagaacaggaaaagatgcgcgtggcctcccgttgcaacgacatcagcatcgaagaactgattccactggtaagcaaaggaatgacagaagcggaactgggagaagaactcctgaaaatctatctgaaaaacggtgcccagggacattccttcgagccgatcatcgcatacggcgcccatgcagcagatccgcatcatgaaaccgacgattccaagggaagttatggcgatgccgtcgttctggatgtgggatgcctggttaacggatactgtgccgatatgacaagaaccgtctttatcggaaaagccagcgaagaggcaaagaaaatctatgagatcgtcaaagaagccaaccgccgcggtatcgaagcagcaaaaccgggcgcaagattctgcgacgtagaccgtgcagccagagactacatcgaagaacagggctacggtcagtacttcacccaccgtaccggacacaacatcggactggaagtccacgagtttggcgatgtctccttcaccaacgaagaagtcctgaaaccaggcatgtgcttctccgtagaaccgggcatctatgtcccaggcggcgtcggcgtaagaatcgaagacctggtcctgatcaccgaagacggctgcgaagtcctgaaccacttcacaaaagatctgatcgaagttgaagcataagagaaaataaaaaagaaatagcacccaaaatgctatttcttttttattttctcttaattttattgttgacatatctcgtataattgcatacaattataccaagatacagaaatacaagcatgcaattaaaaaataaagcgaaaaagcacagaatcaatctggaggcaactatggaatatcaggaacaatccctcggaggacagatcttcaaccggatcaggaacgacattctctccggcaactatgcacccggcgaagaactgaaagaagcgaccttgggaaaacagctgggtgtcagccggacaccggtgcgggaagcactgcggcagctggatctggaaggcctggtggagatcgcaccgaaccgaggtgccaaagtaatcggcatctcccggaaagatgtggaagacatctatcatatgcgggcaagactggaaggtctggcggcacgaaaagctgcggaaaatatcaaagaagaagaactggcagagatggaagaagtgattcttttatccgaatttcatgtaaagaagccggagagcaaacagatggtccggctggatggaagatttcatgagatcatgtaccgggcatcgggaagccggatgctcgaacacgtgctgaccgattttcttcattatgtgaaaatggcgcgctcccattccgtaaaaacagaacaccgtgcgcaggaatccgtgaaagaacataaaaggatcctggaagcaatcagacaacgagatggagatctggcggagcagctggcaaacgaacatattcagcatgtaatcgaaaacctggatctgcactgaaagataccaataaaatctgtaaaagagaaaaaccagaaacctcaaacagttcgaaagacaaaaagcagaataaaataaaagaataaacaggaggagataagaaatgagtaaaattcagatgacaacaccactggtagagatggacggagacgagatgacaagaattctgtggaagatgatcaaagatgatctgctgcttccttacatcgacctgaaaaccgaatactacgatctgggtctggaacacagaaacgaaaccgatgatcaggtaaccatcgatgcagccatggcaaccaagaaatacggtgttgcagtcaaatgtgcaaccattactccaaacgccgcacgtatgaccgagtacaatctgaaagaaatgtggaaaagcccgaatggaaccatccgtgcgatccttgacggaaccgttttccgtgctccgatcgttgtgaaaggtatcgagccatgcgtaaagaactggaaaaaaccaatcaccatcgcaagacatgcatacggtgatgtatataaaaataccgagatgaaagttccgggacctggaaaagtggaactggtctataccgcagaagacggaacccagacaaaagaactggtctttgatttcaaaggacctggcgtggcacagggcatgcacaacctggacaactccattgaaagctttgcaagaagctgctttaactacgcactggatacgaaacaggatctgtggtttgcaaccaaagatactatttccaaaaaatacgaccataccttcaaagacattttccaggaaatctttgatgcggattacaaagaaaaattcgaagaggcaggaatcacttatttctatacactgattgatgatgccgtagcccgtgtgatgaaatcagagggcggttacatctgggcatgtaaaaactatgacggcgatgtgatgagcgatatggtatcctctgctttcggttctctggcaatgatgacctcagtactggtatctccggacggctactacgaatacgaagctgcacacggaaccgtacagcgtcactactacaaacacctgaaaggggaagaaacatccaccaactctgtggcaacgatctttgcatggagcggtgctctgagaaaacgtggagaactggatgacaacaaagaactgatggattttgcagatcgtctggaagaagcgaccatccgcaccatcgaagaaggaaagatgacaaaagacctggctctgatcacaaccatggaagatccaactgtattaaacagtgaaggatttatcaaagcaatcgctgagaatctgtaagagcagaaataatagagaaaaacaggaggaagacccatgggagtagaagaatttctgaatatagaagaagaacataaacgggagtttagcgaactgttacagtactgtctggcatccggccggatcgatcagaacctgtatcaggaatatgatgtaaaaagaggtttgcgtgactccagcggaaaaggtgtactgaccggtctgacagagatctcggacgttgtcggttatacgtatgaagacggaagaaagatcccggcagacggacagttatttttccagggatataacgtagcggatatggtggcgagcctggagaaaagaaaaaaaggattcgaggaagtcatctatacactgctgttcggacgtatcccgaacgcaagacagtcagcgatgtttaatgatctgctgtcggatatgatgaatctgaacaaccgttttatccgtgatgttgtcatgaaagcatccaatgaaaatatcatgaatgccatgcagcgatgcgtgctgacactgtacacttacgatgataatccggataacaccagcgtggaaaatgccctgcgtca

SEQ ID NO: 2599 - DNA, 2595 bp, Unknown
  gut microbiota DNA sequence
ctgcacgccatcacccatccgatcactgcctatcggaatgcctgcaaatattttcatctaaacaaggtggaaaaagaagtgatcaccaaacatatgtggccggtatccatgatcccgccaagatatccggaaacgtatgtgatctgtctgacggacaaatactgtggctcacgggagatcatggatcattatgcaaaaataatacagaataaatactggggcaaaccatttgcctggtttttaaaacagatctttgcgaaagtgccccgggcagatctacttcaggagatgctgccggaactggtttcgatggagagggctgcaagtccggaatcctctttcgcccagcagagatcccgccgctcttcccggtggaaccatccgtcaggaagaagaccgcgccgctcatagaccggtgagaaagtccgtaagattccatcggtgatggtatctgccatctgcacgacgaaggaaagccgtgtagtctgaagcagaaaatgttcaaaagaaccggaagcgttgaggattccggtaatatagagatcgccaaccgccggaagatttttgtgcactccggatcccggatggatcggaccgataccggcggtaatatacccgatatgtttctgagaaccgagagaggcatccactgcgagaatcagcgcagacggatgtctttttttgatgccggaaagcgtagattccagattgagggcgtgaaccggtgcatccagcgttccgtagatatgaatatttttccagcgataccgggaaagctgctgaccgatcagaggtcccagactgtcccctgtgatccgatcacttccgatgcacagaatgatgatctccttccaggaacgatcgatctgaccgatacattttttcagcacatgcgccagttcattgctggcggtgcgtttcttctctctgatataatacgaaacttctctgcgcattcggatcacgcgtcctttctgtgtgataacatcaaatatttacctatattgtacccggagaaacgaaaaaatatgcccgacggttttccaaacaagaaagaacctgcggaaaatgtcgttaaaaaccccgtattttcctgcacaaagcggcaaaatccgcacagaaagcggcgtatactgggttctaaaaggggtgaagagtatgatcgaagtcatctataaagaagaaaccgataacacaaaggaaaatgcagaatgtgtgaaactgccaaacaacgtaagacaaatcggagagatcaaaggtcagaaaaaaatatatatggaagactatgtctacacctttttgaaaaagatcgcgcggaatccccacggagatgaggtggcggcgattctgttcggttcctgccactggaccagccagggcgattatatttttatccgaagcgccctgcagatccgggatctggaactttcgccggaacatatccggtttgacgataaagtctggggacaggtgtatgaggacagcaaaaaatatttcccggagcaggagatcgtcggctggtttgctggatttcccggatttaacatggagatcaccgaagagatccgaaagacgcatctggatcattttgcaggaaatgacaaagtgctgtttctgatggagccgggggagatggaagaggctttttatgtctatgaaaataatcagctggtgcggatgccgggacattttatctattatgaaaaaaatgatccgatgcaggcgtatatgatcgacaggagtgaaaataaatccatcgaggagaccgaacatgtgccggaccgtgcggtgattgattttcggagagcggcgcgggagaagaaaaaagagacaacggaagcggagaaagcagagaaggcgaagaaacatccggtgcgaaatcgctggctggcaggagcctgttgtgcggctgcgatgcttgcggtgggactgccctatctgaaccagtatcagaacgtggaggaggcggtgcagacgggaagtcagcgtgttgcagtgaccagcgaagcacagaaggctgtcgaagagccgcttctttccccgacagtgacggatgagccggaggagagtctgacaccggttccgacacagggaaacacacaggagagtctgaatccgcaggcgaaccaggaagcttcagaagaaagcagtacaccaacgttgcagccctcagcagaaaaagaagaaaaaaaggaagaacagcaggcagcagccgatattaagaccattacctatacgatccagagaggggatacgctcacaagtatctgccagaaacgctatggaacgatcagccggatcgatgagatctgccagctgaacggaatttccccggaggatatcatttatgcagggggaaaactcctgttaccggagtcataagcgtgctactgttcactccgtgcccagtaacacgctgcacgatgcacagaatttatgctgatcgcataaattcgcgcgatatgtctcgggttttctgtgaccttcgctcacaaaaaacgcctcgcgggatattactagagcgtgtctgaaaaatcatttccgcaatctgcaagccccactttgcggtatattttaccctcattcggttgccgt

SEQ ID NO: 2600 - DNA, 2563 bp, Unknown
  gut microbiota DNA sequence
ctcgacggcaatctggacccgtttatcaacggttatctcaagtggatcgcccttggcgggaaacagccggagaacgcagacgaagaaatgtaaaaaggaggcaggcatatgggcattatcagagcgatcaaacagaccgtcggcggtacactcgccgatcagtggctggaagtgatcgaaccggaaaatatgggaggtcagaccgtactgaccgcaggtgtccgcacaggaaaaggagcaaaccgaaaaggtgggaaagataccatctccaacggatcggtgatccatgtatatgagggacagtttatgatgttgttagacggcggacggattgtggattacagtgcagaaccggggtattttactgtggataactcctctatgccgtcgatgttcagcggaagtctggacgatgtggtaaagaattcttttgaccggttccgttttggcggggcaacaccgacttcacagaaagtgttatacctgaatcttcaggagatcaagggaatccgtttcggcaccagaaatccgatcagctatttcgataatttttacaatgcagaactgtttttaagagcgcatggaacgtattccatccggatcacagatccgatcaagttctatgtggaagccattccgaaaaacaaagaccaggtagagattacagatatcaacgagcagtatctgtatgaattcctggatgcgctgcagtcctccatcaatcagatgtcagcagacggcatgcggatttcctatgtaccgtccaagagccgggaactgtcaaaatatatggcagataccctggatgaggactggagacagaccagaggtatggagatccaggcggtagcaatcgcgagcctgtcctacgatgaaaaatcacaggaactgctgaatctgagaaatcagggagcgatgctgcaggatccatccattcgggaaggatatatgcagggcgcttttgcgagaggaatggaagcggcaggaagcaatgcaaacggcagtaccatgggattcatgggaatgcagatgggagcacagatgggcggcaatatggcagcttccatgtcggcagcgaaccagcagcagatgatccggaatcagcagatgcagcaggaggcagctgcggcagcacatcatgcagcaaacgagccggatatctggatatgcagttgtggacagcaaaataccggaaaattctgcagtgagtgtggacgtccccgtcagatgggaccgtggacatgcagctgcggacagaagaataccggaaagttctgcagtgagtgcggaaaaccaagaccataaggcaaaaagacgaagcagatatatccatataggaagatgaggaggagatcatggcggtagtcagtttcaaatgccccaattgcggcggcgaactggtatttgatccgaatacccagagctactcctgtccttattgtaattctgagttctctcaggaacagattgatacgatgcagaaagaaaaccagccgtctcaggaaacttctgaggcggctggttctgcaaaagggcaggaacaggaagaggcggcagtgtatgtctgcccaagctgtggcgccgagatcgtgacagatccgacgacggcagctacagaatgttattattgtcacaccccggtagtattatcggggagagtttccggggaataccttccgcagcagatcattccgtttgcaatcgaccggaaaaaagcggaagagattttcttggagaatatgaaaaagaagaaatttgttccgcacggattcttcagtgcgaaacagattgagaagatgaacggtgtgtattttccatactggatggtggactggcggggagatgcctcgatggaggcagaggctacgaaagtccgcacctggagaacgggtgatacggaatacagggaaacacagttttaccgggtgtaccgggaaggaaatgtggaatttgatgatatgccgaagatcgcactgcaaaaagcgaaccggaagctggtagagggtgtgcagccgtatgaccagaaggcggtaaaaccattttccatgggatatctctccggtttccaggcagaacggcgggatctggaaaaagaagcgtttggagcggagatcgcgcgggataccgagcagtatgcaaaaagagtgcttgaaaatgatatgcgcggttacacgacggtacggccggttcatcagcaggtgggtaaccgacaggagcggtggcgttatgcgctggttcctgtgtggacggtgacttataaaggaagaaacggaaagatttattattataccatcaacggacaaaacggcaaggtgtgcggagaacttccggttgattataagaaactgagcctggtatcagcactgatcaccggtgtggtatttcttttgggactggcaggaggatttttgttatgaggatgagaaaaaagacgggataccttctgttgacacttctgcttctgctggttccggtatctgcatgggcggatggcaccgaggtagacgatcaggcaggacttttttcacaggaggaagaacaggaacttaccgaccggatcgaa

SEQ ID NO: 2601 - DNA, 4055 bp, Unknown
  gut microbiota DNA sequence
gaacatggattttgtggtagtgacgacggaagatgcggaaggtaagacctctgaggaatatgcggatgattattatgattataacggatatgcggatgacggcgcgctgtatctgatcgatctggacaacggttcggtgtggatctcaacggcgggaaagatgattcggtatcttaccgatgcgagaattgatgcagtgatcgatgcgggatatgataatctgaaagcaaagaattatgcggacggtattcttgagatgctgaatgagacagagagttatctggaagacggaattccttcgaatcagtataactatgacacggagacgggaaaaatatcaagataccgcagtattacagtctatgaagccatcggagcggctgtgatcgcactgctttgcggaggcggatttgcagcagctgtgctgggatcttaccggttaaaaaagaaaacgtatcggtatccgtatgagagccaggcaaaggtacattttacgagaagggatgaccagttccttcatcgaagcatcacacagcggagaatcccgagagatccgccgtcgggcggtggtggtggcggtggaagccggagttccacacatacttccagcagcggtacctcacatggcggcggcggtcggagcctgtaatattttatgcgagcctgacttgaaaaacatgttttgccgcatttgcgaaaaaattcttgcactggatagcaatgtatggtaatatcttttgggcgactacaaatgtgtttctgatgcgaacatgcagagccacaggaaagaaagagaagacatggagaaaaagacaaaatattatgtggtaagagagaaggctgtctcggaagtgctcttaaaagtagtggaagcgaaacggatcctggattcggagcaggtaactaccgtgcaggaagcgaccgagcaggtcggcatcagccgcagttcattttacaaatacaaagacgatatttttccttttcacgatcaggcaaaaggaagaacggttacctttattttacagatggatgataaaccggggattctttcggatattctgcgcaccatcgctgaatttcgcggaaatatcctgaccattcatcagagtattccgattaacggaatcgcaacgctgacgctgagtgtggagattctgccggaagcgggagacgcggaagacatgatcggccagatggaacagcagacaggcgtacattatttgaaaatattaggcagggagtagaaaacagatgatacagattgcagtattaggctacggcacagtgggatccggtgtggtggaagtgatcaaccggaaccaggaaagcatcaataaaaaagcaggggaagagatcaacatcaagtatgtattggacctgagagatttcccgggagatctggtacaggaaaagatcgtacatgattacgaagtaatcgccaacgatccggagatcaagatcgtggtagaagtaatgggaggaaccaatccggcatatacattcgttaaaagagcgctggagagcggtaaatccgtatgtacctccaataaagaactggttgcaaaacacggtgtggaactgatccagatcgcaaaggagaaaaactgcaacttcttatttgaagcaagctgcggtggcggtattccgatcatccgtccgctgaattcttctctgacagcagatgagatcgacgagatcagtggtatcttaaacggaacaaccaactatattttaagcaagatgacaagtgacggttccgagtttgaggatgtgctgaagaatgcgcaggaactcggctatgcggagcgaaacccggcagcagatgtcgagggctgggatgcctgcagaaagatcgcgattctttcttctctggcattcggtcatcatgtggattttgaggaaatctataccgagggaatcacaaagatcacttctgcggatatccggtatgcgaaagcatttggcgcgaccatcaaactgctggcaaccagcaagcggatcggcgacaaatactatgcgatggtatgcccggtgatgatcaacggtgacagcccgctgttcagtgtcaacgatgtatttaatgcgatcgtgatccacggcaatatgctgggggatgcgatgttctacggaagcggtgcaggaaaactgccgacagccagtgcggttgtagctgacgtggtagatgcagccaaacacctgaaccgttttattatgacgggatggagcagcgagaaactggaaatgatcgatatcagccaggtagagagcagattcttcgtccgtatgaaaggcagctacaccgagagtcttgcaaaagtggaagaagtgttcggaaccatcgatgcgaaggttgtcgcagaggttggcaaagagtttggatttattacctctaagatgaaagaggaagaatacagagcgaaagcggaacagttcgataacattatcggtatgatccgggttcggttctaaggaaaaaaagttggaaaatggcatgtctgtgtcgttctgaaaaaggacggcgggcatgtcattttttgtgcagacaacgagtggaagtttgtacttgcacaagaccttgacgactgtcacgataatgggcaaaattcgcgcagattttaaggaaaattcgtgtggaaaaaacatgtgaccgtgcaggaaagaatgggaaaaagctttgaaaataatcgccatggaagcggttgacgcatggaaaaaaagggtttatcatttagtgcatatccatgtgagggcgcccggaacgggggtatcacgaatggaaatacagcagaggcaggaagcggattacgccacagcaggatgatccgcttctgtttgcgtagaaacacaggaggagaaacatgttaatcgtgaaaaagttcggcggcacttcggtggcggacaaagaacgcattttcaatgtggcaaagcgatgcatccgtgattatcagaacgggaacgatgtggtagtagttttatctgccatgggaaaatacacggatgagctgattgccaaagcaaaagaaatcaatccaaatccatccaagagagagatggacatgctgtttaccatcggggaacagatgtcggtgtctctgatggcaatggcgatggatgcactgggtgtacgtgccatttccctgaatgcattccaggtagccatgcacacgacaagcaattacagcaatgccagacttaaaaagatcgataccgagcggatccgccgggagcttgatgaccgtaagatcgtgatcgtcacaggtttccaggggatcaacaagtacaacgattacacaacccttggaaggggtggttccgacacgacggcagtagctctggcagcagcgcttcatgcggatgcctgcgagatctatacggacgtagatggtgtctacaccgctgacccgagactggtgccgacagcgagaaagttaaatgcgatcacctatgatgagatgctggatctggcgactctcggagcaggtgtgttacataaccgatcggtggagatggcgaaaaaatacggcgtaccgctggtggtacgttccagtctgaatgaatctgaaggtactgttgtcaaggaggttgtaaagaaaatggaaagaatgttgatcagcggcgttgccctggacaaagatgcagaccgtatctccgtaatcggaatcaaggatgcaccgggtagtgcgtttaaattatttaatacactggcaaagaagaatattaatgtggatattatcatccagtctgtcggacgtgagggaacgaaggatatttcctttacggttgcacatgataatctgaaagaggcgattgaactgctcgaagagtatcaggaagtgcttggttttgagagagtggattataactgtgaagttgcgaaactttcgattgtaggcgccggcatgatgtccaatccgggtgtggctgcaaagatgtttgagtgtctgtataatgagaacgtgaatatcaatatgattgcgacttctgagatccggatcacggtgctggtgaacagtgaggatgcggttcgggcgatgaatgcggtgcatgatgcgttt

SEQ ID NO: 2602 - DNA, 1561 bp, Unknown
  gut microbiota DNA sequence
gccgtgagagtaagactctggcaactattactttccagaacttctttaacaaatatgcgaaaaaagcaggtatgaccggtacggctctgaccgaggaacaggagttccgtgagatctacggtatggacgttatcgagatcccgacaaaccgtccggtacagcgtatcgacctggatgacgcggtatatatgacaaagaaagaaaaatttcgcgctgttgtggaagagatcaagaaagcacatgcgaagaaccagccggtactggtaggtacgattacgattgagacttccgaactcttaagcaacatgcttcggagagagggtatcgctcaccaggtactgaatgcgaagttccatgagctggaggcagagatcgttgcacaggccggtgtggcaggtgcagttaccatcgcgaccaacatggcaggtcgtggtaccgatatcaagctggacgatgaagcgagagcagccggtggattgaagatcatcggtaccgagcgtcatgagtcccgtcgtatcgataaccagctgcgtggtcgtgccggacgtcagggagatccgggtgagtcccgtttctatatttctctggaagatgatctgatgcgtctgttcggttccgagaagctgatgtctgtattcagcagcctcggtgttgcagagaacgagcagatcgagcataagatgctttccagcgcgatcgagaaggcacagagaaagatcgagagcaacaactacggtatccgtaagaacctgctcgaatatgaccaggtaaacaacgaacagagagagatcatttacaaagagagacgccgcgtacttgacggagacaacatgcgtgatgcgatttgcaagatgatcaccgataccgtggaaaataccgtggatatgtgtatcagcgatgaggtggattctgatgagtgggatctggtggaactgaatacgatcctgcagccgatcattccggtgaagacgatcaccaaggaagatgtcaagggtgttcgtaagaaccagttaaaacagaacctgaaagaagaagcgatcaaactgtacgaagtaaaagaagcagagttcccggaaccggaacagatccgtgaactggaacgtgtggtactgctgaaagttatcgacagaaaatggatggatcatatcgatgatatggaacagctgcgtcagggtatcggtctgcaggcttacggacagagagatccgaaagttgagtacaagatgagtgctttcgagatgtttgacgagatgatcgcaggcatccagcaggataccgttcgtctgctgtatcacgtaagaatcgagcagaaagtagaacgtgagcaggtagcggaagtaaccggaaccaacaaagacgaatccgtcaaaggaccggtacgtcgtgcggaacagaaagtatatccgaacgatccatgcccgtgcggaagcggcaagaaatacaaacagtgctgcggaagaaaactggtataaagaaaaagaaaaacggctgttgatgcgatagcgtagtcaacagccggaaatgtataaaatattgtataaggaaagagggtaaaaccttt

SEQ ID NO: 2603 - DNA, 581 bp, Unknown
  gut microbiota DNA sequence
aagatacagattatcgtaaataacggcgccggtaccggaagtgccgtaccggtctggaaagagacaaaagaatacttacaggaaaaagaaatcccatacaacgcctatctgacccgctacgaaaaacacgcgatgaaactggcaggacagatctgcgaaaaattcccggagggaccgatctacctgctggtagtaggaggggacggaaccatcaacgaagtcctgaacggaatccccgactttgaccgcgtccgcctcggcgtgatcccgaccggctccggcaacgatttcgccagaaacctgggaatcctccgaaacaccagaggcaatcttgcagaaatcgtctcctgcatcgaacaggaacaaaacggagaacccctgcagcggatcgatctcggcgaagtaagctgggaagactgtacaaaaccaagaatcttcggtatcagcgccggtgccggactggatgcgatcgtgtgtaagaaagcactccattccactctgaaaaaagtcctgaaccggtttcatctgggaaaactgacctacctgatgctgaccgtaaagaccttattttccatgaaaac

SEQ ID NO: 2604 - DNA, 669 bp, Unknown
  gut microbiota DNA sequence
aacgcagatgaaagaaatatgaaaaaaaatgtaagataagaagtaactattcagcaggtagaaactgtgaatgtactggacagttacgataagaaaagaaaggaacaagcatggctcaatacgataccacatggtttgaaaaaggacttgccgagctggagatcacattaaatgaaaaacagatcgaacagtttctgacctactatgaacttctggtggaatggaacaaagtgatgaatctgacggccattaccgaatacgaagaagtcatcaccaaacacttcctggacagcgtagcgtctgtcaaagtgtgtgattacagcaaaccgatgaaaatcctggatcttggaacaggcgccggatttcccggcataccgttaaaaatcgcttttccggatcaggagatcgtccttctcgactccctgaacaagcgcgtcaaattcctgaacaccgtcattgaaaccctcggtctcacaggaatccgcgctatccacggaagagccgaagactacgcccgtcaggcagactacagagaacagttcgatctgtgtgtctcacgcgctgtagccaacttaagcaccctgtccgaatactgcctgccctatgtaaaagtgggtggtcactttatcccgtataaatcaggaaaaatccaggatgaactgaccggag

SEQ ID NO: 2605 - DNA, 3925 bp, Unknown
  gut microbiota DNA sequence
ataggagcggatgatcttatccccattttcatagccatagacatcattcaaaccagaaaacttgcggatattaaaataaattacagcaaactgatactgatctgcattctttttcaaaatatgctctgtctttcgaagaaatccgctgcggttcagataaccggtcagaggatctttttccatctccaccgtccggtcttccactgcgatcagcacctcccggtactctttatccagccatcggtaagtatatcgttctgctccgcgctcctcattataaaccgtaagtgaatatgtccctgccatctgtaagttttcttccatatagtccagacgagtggaagttacaaaccagtctctgtctttcttttccacccgatgttcacacagtttttcaataaattcacggtattccagcggctggtcacagaccagttccatatcatcaaatgtatgtttccgtacaaatactgttttttcctgaatatccagcacagcgatcatccggtatttatcctgtaaaagtaccttgctgatcacccgattgacatacgggatggtatcatttctccagattgcacagcactcgatcgtgtgtttccggggatgttcaaacatctctatatttacatgataataagtaatgtactttccttttctgaaccggtagccaagctgtacctgtctttgccccgactggaaaagccgcagcagttctccctgcataaaagtacgacggaatttctgttcttcttcgttatccataatgtacggataaatctgctttttcagccacgccgtgactccaccggcgcgccctgtctcgccttcccagcacgcctgttccgggttttttacttcccatacgatattattcgaaatgtcaatatacagaccatactgatccccgtcttctccgagaagcatcagtcgctgtatccgtttttcgtaggatgtctcttttaaagatcctcccatggtattccccctatagttcttccttcttctttcgtgccagttctttcatctcttttgcgctttccatcgtatgttcggtgatctgcgcgccaccaaggatccttgcaatctcctctaccgaagcgtcttcatccagcagacgaatctgtgttcttgtcacctgatgatccgtctttttggcgatctcaaaatgttcatctgccatcgctgcgatctgcggcagatgcgtgatacagatcacctgatgatttcttccgatcactgccatcttctccgatactttctgtgccgttcttccgctgataccggtgtcgatctcgtcaaagatcagcgtctctgtctcatctttatccgcaaggatcgttttgattgccagcatgatacgggaaagctcaccgccggataccacttttgccagcggtcgtaacggttctcccgggtttgtggaaatcgtaaagcagattttatcgtttccatttgccgtatagtgttccgtaatctcaaaattaatctcaaacttcacatccaggaaattcagatcctgtaatccctgaatgatccgctcttccagctgttttccataatttttacgcaattcagacaattcaccacagacagctgccagttcctcctccgctttctgcgtctctttttccagtttttctttatactgttcaaaatgatacaggcgatccagttctttctgcttttcttcctggcatgccagaatctcttttacggtagaaccgtatttcgctttcagacggttcagcaggttcagtctctgttctgtctcatagaattcttcctcggaaaacgtcatattttccacatagtcgctgacttcacgattcacatcagatagcagactttccacatcctgtaaaaggcttgcaacctgctgcagcgcttcatcgactccaagcatccggtttgtctcctgtacggcccggccgaccagatcctgtgcgccgttgtcgttgcctgtatagcctctgactgctgccatcgcttcgaggatatttctgctcgatgacatctttttgtactgtttttccagttcttcatcctcgcccgggcgaagtcctgcttcctcgatctcctgcaattcaaatgccagaaaagaaatttcccgttttctggtttcttcgtccagttgataggatgtcagttctttctttttctgactccagatctgaaaatgctcccggacggtctgttttttctcctgaattgcttctttcccgtaggcatccaaaatctttaactgctgatcctggtacaacagggactggtgttcgtgttgcccgtgtatatccaaaagaagagaagagatctcccggatctgggcagccgtacaaacctcaccatttaatcggctgatactccggtttccggtaagttttctggatataatgatctgcccttcttccacagagatttccttctcttttaatcgttccacgcatcctggattgtccacctgaaaaatgagttccaccagcgcaggtttttcttcatcgcgcagcatttctctggacattttctgtccgagtgcaaggtttacggaacccatcaggatagatttaccggctcctgtctcaccggtaagaatatttaatcccggcccgaattccacttctgcctcatcgatgagggccaggttttttacatgtaaatatgttagcattctgctcctttttaagtaatgtactccatgttaataaaaattttgtctatacaatcattttccgaatcttttccatcagtaccagaccttcgtctgcacttcgtgccacacacatcagcgtattgtcccctgcgatgctgcctacaatctccggaatctgcatctcatcaagtgctgcagcggccgccatcgccataccggatacggtctttacaaccaggatattctgtgccagatccatcgactggaaagaggtacgcagcacattcgtgtattttctgctcatctcctgatcgacgctttgcagtaccgcatagcgggaacccccgcccggtttggatattttcgtcagtttcagttcccggatatctctcgataccgttgcctgtgtcacctgaaaaccgctttcgttcagtttttctgccagttcctcctgcgtctcgatatcatactgactgatcagacggatgatctgggaatgtctctctatcttcatgattattcgctcctaattatttcgcatcttcttacgaagaatttccagaaaactaatgttgttgatcttgatgatcctggttgccttggttgatttttcgatccgtatccggtcaccggtcaccatcggcatcgcggctgcaccgtcaaaatacgccatgccgctctcgatactgccatctcttccctctcccagttccacctcgatcacatcttccggtgaaaatacaatgcttctggtattgagggtatgcggtgccagcggtgtcatcagaatcatggatgccgcaggagatatgatcggaccaccggcagacagactgtagccggtcgatcccgtcggcgtggaaataatgattccatccgccttgtaggtgttcagataagtatcattgacataattgttaaaccgtaccacacgcagagagccctctctgctaatcacaatatcattcagggcgatatcgctgcccgctgcctgcccttcatggatcaaggttccgaacagcatcattcgcttttcaatcgtaaaccggtcactcatcagccggtccatcgccgggtagatcgaatactggtcgatctccgccagataaccgagcgttcccatattaataccaaacaacggaatctccagatccaccacgtcccttgccgcctgaagaagcgttccatctcccccaagcacaatgatacattccgttccctccgggatccgctccggatctgtatacgaataggactgtccttctttcttctcac

SEQ ID NO: 2606 - DNA, 2543 bp, Unknown
  gut microbiota DNA sequence
ctctgtttactgaacattttttcttcgaaagtaaacgtatccggaaagcaggaagtcatcaggaaaattcaggagacagccaaaaacgtgcgatcagaatttgatccggtacaaaatccagataaaaagaaatgcataaacagaaaaaatataattgaatcatataaaaaacttttgtggaactttactgatatctgtaattgaaaattaatgattggtatatgaagtgttctcttcagatattatagaaagtgctttaatcttttcggattaaagcacttgagaggcgcagaccggatttgaaccggtggatactggtgttgcagaccattgccttaccacttggctactgcgccattatgaaattgtagaaaatctttctcagatttttcagtgactccgacgggaatcgaacccgtgttaccgccgtgaaagggcgatgtcttaaccgcttgaccacggagccttgttttttgtttgtgtcgtatctcagtgacgaatgttattctatcataggtttccgaagaatgcaagcacttttttaaaaaaattgtatctttttttcagaaattcctgtacaataagaacaacagggaaaatccggacgttttccgtcggaacctgacagctttttagccaactatcgcagaaaggaatatctcttatcatgaaagaaacgatcttactctttaatataaccgaccgtaacaccaaactgaaattagaacgcattctcttgccgctgaagctccggatccgacggattccggtatctcagtatggacagacactggctgcgctgtgtggtctggaagaccctgttgctctgccctccgagagcgctgctaccccgtctttttccgatcctatgatgatctttgcaggtttatctgaaatgaccctggatcgcgttctgacgggcttacgcgcacagcagatccgtattccttataaagccattctgacgcccaccaaccagcactggacaccggaggaatgttttatcgagatcaaaaaagaacacgaacagatgcatggcttgaatcaataatctgttctgtcaaccgttcttagataggaacagccggttcgaaccacaaaaacattcaaaccggctattcctgtctttactcattgatttgtataataaatactcaatctccccgtttccatccgatcagttaaattcatcctcttccacatacttctcattcgaataggcaagaccattctgatatttcacagtcacatacagtgtctcgtctccgtcctgcactttcacatagcatacatcgtctttgaacttgtccgtgatctcgatcttctgattcttataatacagccataccgttccgtcgtcgttatattccacatccgggctgttcgcttcctccagaagttcctcacctgtcaatggacgttctgtgccatccgcttcataagcgattccaccaccgcttatttctctcgtttctccgttttcatccggatactctatggtatatgtgccatcgtctgaaactgtcatgtttgcagtcgtctggtctccgtgtaaccatacctgaaccgttctctgaataccgccaacatttgcggcataagcggttcctgttccgcccgccagaagaatacatcctgctagtgcagctgcggctacttttatgttatgttttttgtttaatctgctcatattctctacctccacagaaaactgatcggaggtatgcaacaccgaaaatgcctgtttgtaacgttctttatttgtcatcgtcccattcctccttcaaagtctcgcgaagcaacattcttccacgggataatcttactttgacattactctccgaaatcttcaggatctccccgatttccctgacactgtaatcctcgtagtaaaacagatgaatcacaattctgtatttttcagggagtcccatcacggtttcaaacagatgctccgactccggtgtctcaaaaacgagtgtctccatataatcttccagggaagttttattcttcctccagaatgaaagattcatattcttcgctttattgatcgccacccggatcagccatgcccgtatatgctgctcactttcaaattcttttttgctgttataatattggagaaacgtatcctgaacagcatcttccgcatcctgctgatttttgcatacgttaaatgccactgcgtacagactgttctgatatcgttccaccaattcctgtatcgtttgtctcatgagtctctcctgtatcaataacccttgcgccagcttaccggcgttgattatttgttttcaaaggcctttcactaataatacaaataacagcaggtaaaggttacaaaatttcaaaacatatataaaattatcctgaaccacaatatatctgtaaaatttgacctgacaaatatctgtataacaaaaaaacctgcaggatacattctcttgtatcttacaggtttcatctatctcgttcctcccggagccttcccacacccttttctggcataaaaaagctcccccagttggactcgaaccaac

SEQ ID NO: 2607 - DNA, 6334 bp, Unknown
  gut microbiota DNA sequence
gcaaaggcagaagggagcttgactgcgacaccgacgggtggagcaggtacgaaagtaggacttagtgatccggtggtattaagtgggaatgccatcgctcaacggataaaagctaccctggggataacaggcttatcactcccaagagttcacatcgacggagtggtttggcacctcgatgtcggctcatcgcatcctggggctgtagtaggtcccaagggttgggctgttcgcccattaaagcggtacgcgagctgggttcagaacgtcgtgagacagttcggtccctatccggcgtgggcgtaggatatctgagaggagctgtccttagtacgagaggaccgggatggacggaccgctggtgtacctgttgcagtgccagctgcatggcagggtagccaagtccggaagggataaacgctgaaggcatctaagcgtgaagcccccctcaagatgagatatcccattctataaaagaagtaagaccccttgaagacgacgaggtagatagggcagaggtggaagtgcagtaatgtatggagctgactgttactaatcggtcgagggtttgacctggaagcggtcaaccgcaggaagtaggaagataggatgttacgtgtgtgcagttttgaaggtacatggagagagaagaaacaaaaaagagagataagaaaaaagaaataatcctccatagctcagtcggtagagcatgcggctgttaaccgcagtgtcgttggttcgagtccaactgggggagcttttttatgccggaaggtgaagaaagctcggaggaatttatataaaaaatgaaaaatcttattgacaaatgaggttttatcatatataatagattttgctgatgagcaatcagtaaatatcgaagcgtggctcagtttggtagagcgctgcgttcgggacgcagaggtcgtgggttcgaatcccgtcgcttcgactccttggcaggggcaccggaacacttgagaaatcagggttccggtgtttttcgttgcattgcatatcaataattggtccactggaccaattttgattgtgttacataataattatggatccggaatcagtaaatcgtagaaaaatccactgtgagcgatagttttttctattgcaacagtggatttttctacgttaagatgtatatggcaattcagactgaaagacaggacagaaaacaggagcacaggatgaaaggaaaaggcatacattcaagatcgatttttgtacagctggtagtattttcgctgcttgccagtctggttccgatcttgatcatcagtatatttttgttttataagctggacagtacggcacagacggagacgaaggattatcatgagcagattacttcgcagtatatgaaaaatatcgaggaaaaacttcagcagtaccgaaacagtctggaagtaatcgccaataatacggtgatcctgaaaacactgacggatgaaacgatgaatccgtatgacagaggaaaggtggtcagccaggaggtagataactctcttttgctggagatgcagagcgaagtaagaaactgtatggtctattccagagtacaaaattgcaaagtatatggcagccgggcgtcgatgatgcagcaggcgagcagagaagtatggtatttgcaggagagggcgatggaagatgactggttttcgtattttgccctgaaagattcggaaccgattctgtcactggtgaaggatatcgaagcgttggatacggaacacctgagccggtcacagctggggatcataaaactggatgtggcgatgaaacgactgtttgtaccggcggcaacgggaggggatgagagtgccacttacgatgtcattgtttataaaaacgagggcgaagatgccaggatcctgtatcagacggtgaaaaataacggaaacgagatcttaaaaaaatactgggaagataccgtcacgaaaaaagatggtgcaaattccaacggacagatttccacgtatactgtagatggtcagacactggaggactatgggctgaatctgctgtttttatttgataatcaggattcttggcagaagcgtgtggagattatcgaggcgattcttccgcttctgcttctgctgatcgtgacggttaccgggctgatttactggtacagcaaagatttttcttcccgtgtggaacttctggtgcaaaaattccgccgtgcggagacaggggacctttcggtgggagaagagattggcggaagcgatgagattgctgtcctggatcagcagtttaaccgtatgctgaaaaaactggatcagctgatcaaaaccagttatgtgcaggagctggaaaataaagaggcacagctgaagaacctgcagctgcagatcaatccgcattttctgtataacaccctggagacgatcagctcgatcgcggcggtgaagcaggtatttgtcgtttgtgatatctgtggaaaactgggagaaatcttccggtacagtctgggaaaagactacggagagatggtgccgctggagcaggaaatgaagcatattaaaaactatatgtttattcaggagattcgtcacggagaccggttgcaggtattttataatattgatgtggatgcgatgcatgtatatattccaagatttatcttacagccaatcgtggaaaatgcgatttcccacgggctgggcaatctgaccagtgtcggaacgctggaaatctctgcatttgaaaagaaagaccggttgtatatccagatcggggatgacggagaaggcatggaggcggaaaaagttgcagagattgtacggtttatcaataccgcaaaaccggtggaaggaaagaaaaatataggaatccgcaatgtgaaccagagaatcaagctggcatgcggagaacagtacggaattacgattgagagcactccgtaccagggaagtcgttttaccatacaactgccgatcatgagagaaggagaagaaaatgagacataatgtattgatcgtggatgatgaacagctgattcgccaggggttacgggcgcgaatcgaatatctgggaattgatgtggatgagatttttgaggcggacaacggtctgatggcactgggaatccaggatgagcatccgatcgatctggtgatcacggatatccgaatgccggatatggacggtctggaactgattcaggagatgcagaagaaaaacaaccagatcaagttcattgtgctcagtggctatgcagagttcagctatgcggagacggcgatccggctgggggtaaaggcgtatcttctgaaaccggtatccaatgatgatctgaaggatgcgtttgataaggcgtatcaagagatggaacagacggcgagcatccggcaggaagtacagatgaaaaaacggatggatcgggaaaaacatgtgtatcagcaggagaaagcactgaatgcactcttttccagccgggaaaccagcgtgatcacaagggaacagctgtgtacaatctgtggatgtgatgagcaaatgtggggaaggggacagatattttatctggcggtgctgcacatcaacaaggaaagctttgagcatcagagattccgtccggtggatcatgaactggtgcgttttacgatccggaatatttttgaggagatcgatgcacagtgtgaaaaacttctggtcaacagtctgtcggatggcagacagctgtatgggatctttacactgaatgataagaaaaagttgcggatggaagtggaacggatctttcttcggatgcgttctgtgctggaaaagaagatgggaatttacctgaccgtcggtgtcagccggtgctgcagcgaagtgcaggggaaggaagcggcagaggcgagacaggcgttaaaacagcggatcatctatggaaaagcaaatatttatttttatgaggatatcaagattctgggagagcaggaatttccggtatcgcagctgcatctgctggaacagtatatggagcacaacgagatcttcaaggtgaaaaatctggtgcaggagattttttcggaggaactggtgaaaaaatatggcagcgcttatctgcggatcatgtggatccggattctgaatattttactgcatcactatgaccggagaggaagaaatgcggcggagattgaaaaattgctgcaaagttacaatcttcccgatcagatccagtcgatccaggagatccggcagaagatcgtggagatggtgatggagtgtgtatccacggaaagcgtcaccgatgccaatgccagaagcaagatccagatggcggtcggttatattcaggagcatttcggggagaacctgacggtgaatgacctggcggaacattatgggatgagtccgaattatttttcgtcgatgtttaagaaagagatgagccggtcggcggtaaattatattacggagctgcggatcaaccaggcgagggaactgctgtatcactcggaactgagtgtggtggatatctcgaaaaaagtggggtacgaggatagccagtatttcttccgggtatttaaaaagtacctgggaatgacaccgttacagtaccgggaagagagcagaaaatagaaaaaacactggaaaaaataacatcgttttttgtagaattatctactgaaaaacggtgttatttctattttcgagaaaggcagaaagggatatagtggggaacatggaagagaaaacttccatgagagagggaaagggaaaagaaacaatgaaacgaatgagaaaaattgagagtccgaaggtatcgcagctgctgtttttactgtgctggtttgcttattttacctcctatatcggacgactgaattattcgtccgcgatgacggcgatgattcaggaggcggttctgacgaagagccaggcgggatttatcagtatggtatattttttcgcctatgggatcggacagttctgtaacgggatgttaggtgaccggtttcatccgggaaagatgatctttactggtcttgcgatcgcggcaggggcaaatctgtgtatgggatttgtcagcggtttcggagcgatggcagtggtctggggaatcaacggttacgcacaggcaatgatctggccgccggtgatccggatcttcgcagagatggtaagccgggaacagaagatgaagttctgcgtcaatatcgtatcctcgcaggtggtaggaacgctggcttcgtatctgctggcggcagtggtgatgtggctgatcggatggagagccgtgttcggcgcggcagcgatctgtctgtgtgtgatggcagttatctggatcctcgggtttggaaagatcgaaaaatgtggaaaagatccggaggaagaaacggcagatgtggataacgatgagtctacagctgcaaatacggtaaatgcaggaaaacaggcatggcgtggttccggcatcctgatggtattattcccggtgctcatccacggcatgttaaaggacggagtgacgacatgggttccgacatatattacggagactttcctcacttctccggcattttccattctggtgaccaccgtacttccgatcgtcaacctgacaggagcctatctggcgcagtatctgtatcagaaatgcaaaaaacaggaggcagtcgcagctgtctggctgtttctgatcgcggtgctggctctgacgggcatctggatcggaaaagatacttcaatgatcctgacgattgtactgtttgcgatgacaacagcatctatgatgggtgtcaacacgatctttgtcaacttctttccgcttcgctatgaggcaatcggaaaggtatccacagtgtccggtttcatgaacggtatggcatacgtgggaacggcagtatccacctttacgatcggtgtcctggtagaacagaaaggctggaacgtgacgatcggaagctgggtcgtgatgacatttctggcactggtggtttgtatgctggggagaaagaaattttcgtagcagacgggataatccggaaaaaactgaaaacaggagatattatagaaccctgacagggaggaacttgtcagggtttttctagtgcgtttttggagcgtagtgttcgaaaggaaaagtgtgcagatatattagaatcgacagggaggaagacagagaagaaggtcgggaagaagaacgccagaataccctgagagaaaaagcacgggcggatgaagcctttcggaaaattgctatgttggaaaagcaactggcggaattgatgaaataaaagaaagattactactacatcctgaacccgacgggagatgtgatcgcactggtagacaccgggtggaacactgtggtaagcta

SEQ ID NO: 2608 - DNA, 1781 bp, Unknown
  gut microbiota DNA sequence
gatagtccacgcctttttgcaggccgtctgtaaatgcctggatgatctccgggtgtttttcgatgtagctggtttttgcgctgtaggaagtgtaagggacatagccggaatcgacaccgagagaagcaaccacatagccatccccgttcttttcaagcgtcgtggctgccggttcgaattccaccgtgaactccccttttccgccggagaaagccgccgcagtagagccaaaatcaatgctctggtcaatcgaaagatccttcgccggatccagaccgttctgtttcaggatatactcaaaaaccatctccggcatgccgccttttcgaccgcccagtacctctttctctttcaggtcactccactgaaaatctgccatctcttctcttgctaccagaaaatttcccgcgcgctgcgttccctgtgcgaagtttaccaccgggtcattggcgccttcgagataagcatacacggatgcttccgctcccataaatccgatctgtgcatccccggaaatgaccgctgccatcgtcttatccgccccatacccggtcaccagttccaggtcgatgccctcctgcgtaaaatacccgttttccagtgcgacatactgcggggcataaaagattgaatgtgccacctcgttcagggtaacttttgtcatctcatcctctttttctccacaccccgcaaacagactgatcaccccgaaagccatcagccccaccatgaattttccctgtttcatcctaacctccttggtctgtttcatagtattaccatatgacagatccacaaagaggtgatttatcaaagatcagataaccgaccttcacttttctcagtgaatcgtttgcgccatccgtctgcgctgcctgaatatgcatagccggaaccgcaagcatcagcgccgccagaaacaaccgtacactttcttttatcactcctttgaaatctgttctcatcctctttccctcgtctttttgtcttcccatcatccgtacaacaactgatattttatgtttctaaagactatcttactttcgccatcagaagaaagacagatttctatggatttgtaatgctttttgtaatgtttttctggacagctgtccggttattccggtaaatttccctttgcaatattctctttcaggatccgatcggtcacttcaaagagtttttcggaaccgagtttcgtctttcgctgtctgccgtatacgttttcggctgtcacctcatgttctttccagtcaccgccgtcgttgctgttgtttaataacagtggctgcagattgtccatggcacgggcaaatttcgcctccggcgtctgaaatgcttcgaattcatcgaagatccgaaccagttcctgcttctggtcttccgggagaagggaaaaaatccgctcttttgccgcatcttctctggctttctgcgttttcagaccgtctgcgtcatatgcataggtatctccggcatcgatctccacgatatcgtgtatcagacacatcagcatcacccgtccgatatcaaccggctcgttggagtattcccgcagcagatacgccatgatcgccatatgccacgcgtgttccgcatcgttttcgtttctgccctgaccggacagatgggtctggcggaaaatatttttttctttatcaatttccagaacaaattccagctgttgttttaatctctcgtccatatgtttctccttttgcgcatgttttctttatttatcaccggttatccgacactgatccactctcgtataaacacag

SEQ ID NO: 2609 - DNA, 1335 bp, Unknown
  gut microbiota DNA sequence
tttctgtcttccgtagaatttttcatcgcggagtcccacggcatagaatgcatttaccagcagtctggagattaccagcgcggtaaacatggaaagaacgataccaagagccagtgtcatggcaaatcctttgacacttccgcttcccattgcacccagaacggctgctgcgatcagggttgtgatgttaccgtccacgatggcggacatcgctttctggaaaccgatcttgatggcacttcttacgctcttacctgctgcaatttcctcacggatacgtgcatagatgataacgttcgcatctaccgccataccgatggaaagaatgatacctgcgatacccggaagggtcagtgtcaggtcaaaggcatttaacataaccagttccagaccggtatagattgccagtgacagggcagctaccacacccggcagtgcataaacaacgatcataaagattccaaccagtaccagaccgatggcaccggcgatcaggcttgtcttaattgcctgctgtcccagctgtgcacctaccacgttggaacgaagttcttccagttccagtttcagggaaccgatacggataatcgatgccagttcttttgcttcttcgatggactgctgtccgctgatctgtgctttaccgtcagagatgactgcctgtacaaccggtgagctgatggtttctccatcatacacgatagagattctctttttcaggtttgctgcagttgcatctgcaaactttgtggtaccgtcttgggtcagtgtcagttccacaatatactgtttggttccggtctgtgaatcctctgtgacaccgccttctgcaccggcgatatcgcttccgtcgagaaccacgttgccgctttcatcctggaactccagagatcccggtttaccaagatcttccagaatcttgtttgcatcggtaacaccaggaatttctacggtgatacggtcatcaccttcctgatatacctgtgcttcttcactgtagtcttccacacgtttctgaagtttatagacggtatcatccatatcttcctgagacggattgtctccttttgcctggtaggtgatacttacaccaccggcaagatccagaccggtcttgatatttcttgcagatccggtccctgtcgggccaaatcccacagcagttgtgaatgccaaaagaccaatcagaactactgtaagaaccagcacaagaactccctgtttcttcttcattttcttatacctcttcttctgccattgcagcttttatcatgattgcacactctacacgcttacgctccagctcgcagcccacttcgtaaacatcatcgatct

SEQ ID NO: 2610 - DNA, 6119 bp, Unknown
  gut microbiota DNA sequence
ctctgtaaacatggcgattttggtaagtaatctttttatcatttttctggttcttattttccgaaatcgtaagattctgtttcgactggggcttcctctactggttggattcgtgattcttatttgtgttcgcatgatatttccagtcgaactattgccgatctcccacaatgtatatcttccagatttactgactaccattgtaggtgaaacacgccgtacacgttttcttcatgatacggtatcgtggtggaatattttggagcttgtatggatatgtggcatactatattcctcactaaaatactttaatcgaaatcatgcttttcgaaagtatgtaaaaaagcatgctagtgctttatctgaatccagtatacaaatgcgtgctttcactcaaatcaagttagaagccaccaaaaaaggcattcaaaaaatgcaattactggctcttccgcttcttaaaagtcctataatctacggtctttggaagccatgtattctcattccaaacactttggaactatcagaaacagaatggcgttatgttttattacatgaagtaaatcattatcgtcataaagatctatatataaaatttttattacatatcatctgcataatttactggtggaatccattttgtcgatttttaaagaatgacacagatacgatattggaaatacggattgatcagacattggcaaataatcctgcgcatactgctgaatatttgtcctgccttttgaaaacagcttcctatcaaatagaaaatccaatatctatccctgatttttctattaatttttgtgattctgttctggcacgacgttttgaaacgcttactcaaaagcaaaatgagtcaacttcttctttagctgtaattgtttttctgagtatctcgttccttatatatatatcatcttactttattatttttgaagacgattattatccaccagatcaatttactgatgatattattattcctacaaaagataattgttttcttatagagcgatctgatggatcatatgatttatatctcaatggtacatacatgacaactctacctgataaacaatattgcgttcctaatataaatacttataaaaatataaacgaggcatccaaacatgaacaaattatttctgaaaaatgaattaatcatttttacttatctcttagtttttcttgcatccgctccggtttttcctgaaatttcgtataattctactgcttcttctgatgtttcatttcaaaactctgacgagcgaaattccaacattagatgggtatttaaaacgattaacggaaaaagctataaacgcctctacaataccgctactaaacaatggattggagactggattccagcctgacgcaaacagggtctgccgcaccatatcagtgcgacagacccttcctttttgtcatactttatttttttatttatacatactcatataatccccatgcgcctcgatcagttcgtcgcacattgtcttgatatcatcgatattcagctctgctgcggtatgtggttcgagcatggctgcccctttactttttcacaatccattttccacttctattggatccttgcctttcaacgaatccatcctctcgcagatcttttattattttctggacctgttttcttgtaagatcgaattcttccataagtctaacctgcgttatcgccgaatcttctttcattctttgtaaaatatcccatttcttttcggctcctttttttggctcctttttggctcctttttgttcacactctttcttttcctctctcaaaaatgcttcatgcacaaataatcttgagataaaataactgtgatcatcatctgtttcaaactcaggtttcggcgatccattttcttcaagtgctctaagaatcttgccaaatccagtatttcgtccttctgtcaaatgtaattctttcagaatttctccaatacgccggtttctatatctgcgatttgataccttatatcgttttaagccttcctttgtaaccgaacgatccggtcctggaaaacttacaatttcaatcatttccttttcaacccttacttctatcggttcccggatatcatacgcacggtgataaactgcatttgcaagcgcttcttccaatgctgcatatggataattgtatacccaatccgcttctgctttatccgcactcttaacaattttctttgttacaattgaattttttataaattgcaatgcttctctaagctgctgatgaattggtcctttaaatgtattttcaataatattatctccacccaaacactccgcctgatcaattattgatatactatacaaaaaactcccgccacttccctttgaaaggaaatgacgggagtatcatatttattctacctttttatttatacatactcatataatccccatgcgcctcgatcagttcgtcgcacattgccttgatatcgtcgatattcaactctgctgcggtatgctttattttacttctttaagataaaactccaccgctttgaaatcccctgtctggcgtgggaagttcaggccgccgtgcatcagggcgcggccgcttcttaccagttcgccgtttacttcgtacatggcatccgctttcagccctcttaccgggatgtgaatggacgggccgcttggctgtgccaggatctgcatgccgtgtaccagagcttcgctttgatcctgggatacgaactcccaggctgcgtacagacggttttccatcgggttggtcaggcggtagtattcgccttcatgggtcaggttgtagtatttcttaaaggttttgatctgttctttgacctcttctttttccccatcgcttaacaggttcagatccagttcgtatccgaaacttcctgccatggctacggttcctctggtttctaccggagtgatacggccggtctggtggttcggaacagcggatacgtgggaaccgactgctgagattggataacagaaagacgttccgtactggacgctgagacgttctactgcatcggtatcatcactgcaccagatctgtggggaataatacagcataccaaggtcaaaacgtccaccgccgccgctgcagccctccagtaacagatccggataacggctcaccagacgttccagcagatcatacagacccagcatgtagcgatggcttgcctctccctgacgttcttttggtaaaacggcactgtacacatcactgatgtgacggttcatatcccatttgacatattcgatattggcactgtcgaggattgctgtcatgcgttcgtacagatattcccggacatcttctcttcccatatccaggatcagctgataacggcttctgttcggctgtcttcccgggatctggatcgcccagtccggatgtgcacggtaaagatcactgtcctcggagatacattccggctcaaaccagagaccgaacttcatacccattgcattgattccgtctgcgatcggtttcagaccgccttccagcttgtcggtattgacataccagtcacccagtccgctgacatctccctcacgttttccaaaccagccgtcgtcgagaaccagcatctccacgccaagttcggatgcgccttttgcaatgttcaggatcttttctttatcaaaatcaaagtaggttgcttcccagttgttgatcagcaccggacgtctctcgtgtttgtatttgccacggcacagatgttcccggaaggtatgatggaagttggaactcatcttttcaaatccttcgctgctgtaggtcataacagcttccggtgtccagaactctgctcctgcttccagtgtccaggcaaatctctggctgttgatgccggcagtcagtctggtctgtcccatctggtctttttctgcttcgatcgagaagtttccactgtaaaccagtgctgttccataacatgatcccgcttcttcggtggtatctttgctgcacaagatggcaaatggattatgctggtggctggatgctcctctgatactttccacggtcatctttccgtgcatcagcggtacccgttccatctgacgttccagattgtgtcttccgtgaaaatgcatcagttcccagtcaccgctcatcagatccaaattcatggaagcagcttttgtcagtacgatcgcatcggttccctgatttacgaattttacgcaacgggtaataatatctctttcttcccacacactgtagtataaaaatgcatgcagtccggttactttatctgccagttccacgatcagggtatcggcatctttttcttctccgtacagtgccggcattcccgggatcgcatatttgcccttttcgatggtatatcctgcataacgccagtctgcggcatcgcttccgtccgcgttgatcacgctcacactgttgatccggtaatcgccgacgccgttggtggagtattcctgtggtctggaatcgagagaatagtctctctcatttcctgcctcgtaagggtttccggaaaatccccgatcctgatagtctaaaagatagctcatatcttcctgaccgatattttctccatagtacaagtgattcagcaccagatatttgtctaccatcatctgataacttgtattgtttgttgacaacgtaaaaagttttttctgttcgtctatataaattgccatgttcgtcctcctttttatcgctctgtctgcatcacagtttattgtttttacatcactgtttttcacattcaccgttatgttttgcagtctgttttctattcacagactatactcagtataccatgctgcgaaactgaaaaatatgggatttgtttcctgtaattgtggattcgttgcgtgctgtatcaattttggagattttcatgtacgctgttatccgtgttttttctgcatttttctttttcggacggttcttctctctgttatccgttttgttcctgtgcccgttcacattctcttttcaggagctcatgccattccggtttttcttttttcagggataatggttttccctctctgtttaagaagcaatggctggtctgtccgctgcagcgcagggttccgtcttttttatccctgatatgatatttcagaaagatttttacgccattatattttttcactgccacctcaatagatacttcttccccgtaccgtgtcatggagtgataggctgcctccaccgtcagtaccgggctgatcacacctgcggcttccattttgtcataatccataccaagatatgccagataatcgctccggctttcctcgaaccagcggatatagttggaatgatgcacgcatcccatctgatcggtttcataatactgcacccgatggttataccccgggtattgttctgttctttccatctgtgtctcttccctttctgtcccatacatttctgttctgtcgtttttctccacatttttgcgatttcaattttaaaatgtaccatcgcaaatcgttttctctcacttcaacatttttattttcaaaaggattcttcttttttcagttcctgatagatccgtcctatcggaagtcccacgacattgttatagtctccccggatctcttttacaaatcgtgcacaaagaccctggatcccgtaggctcctgctttgtccatcggctctttcgtgctgacataccatgcaatctcttcttctgtcatcgggtacatggatacttttgtctcttccgcaaaggttgtctgttttccttcctccagcagcgtcacaccggtatatacactgtgagtctgcccctgcagcatgcgtaacatacggatcgcatctgcctcatcttttggctttccgagaatcttcccgtcataaaccacaatcgtatccgccccgatcaccagccagttctccggtaactgtggctccagctcttccttcaccgcagctgctttctgtgtcgataacgattttaccacttccacaggatctgtgcttgtgataatttcctcaccgtctgccggatgcacttcgaattctaatccgatctgtgttaaaagttctcttcgtcttggggactgggatgcgagtataatatttttcataattctccgtttt

SEQ ID NO: 2611 - DNA, 9587 bp, Unknown
  gut microbiota DNA sequence
ataccaccggatcctggaatgtctggactacgcaagagtcgactcacagcaggcgatcgagaagcagatggaagaactgctgaaggaagaaaagatcagcaaagagacggcaaaagtggtacgctccagtcagatcagctggtttgtgcgttcagctgtgggaaaacggatgaaagaagcttctgcccttggcacactgcaccgggaacagcagtttgtgatgagtattgatgccagtgagagaaatcccgcgtggaatcagggcgagcagatcctggtgcagggaatcatcgatgctttctgggaagaggcggacggcctggtgctggtggattataaaactgaccatgtaaaagagggacaggaactgatcgaccggtatcagagacagatgcattattacagtcaggcgttggagcgcgcgtatggaaaaaaggtaaaagagtgttatttatattcatttgcgcttggaaaagcggttgctgtggaggtgtaacctccgcggcagccgctttttgtagatatttagaagaagtcttaagatattttaaagattcccaggatttgttgacatctaatattatacggcgtatagtattaaatgtaaaacaacatacggtctgggaaaccgggggaaaagtatgagcggagtcttttcatgaaaacagatcgggaaagggttcgaacatacagaaaaaagaaaaaggggtgcgatatggtatttaatacaggagcggctcttttggatgccattgttcttgccgttgtttcgagagagaaggaaggcacttacggatataagatcacacaggatgtgcggaaggttatcgacatttccgattccaccctgtatccggtgcttcgcaggctgcagaaagatcagtgcctcatggtctatgatctggaatgtgcggggcgcaaccggagatattataaagtaaccgagcagggactggcccaattggggttatacaaagaggagtggaagagatattcatccaatatttccatggtttttgagggaggaatcaacaatgaatcgtgagcagtttattgcacaattagcgagacttctgcaggatctgccgccggcagaacggcaggaagccattcgctattatcaggaatattttgacgatgccggggaggaaaacgaggatgccgtgatccaggaactgggaagtccgggaaaagtagcagcaagcatcaaggcaaacctgcagtatggcggatcgacattcggagcgaatgataccgatatggaaaatacagggacagaaagtcagacgaaggacgccgatggctggcagcagaatgggcagacaatgaacagatggaatcagagtacacagcaaggctggcagaatgcagatacgcaaagcccgtatgcgatgcaggcgagaaaaccgaaacgcggtgttggcggatgggcactgctcatcattatactggtctttgcatctccggtgcttctcggcgttggcggtgtagcacttagcatttttatcggaatcctggcaaccgtatttgccctgtggatcagctttttcgccgtagcgattggaatgatcggaggcgggatcgccgttctgatcaaagggatccttcatgcgatcagttcaccggcagccggactggtaagcatgggcggcggtctgatcagcatcgcactgggaatcttatgcgcagtatttttcctgtggtttacctttcagctgtgtccgcgtgtattacgtaccacgctgaattttatctcaagaatcgtacataaaggaaaggaggcacgggcagaatgaagcgtttgaacaaagggttacttgtaaccagcggaatctgcgggggactcgggcttgcccttctgatctgcgggatgcttctgggaggaatccgggggggaaatgatctggtggatgcactttccatcaacagcggggattttcaggagatgaaagatgaggttatgagtgaaatcagtgaccataccaattttgatccggttaactggtttgtggaatgggtaacggatatattttaagcgtgggtccgaaaaaataacagagagtaaaaatttatatgataaaaggagaatcagaatatggaaaataagagattatatcgttcctcaaccaattatatgatctgtggagtctgcggcggaatcggagaatattttaacatcgatccgacgatggtgagactggcatgggtgatcttttcctttatgggaggatccggaatccttgcgtacatcatcgcatcgatcatcattccgaaataaagaacaacgtgaatagaaagagaaaaaaaggtcatacttcaagagaaaaggagtgtgactttttttatgggaaaagagaaaaagataagccgggaggatatcgcaaagatgagccgggaagagcggatgaaatatgagatcgcgcaggaactcggacttctcgatcaggtgcttgaagaagggtggaagactctgtctgcaaaagagacaggaagaatcggcgggatcatgaaccgcagacgaaagcagaaagaaaaagaaggcgggatcagtcaggagaaagagcagtaaatgcctgatgccagagatcagcaaggagggtattaccccggatggtcagatgaatcccgtcggttgtgatcgcatcgacgccttcacagcgggctgcctgccggagtatcgcgtccgtcgggacaaaatgagcagaataagagagtgccagatcgtggatgatctggctttctttttcgatataagaatgccaggcggagtattctgccggttcatcaaaaagaaacggttccagtaacaggatggtggaagtatgccggcataaaagatccagtacttcccggtaaagggcagaaaactccagggggatcctggagtgagaagtaaaaagttccacgggaatatcattgactccgacaaggagggtgatcgcatcccagtgaccgccgagtccgtcacgacggagcatctgtaacacccgctcaatggtaaagccttcgtgtccccggtttacaaatgtagtgtctgtatattccggtctgcgggcaaggagagagacatagccgtatcccagattggcaggatcaaagagatgatccgcatcggtgatgctgtcgccgagaaaaagatactgcttcatacgatccctcctttgattataatattagtttgtgctgtctgccagcagagtattcagatttaattttaagatccggtcaaactgtgtcagcgaagtgtagcgatagccgtatgccgcagattcaaacagtacatagagatcgtcaccatccacatagatctgctcaagtttggacggaaaacggatcttctgcagcatggtgccttcctcaagcagcatctgcagagagttcggaaatactttcagggatcccggaagcaccccgtaagagtgagaggtgaggatcctgtttttataaaatgccacaccctgtgcccgctctgtgatcacgcgcatcccggatggcagggcaagcggtgtcagcgaatccacacccagctgaccggttgtaattgtggcatcgtcaacggtactggtctgtaaggttccgtcctcggtaatatcgtattcttccagcacactcgcggaattggaagtataataaccgatgtataatgcattattataataggtcagaaatgaattccgagtaatggcgtacagatcgtaagactgagaataggaaatcggctggtaatcatcctgaaaacggtaatttttcaactgatccagtgtgatcgcagtgacctgcggaataccacgggacatacaggagatccagatgttgttatgaatcgtatcgtatgcgatcccgccgacatgagatttatttcgaagaacaatttcttttacaaattcatgggtctttttatcgatgacgtagatgacagagttatgcgtgttggtatgacagtaagcagtgaccagaagataatcttcggtaacggcgagtccctggggagtcatggaagtacagatggaggaagtgtttttctctccgaaaacctgtgtttctgtagcgttaagtccagggataatataggttccataatcaatttcggtagcacgtccgtataaagctgcccgtttgacctccggtgtcagggaaagcagatcccgccggctcttgaaactgtagatttcttcctgcacggtgccggtggcggttgtctcccgttccacccaccgggtatatgcggaaaaaaggaggatatatgcggtcactccgattccgactacaagaaagaaagcgaacacccagagaatccggtgatgctttcttgtggattttttttcttttttatgcctgtctttcataagttgtctcccgagaagtaatagatattattaatcatatcctattttgggcgaaaatacaattgatatataacattccagggaggtttcaaggaaaatccgtgattgatcccggaaataaatttcggataaaatgaggaagggccggtaccctctcggataccggccaatatgaaaaaggaaatctaaaaataactgttaccacttaatgagggggagaatgtcacaacaggcgatgttgtgacatcctttaacaaagtgtggttcgctttgttgagtattatattacatggaaaatgtgataaaagtgtgtctacgtcatgaagactttataaaatttcaaaaaaaatcagaaagaaattctttagattttcagaccacggaaccggttgatgcaggcatagacctcctggatacgcggcatggcaagattcggggccaatctgccgccctcggagagaatctcgagtcccctggtggataattctttatcaagctgatccatgatctggtgcaaggtgtcttttccgttaaaaagacgccgctccacatagcagaggagagcagaaagtgcctggatctgttcaggatcagccagttgttccagacaacgaaggtcaatggcgtcatggttgacggagatactgtccatacccagtactttcatcttcagacggcgatccggacggaaagcaggatccggctggatcacacggcgatagtctgcaacagcaccggaaggggcggaaggctgaatcgaagggaaagcttccgcttcttttttggcaaatgcagtgatatccaccggtttataatgatccatctgtaaaatcgtatctgccacatgaaaataagatccggaacttccggcaaccagaatcgaggagattccctgtgcatcgctcaaccactgtacacgttcgataaatggcgtgataggttcctgattgcggttgactacccgctgcatcagctcatcgcggatcataaagtttgtagcactggtatcttcatcaattaagagcagatgacttcccgtctcgagcgcttcgatgacattggcagcctgcgaagtacttccgctggcatcctcggaataaaaggaatgggtgtctttgtggtttggcaggtcgttgatgaagaaagaaatatccgtgtgcttgatgcttcgaccgtcctccgcacggatttttaccgcatcgtcccgggtgatcacatattctctgccatctccagcaatatggttatacacacccagttcgagagcctcaagcagtgtggatttgccgtgatagccgccgcctacgatcagcgtgataccgcgtgggatccccataccggtcagcggaccgtggtttggaagatccagagtgactgccatggaatccggtgagacgaatggaattccgtttttcatcggacgggaagacacgccggattcccgcggaagaacggagccgtttgcgacaaaggcggtgagatttcgtgctgcgagttcttttcggataaaggtctgatcctcggcaagcgcccgtacctgttccagtttccgagcatccagattccggtaaaaaagagcgtctttcacgcagaccggaagaaaatcaaacagaattttgatcagttctccggagttgatcgtacgtccgttggcaggaaaaccgacctccagacgaatggtcagatccccgttttttgcgtccatcgtgcaggcggagcgttcgaggatttcctgtcccggctttgagatggcaatcagaccgctttttccggaacctttggcgcggaaattgtatttttcaatatgcgctgcaaatccacggatcagctgattctgaagagcgatccgcatctcgcgtgtcgcatacagagattccggaaaacctgcctgtgcgcctttgatatgaaggctgatttttgaaggggcagcgaagggatcaccctgcacatggtcgatggagagcacatatccaggaaaacgatagctgcctttcgtgtctttatacgccggataacttttacggttgatacggaaaagaagatctttcagatcctgagaagtatttatcatatatggttcatcctttctggaaatgttcaattaatatttcatatattccataaaacagtatagcaacattgtaaaatacagacaagcgggaagagggacttttgtttgcaggattttgcggttataatggttataacagagaactaaaagaactcaaaaaacgagtaaaaggagaaaaaaatggagatcgaaagaaaatacctgatcaaaaaactgccggaagatctggcgcaatatccgcacatggagatggaacaggcgtatctttgcacggagccggtggttcgggtgagaaaagaaggggcggattatgtgctgacctacaagtccaaaggtctgatggtgcgggaagaatataacctgcagctgacgaaagagtcttatgaacatctgctgggaaaagcggacggaacggtgattacaaaaacccgttaccgcatcccggagaaaaacggactgacgattgaactggatgttttccacggaagatatgagggactgctgcttgcagaagtggaatttgcaaccgaggaggaggcaaacagttactgtccgccggattggttcggagaggatgttacgatgtccagtgcgtaccataacagcactctgagccagaaaaaataagaaattgaacgaaaagaggctgttttgtgatgattttgctgggaatcccccactttgtcacaaaacagtctcttttttacacgagcaacgagtcaaaatctgtgcttccacaagaaaatggcggctgccgcgattcatcaggtatcacgaaaatcaaacagatctttcaccggaacttccagaacctctgcaatatcaaaaagcttgttcagagaaatcgatgtttttccatttggtgcctcaatattgctgatatgtgtacggctgaggttggttgcctctgccagttctgcctgtgtaagtccacgaagtttgcgataataagcaatggtcagaccgagaagtcgaaactcattcatgcgtttgtagtccatatccctgctcctttctccataaaaacagacgcatcgcctgcgtttctcttagcgtacagcagaatatatcgaaaagaaacaatataaaaatttgcaaatataaagtaaaatactgcaaaataaggaaaaaatttgaaatatgcaagaaaaggacaggcaggtacacagtttcagactatttttcttctgtatcaggagaagatttcatcctgggaggacggtaatgatagacatcctcataagattcaagttcctcttcactgaccggcgcggacggaatcagcccggtgcagtcatgcgtggatgccgcattggacagataatcataggaatcgatcagtttctggttttctttctctttcataggcagtgccctccgcaaaggtaattataggattaaaatatgcgaaaaaatattttttatacagcagggaagaatataaaaagagaagaacatttcagagaaccattctcgaaatattcttctcttttttcatcttattttgcagaagtagcagctttctgttttactttaatcctatgtttctgccggaacgcatcaatcgtggcaagtcccggaccggataccgggcggatccatttgccggagtaaagatggcgctgcatcagaatataccggatcggttcgtcgatatagcagaatgcgaagacgagaaggaacggtgcatggaagtaaaagtttgagagatatacgaaaggcagaaccatcaggtacataaacgtaatctcaaggatcgatccaaatgccgcatcgcctgcggaacggtaggtatcgttctgcgcccagtttcccatacggatgatcgccgccacactgtagatgatcaacataccggtaccgatctgataggattcaccggaaagccccagggtatgtaacagtgggttgtggatcagcaacagggtaagacaggcaattgcgatgatgccgctgcacagatagaccagacgctttgctctctgataggcgacttcgtgattgcccgctccgacctcttttccgacgagaacggaggcagcattggaaaatccgctgaaaaaggcgatgaccagtccctccagggtacggaagacggcgaccgcggcgattgcctgctcactctgacggccgagtactacattgaccagcatatttccgacaccgataaatacctcgttacagatgatcgggaaacatttttccagatactgttttacatagatcttactccagcgaaaatgtctggaaaattccagaacatacgggattctcttataaagaatacaggcaaccaggatcaggacgtttacaatgcccgccataacggttcccacagctgcgcctgcggctcccattttcggaagaccgaactttccgaagataaacaggtagttgaaaaagcagttagcgacaacggaagcgataccgccgtagagcggaatcttcacctgttcaatcgaacgaagcagggcgctggcagccatcgcgatgacctgcagcggataggcaaatccgacgatacgcagataagaaataccgattttctggatttccggcttgtccgtatacacacccatgacaaattccggtgcgaagatggcgagacaggcgaaaagaacaccaaccgtcatcatgaaaagcagcgtcattccgtaggaacgggtgataccgtcatgatccttggcaccccaatactgggagaaaaacagcataccaccgccgacaaatccccagtacccggcgaacatcaggctggaaaactgcgcgcacaaccccaccgcacccacagctttctccccgatggaagccagcatgatcgtatccaccatactgcccgtcgtggtaagcagattctggagcgccaccggcaccgcaatgatcgcaatgtgcttcagaaagtagccccagtcaaatttgttgtgattcatttgtaaaaacctccaataacatataatatagcattatgctcccagtgtaacagtttttgaaatggaagtcattaaaagaagtcagaaaaatagcacaaaaaaatccaaccgttttcatgattttgtacagaaaaacagctgtcaggaaatgctctgtcctgttagagcgtgtctgaaaaatcatttccgcaatctgcaagccccactttgcggtatattttaccctcattcggttgccgt

SEQ ID NO: 2612 - DNA, 989 bp, Unknown
  gut microbiota DNA sequence
tgccttattatggttgtcttccagtacctccttatcttttgtcatcggcatcgctaccgggatcagttctttttcgtccagttccgggtaggcgccttttacgatctgatacgctacactgctctttgtatcgtttcccggcactgcgatcacgcggttttcgcggatcaggcgaagtgcctttaaggtcagcagttccggatctcccggtcctacgccaagtccatataatgttccactcataatgttttctcctctattttgctgttttttatttatcagtaatcccgtctctgcgggagatcactctttctttgtactcgctgtctgttcattaatcttcattgtcagttccgcaacctttgaagtctctcccagtttcccatacacattggaaaataaaatggttcccacttccagctgttcccctgcccgtttgttcaggtaaaattctacccggtcgctgatctccttcatcgtggcttccagataacctttctgtcgcaggatctccacactttgttctgtggtgatcgtatccagaatctcttttgccgtctccagatccgcaccagcccggatcgcattcgctgccatcagttcacttcggctgtctgcctggcgggaatgggtgttcatgatgccgcctgccacttttacgaactttccgatatgggcgataaacaggattccttttacaccaagctcccgcgccatatccagtgtttctcctacataattactgcatttcatcgaataagtcagattcagctgtgtctgttcttttgaaaatgcctgtccgtaattgcccggcgtgatcaccagataagagccgccgccttccaccagcatcttcatctcctgtcggagacttgccaccagcgctgcctcactcatcggaattacaatgccgcttgtcccgagaaccgagattccgccttcgataccgagtcgtggattaaaggttttctttgccagttccactcctg

SEQ ID NO: 2613 - DNA, 2570 bp, Unknown
  gut microbiota DNA sequence
aaataaggatttgcttttctgtaaaaacacggctataataggtctatacggcaaaaacaggtgaggtttttgcgctattatcacataatgaggatacgggaagatatggaaacagagataaaattatttatatcctatttacataatacaaaaagaatgtccggcaatacagtggtgtcctatgagagagatctgaagaaaatgatgctgtattttcaggaggtacaccagatgacccgggtgcaggatatcacagaaaccagcctgaattcttacatgttgtatctggagaaaaatcatttcgcagcatctacggtatcgagaagcgtggcttccatgcgtgcgtttttccagtatctgtatcaggaacatctcatagagaataacccggcagatcatctgcatccgccgaaggtggaaaagaagatgccggagattctgtctgtggaggaagtggatctgcttcttcgccagccatcagacaggacaccgaagggactgcgggaccgggcaatgctggaacttttatatgccaccggtatccgggtcagtgagctgatccatctggaaatgtcggatgtcaatctggcgatgggatatatcaactgcagggatacagacagtgagcgtgtgattccgtttggaagtcaggcgaaaaaagcattgcagcagtatatgcatacggtgcgggacggatttctgaagggacaggagagtgaagtgctttttacgaactgttccggaaaaccgatgagccggcaggggttctggaaggtgctcaagcactatgcacaaaccgccggaattgagaaagatatcacaccgcataccctgcgtcattcgtttgccgctcatctgatccagaacggagcggatttaaagagcgtgcaggagatgctgggacattcggatatatcgacaacacagatgtatctgaatatgaatgtgtataaaatcagggatgtttataccaaagcacacccgagaaaataagaggagagaagttattatgagtattgaactgttgaaaaaactgccaacaccgacagagatcaaagcggattatccggtgacacagaaggtggcacggatcaaagaagaaagagatgagatgatccgaaaagtatttaccggagagtccgataagtttctggtcatcatcggaccatgttccgcagataacgaagaggcagtttgtgaatatatcaaccgtctgtccagagtacaggaagaggtggcagataagctgatcctgattccgagaatctatacaaacaaaccgagaacaaccggagagggttacaaagggatccttcatcagccggatccggagaagaaaccggatctgcttcatggcctgatcgctatccgtaagatgcatatgcgtgctatcgaggaatccggtctgacagccgcagatgagatgctgtatccggaaacctggagatatctggatgatattctctcttatgttgcaatcggtgcgcgttccgtggaaaatcagcagcatcgtatggtagccagtggtatggatattccggtaggtatgaaaaatccgaccagtggagatctgtccgttatgctgaattcggttgtggctgcacagatcaaacagaattttatctacagaaactgggaggctgagacggacggcaatccgctggctcatacaattcttcgtggtgcggtgaataaacatggcaatgcgatcccgaactatcattatgaggatctgcagcttctgctggaaaaatataatgagagagatctgcagaatcctgcgacgatcgtggatgcgaatcattcaaattcgaacaagcagtttaaggagcagatccgtattgtaaaagaagtgcttcacagcagaaatgtttccggggacattaagaagctggtgaagggcgtgatgatcgagagttatctggttgagggcagccagaagatcggatgtgagaatcacgtgtacggaaaatcgattacagatccttgcctgggctgggaggattcgagagcgttgctgcatacgattgcggaactttgttaggataaaaaacaaaaaaataagagtagttggctaaggggacgtggctggcttgtgatccatgggtggacaacttgggcagggcagctttgaactaatcactaacttcgactaattgacgctggtcagctgaccagcgccaaagtctgcgtaagtgctggatttcaaagcttgccctgaacgcccaaaaagtgttgtccacccatggatcgcaagccagccactggttttggcaaacggcgttaagtttagttgttacagaaagctgttttctgatgcataagataaaaatggttagtttgtagattttttaccacataatctcattgccagtaaaaacattcctccggcgacaagaacacctccaaacagtgctatatatccgcccgtctttatttcacataatatgcggtaggtaaacaggccgcatccacatccaagtatcattccacaacagggcaggatgatccattttgttgcgggaaatcggaatttcacgtttttatgtaaaaagagtaggttcagtcct

SEQ ID NO: 2614 - DNA, 2707 bp, Unknown
  gut microbiota DNA sequence
aggattcggattccaaggccggcgaggctttgaatcaggcattggacggtgtgtcccaggccgttcagaatgccgttcagggtggcggtgaggtagaggaacgggcagagaaaggccaggatctgtaaaaagatgccggcgtcctggttttggtagaagatctgtgccagctcttttccgaaaaagaagaagattcctccggataaaaagccgagccacagacagtattgaatggtctgttcggtagagcggatgatggcatcttcttttccggctgcctgctgtccggcgatggttgggaggagcatcgtggaaagggcggacgtgatcgcagaaggaaataaaataaagggcaatgccataccggtcagtgcgccatacagactgagggactgtgcgtttgtaagtccggatgcttcgagttttcctgggatgaggatggcttcggtactctgtaagaggttgacgagcatgcggttcagggtgagcgggacggataaggtaaggatttcccagaggcaggaatggacgcgaaagtcggtagtgcctttataggaaggtttctggaaagcgagacagacaacgcagaagaagcatgccgccagttctccgaaaagcatgccgccaacggcgaggatcggtgtcggagcaaggttttgctccaggaaaatcaggtaaatgacataagaagcacccacccgggcaaactgttccagtaattgtgatacagccggaaccgtggttcggcgggtggaaaagtaccaggcatggatgcaggtgtgtatggaacagaggggcagactgaaagcaagcagctgcagaagttcacagcatcggatctcatgtaagatatgaaggctgatccagggtgcgcgggtgtacagaaaaaaggacacgatcagtgaaagtcccacagaaagtccgcttccactcaggaaaaatacccatccctttctcggattttccttggataaagcggcggagcagcagcgggataaggcactctgaatgccggcggtgacaccggacaggcagaaggcatagaccgggaaaatcatctggtagattcccagaccctgtgcaccaatggtgcgggataggaatatcctataaaagaagccaatcaggcggctcaaggtacccgcacaggtgaggatggcagtaccggtgaggacaggatgcttcgcagaagaaaacataacaagctccggggcttttttttaaatatatgaggctgccagccttgacagaaccggggagtcgtgttatattgacaaagggtcatatcccagtagattactagggaatctgaaagaccaaaggaaacttccggaagggaggcaacatgaaattatcaacgaagggcagatacggtctccgagcgatgatcgatctggctgtatatagtgaaaaagaaccggtgtctatacagagtatagcggatcggcagaacatctccgagcgttatcttgaacagctgatggccagtctgaaaaaggaaggactggtgaaaagcatccggggagccaacggagggtaccagctggcaagaccggcaatcggtatctcggttggagatatccttcgtgcactggaaggagatctgcgggcagtaacctgtccggcaaacggcgaagaaggaaacggtggctgcgaaaatgcagatctgtgtgtgacgcgatatgtatggcagcgcatcaacgaaggaattactcatgcagtggataccatgtatctcaaccagttggtggaagagagtaaaaaactgaaagaaaaaggacaggtacagcccgcaggctgtcagggataggaggcaaaatcatcatgaagaaaattatttatctggataatgcggcaaccacaaaagttgcaccggaagtagtagaggcgatgctcccgtattttacagaatactatggcaatccatccagcgtatatgaactggcaggaatcagcaaaaaagccgtaacagaaggaagagaaaaagtagcatctgtcatcggagcgaatccgaacgacatctactttaccgcaggtggttccgagtctgataactgggcactgaaagctacttacgaagcatataaatcaaaaggaaaccacatcatcaccacaaagatcgagcatcatgcgatcctgcatacctgcgaatggctggaaaaacagggagcaaagatcacttacatcgatgtagatgaaaatggtgttgtagatctggatcagctgcagaaagccatcacaccagagaccatcctgatctcagtcatggcagcaaacaatgagatcggtaccctgcagccaatcaaagaaatcggtgcgatcgcaaaagaacacggtattttattccataccgacgctgtacaggcatttggtcagatcccgatcaatgtagacgaatgtcatattgatatgttaagctccagcggacataagatcaacggaccaaaaggtatcggatgtctttatatccgtaaaggattaaaactgcgttccttcgttcacggcggcgctcaggagagaaagagaagagccggaacagaaaatgtaccgggcatcgtaggatacggtgtggcagcagagcgtgcacttcgtaccatgaaagaacgtactgcaaaagagatcgaagtaagagattacatgatcaaaaagatccaggaagagatcccgtactgcaaactgaacggacatccaaccctgcgtctgccga

SEQ ID NO: 2615 - DNA, 215 bp, Unknown
  gut microbiota DNA sequence
gcttcgtatcgatagcagtcaccggtctccgttactacatgccgtaatgctcttcctgattctttttccagttttacatcatccagctttttctcatccttaaatgcattccataccgtatccgggatccggcagcctaaagtgccgtcttttctctgatacagttcatgtgcgacaaaagttcctgcccagataaaatcttctttatctgcctc

SEQ ID NO: 2616 - DNA, 4947 bp, Unknown
  gut microbiota DNA sequence
actgttcagtaccttcacagttacgagccaaaatgcatttaaaatcaccttcggtgatggcattttggcttgtatgtctcgggattttggcatattcatgccaaaacacctcgcgggatactacctactgaatagttacattttcattattttaattttacctgttgtatggtcatccggtcaactgtgtccatacatgtttcaaaaaaataatgccaaaatcgaaaaagccgcaccaactttctctgtcagtacagcttctttctctgataccggattgttccgcactctcacaatcctatcctataaaatactccccaccagatacaccacaaacgcagccacccaggcgatcacgcattgcccgatcacaacaccgaccgcccatctgcttccaagttccctcttgatggatgcgattgccgccacacacggtgtatacaaaagacagaacaccagcaggctcgccgccgataccggtgtgatacagccaagcagtgctgcggtctgtccaaacagtacggacaacgtagataccacactctccttcgccataaatccggtgatcagcgccgtggatatcctccagtcgccaaatcccatcggtgcaaataccggcgcgatcacactggccaccgtcgccagaatactctcctgcgaatcgctgacgatgttcaggtgactgtcaaaggtctgtaagaaccagattaccagtgtcgccataaaaatcacggtaaatgcacgctgcagaaagtcttttgccttatcccacagaaggtgtcccacattcttggctcccggcatccgataattgggcagttccatcacgaacggtacagcattgcctttaaaaagagtcccacggaataccagtgccatcaggatacccatcagaataccgccaaaatacaaagcgatcatcaccagtgcgctatgcttcgggaaaaatgccgccgcaaaaaaagcatagatgggaagctttgccgaacaactcataaacggtgtcagaagaatcgtcatcttacggtcacgttctgaaggcaacgttctgctcgccataactcccggtactgtacatccaaaacctaccagcatcggtacgatacttcttccggaaagtccgatctttctgagcagcttatccatcacaaaagccacccttgccatatatccgctgtcttccagcatagataaaaagaaaaacagtgtaacgatgatcggcaggaaactcaggacacttcccacgccggtaaagattccatccattaccagagaccgaaggacactgttgacattcgctgcccccatccactgatccaccagacctcccagcgcatcgatacttacttccaggatattctgtaaaaaagcaccgatcactccaaaagtcaggaaaaataccagccccatgatcgcgataaaacacggaatcgccgtgtattttccggtgagtatcttatcgatcttcacacttcgcagatgctctttactctcccgtggtttgaccactgtctcatcgcagatattttcaatgaaatcaaatcgcatgtgcgcaattgccgccgcccggtcaagaccacgctctgtttccatctgtttcacgatatgctccagcatctctttttcattctgatccagtttcaatgcctcgagaatcagcgtatccccttctgccagcttcgccgccgcaaaacggacaggtatctgtgctgcttttgcatgatcttcgatcagatgcatgatcgcatgcagacatctatgtaccgcaccaccatcttcattggcatcacagtaatctatctcctttggccgttcctgatattttgccacatgcagagcatgggctaccagttcatcaataccttcattcttcgccgccgaaataggaaccacaggtatccccagcatctcttccatctggttgaccagaatcgatccgccgttttcccgtacctcatccatcatattcaaagcaagcaccatcggaatatccagctccatcagctgcatggtcagatacagattccgctcaatattggtagcatccacaatgttgatgattcctttcggatgttcattcagcacaaaatttcttgtaacgatctcctcactggaatatggggacatggaatagattcccggaagatcggtcaccagtgtgttttcttttccccggatagttccatcttttcggtccaccgttactcccggaaagttacccacatgctgactggatccggtcagctgattaaacagtgtggtttttccacagttctgattccctgcaagtgcaaatgtcagcacctctgtatccggcaaaggatgttccgtttccttctcatgatatttaccaccctctccaagtcccggatgggggattactgttcgttcttttttttccggttttacctgtccggcatcccgtatattttcaatctcgattttctccgcatctgcaagacgcagtgtcagttcataactgtgaatccgcagttccaccggatctcccatgggagcgtactttactactgttacctctccctgtgggatcagtcccatatccagaaaatgctgacgcagcgccccttctccgcctaccgagcgaatcgttgctgtctttcctaccggcaaatctcttaatgtcatgactgcattcctcttttctttattttcttgctgtcatccgtccgaaggtttccagaatctcaaaatcctcccgacaactatgtagattttatccttaatgataatatttatcaatagaaaaccccaaaaaatctccaaaaagtatctgaaccctccttattcttgcttcctttttttcttttctcatgatatgattgcatatgttacgctgtttggtatctgtgtgtctgttgaacagttgtcttttaccgatattactatgaagggaagggattttatgaaaaagacacagtttaaaaattctctgcttctgctgctgacagccaccatctggggtgtggctttcgtagcccagagcgttggtatggatcacgtgggtccgtttactttcaacgctattcgaagcatcatcggaggaatcgtcctgattccatgcattttctttctggatcacagaaaatctgcccaaaaagaggaactgccatcgcctcaacaacaggtagaacagaccggtacactgattctcggcggtgtctgctgcggtattcttctggcacttgccagcagttttcagcagatgggcatccagtatacaacggtcggacgtgcaggatttatcactgcctgctatattgttatcgttccgattcttggccatttctttctgagtaaaaaatgcggcgccaccatctggatcgctgttgcacttgcactggcaggactgtatctgctttgcatcacagacggtttttccgttggaaaaggggatctgctggtcatggtatgttccctgctgttttccttacatattctggtaatcgactatttttcgcccaaggttgacggtgtgaaaatgtcctgtatccagttttttgtctgcggattcttatgtgcgatcccggctgtctttacggaacctatcgtattggcagatatctttgccgcctgggcaccgattctttatgccggtgtgatgtcctgcggtgttgcgtacaccctgcagatcatcggacagaaagatatgaacccgactgtggcttctctgatcttaagtctggaatcctgcatctcggtactggcaggctggatccttctgaatcagaagctttccgcacgggagttatcaggatgtgtgctgatgtttgcagcgatcattctggcacagcttccctccgagaaaaaagcataatatgtttgtcccaccggatgcttttctctgtaaaatctgaaaagctcccggtattttttatgaacatgattttgaagaaaacagataacaattcagtcggtggccatgttttttgccaaaatcccgagacatacaagtcaaaatgccatcaccgaaggtgattagaaatgcattttggctcgtaactgtgagggtactgaagagttacgaaatttgtaaatggcagattgagtaattaaatttcaaaaaagggttgacgaatcatctgtaaccaagtatgattataaacagattcacgctgcaacgcgttgaagtgcaaaattctttattttttatggaggcttttgaaattatggaaatggatatggaattcttacgaaaactgccaaccccgaaggagttaaaagagcagtttccggtaagtgaaaagatagcagcaatcaaagaagatcgcgacagacagatccgggaaatcttcgagggaaaagatgaccgtcttctgctgatcatcggaccttgctccgcagacaatgaagatgcggtaattgattacatcagtcggcttcgtaccgtacaggataaggtcgcagataagatttttatgattccgcgtatctatacaaacaaaccgagaacgatcggcatgggctataaggggatgttgcaccagccggatccggagaaaaaagaagatatgttaaagggtatcatcgcgatccgcgatctgcacaccagagcggtcaacgagaccggttttacctgtgcagatgagatgctgtatccggagaaccacagatatttatccgatctgttatcttacgttgccatcggtgcccgttccgtcgaagaccagcagcaccgtctgaccgccagcggcgtcggcatcccggcaggtatgaagaacccaaccggcggagatatctccgttatgatgaactccatcatcgccgcacagcacggtcacatgttcctgtaccgtggatgggaagtaaaaactcctggtaacccttatgcacatgcgattcttcgtggttatgtagataaattcggaagaaatatgccaaactaccattacgaggacctgcaaaatcttctggaacattatcaggaag

SEQ ID NO: 2617 - DNA, 161 bp, Unknown
  gut microbiota DNA sequence
aacttacagtattccactgcatattcttttccttccatatccggcatggcaatctctttctcccatttgtctccgacacgaggtacggaactcatcagaagttcggtgtaaggatgtgccggattgtccatgatctgttttgccggtccgtattcgatcag

SEQ ID NO: 2618 - DNA, 557 bp, Unknown
  gut microbiota DNA sequence
tggaagcagcatattagcttcgtataccgcttttttcaattcttctaacatagtttcctcctgcctagtgcagatgtactactgctgcacgctcaatctccagtccctctttatatctgtccataaacacttcaaatccttccacatccttcggatccggtgcaatctgtacactttcttcttttgcaaatacctgttcttccagataagaagcaaggctctcgccttctgccttatttttacggtacgcagccagaagagcgattccccaggcgccgccttctcctgctgtttccatcacggataccggcgcattgaccgctgccgccatcactttctgtcccacaccttttgtcttgaagaaaccaccgtggccaagaatcttatccacaaccacaccttcttcttttaacaggatatccatacccagtttcagtgcacccacacttgtaaacaggtggcttcgcataaagttcgccagggtaaatttgctgtccggtgtgcgggcaaataacggacgtccctcttcaaagtgtgtaatatgttctccggaaaaa

SEQ ID NO: 2619 - DNA, 3747 bp, Unknown
  gut microbiota DNA sequence
gggatagcaagataacattgtgtccaaacgtaagataccccggaatcgtaaggtttccggggtttttctgtatggggaaaagttctggaattttctgtttcttatcgtgaagatctgtactataatagactggaaaaaataagcaggagaacttaaaaatgacgaatctaaaaacagattataaaagtatcatcaaagagacaagtatattaacggttgcggtagccattattgccgcggcggtttatttctttcttgtaccgagccatgcttccgtaagcagcatatcaggtcttggtattgtgctttcgaattttattcccttaccattgtcggcgattacaatgattttgaatgtggtcttgctgattatcggatttttcacctgtgggagagagtttggggtgaaaacagtatataccagtgtgatgcttccactgtttctgggtgtgtttgaggggatttttccggattttggctcgatgacgaacagccaggagttggatgtgctgtgttatattctggtagtcagtgtgggactgagtatattatttaatcgcaatgcatcttcgggcgggttggatattgtggccaagattatgaacaaatatctgcacatggatctgggaaaagcgatgtcgttgtccgggatgtgtgtggcactgtctgcggcgcttgtgtacgataaaaagacggtggtactgagcgtacttggaacatattttaacggattggtgctggatcactttatttttaatcataacgtcaaacggagagtttgcatcatcacgaagaaagaagaggaactgcgccagtttatcattcatgatctgcacagtggtgcgacgatctatgagtcgatcggagcctataatatggaaaaaagaaacgagattattacgattgtagataaaggcgagtaccagaaactgatgaactacatgaaccgtgaagatccgaaggcatttattacggtatatacggtgtcggatatgaggtatcaaccgaaacggtgatgaaagaaaagaatcatcaaaagtttacaaaggaaaacggatggtctaatatggaactatacgaaaatctataaaaaataagccggaaaggaagcaacggacaacgtaaagagaaaagggaaagaaattgtaaaaaaaggttttgcagaaattggtgaggaaactagagcgtttcatgcaaaccgtggagtgtcatcatgtatgcctgggaataaacaaagcggaatgaaggaagaaccggcagaaaatacgaagaagagaggaaatatgaaaatgaaaacagaactgcaaaaacagttatttgcattgcaggatcctggatatcgggaatttcatgccagactgattccgggaattccgaaagaagatattattggaatccgcacgccggtgttgcggaagttcgccggggaatttgccagagatcacagtcaggaagccgaggcgtttttaaaagaactgccacatcgctattatgaagaaaacaatctgcatatgctgctggtaacaaagattaaagattacccggaatgtctgcggaaagtgaaggagtttcttccatatataaataactgggcaacgtgcgatctgccggcaccgaaatgcttcgaaaaacacctggaggaattacttccggtgattcgggagtgggtgacttccacagacacctacacgatccggtatggaatcgggatactgatgcgactgtatctggatgacgcgtacagaccggaatatgccgatctggttgcaagggtacggtcggaagaatattatgtaaacatgatgattgcctggtattttgcgacagcgcttgcgaagcagtgggatacggtgattccatatctggaagaacggaaactggatcgctgggtgcatcagaagacgattcagaaagcggtggagagctttcgaatcacaccggagcagaaagtatatttgaagagtttacgttatccaaggaaataaaaacaggaagaatatcgaaaagtatcaaaacacatagaaagttacaggaacaaagagggaaatataactggaagatgcggaagcggtacatagagataactgtagaatagcaaaacagtgatgtaaaataacagaatccgctaaataataacagagcagattcatatgaaaggaagcgaaacaatgtcaacatctatgacaaaggggaacccgttaaaactgatgcttcagtttgcacttccccttttaatcggaaatttattgcaacagacgtataatattatcgatgcggcgatcgtaggacagattcttggggcgaaagcactggcaagtgtgggggcaagcagcagtgtacagtttctggttctgggattctgtatgggatgctgtaccggattcggtgtaccggttgccaagtactttggggcagaaaagatggataggatgagaaattatgtatttaacggtgcggtactgactgggggaatcggtgtgacagtgacgattctttgttctgtatgctgtccacagatcctgcatctgctgtcagttccggaggacatcttccgtggagcttatcactatctgctgattatttttctgggaattccatttaccttattatacaattatttatccagtattctccgttctcttggagacagccggacccccttcctgtttctggcattttcagcaatgttgaatatctttcttgatctgttctgtatcgtggtgctgaaatggggatgtgcgggagctgcagctgcgacaattacagcacaggcgatcagtggcatactgtgtcttgtttttattggaagaaagatgaatgtactgcatctgacaaaagaaaacagaacggtaaatataactgcggtaaaagaacttctggcgatggggcttcctaccggactgcagttttccatcactgcaattggcagtatggtaatgcagtcggcaaataacggactgggaagtgtgtgcgtttccggatttaccgcgggcatgagaatcaaacagtttgcgatgtgcccgtttgatgcaattgctacttcggcatctgtattttgcagccagaatatgggcgcaaggcagccggaacgaatcaagaagggactgcggcagggagttgcgattgcaacgatatatggtctgctgatcgggctggtgctgatcttcggaggacgcacgctgtcgatgatctttgtgaaaaaatcagcagcggatgtcttggatgcatcaggaaaatatctgcggtgtcttggatatttcttctggagtctcggtatcctgaatgtaagccgaatggtgacacagggacttggatattcaggaagagcagtactttccggggtgacggagatgctggcaagaacgattgtcagtctgggatttgtcggagccctggggtatacggcaatctgctttgctgatcaggcagcatggatcgcagcatgctgttacatagcaccgacctgtctgcactgcgtcaaaaaggtgacagggatactggaaggtaacggcaaccgataaaaagagtgagaagataaaagcaatatttagttatagaaatagcctatagctggatattgcttttttctattagacaaagtcaggaaaattgtgtatgataataaaaacataaaaacatagaaaaataataggaaaataaaaacgataaatatatgtaacagttcagcagatatgaacagaaagttccagagttgaaattggtgtaaaagcagatttcgaccctaga

SEQ ID NO: 2620 - DNA, 2628 bp, Unknown
  gut microbiota DNA sequence
tcccaaaaaagattaaatcttagtaatcctatcggtatattatcttccaacaaaacatacccctgcttatcacgaacttttttctcaaattcattatcaggcaagtgtctatcaagtccataccaaaattttttgtcgtctaactatacatatctaatttcaatcattatatctcaccattaaattccgattttcttacttctacaaacttgcagttattttctgctcaataaaatatatcaatggctttacttgcaaactccgctgtgcctgtaccaccaatattgtcaatattttccgtaaattctcctccaccagcatacattcttccctgaccgctgttttggttgcttcatcggcccactttctcatatgtggctcgcataactcttcgtcgcttaatgagtcaatcatttacaaaagcaatgatttctgctaagaaaatgccggttttgactgggatttactctacttaacgctaaccgtatcggcgaaaacaatgtcgtcgccataatttcttagaaaaaattatttttttattttagaaatggactcgtttttgttggaaaatcagctttgccgatttcgcccatttgcttgcaattccgctgaaaaagaaaccgtttttcatacgtttccaataaaaaacggaatgatttcgcgatttctgctaatcattccgcagcgtcccgtgcgggaatcgaacccacatctagtgcttaggaggcacttgttctatccattaaactaacaggactaacgtcgatttttggctcaaaacagggcttttcggccttttttcagccatcggattcggtaaccgattttttatatttttaaccggaaaatccggtaaaaattcacactacacagttcggggttcttggccacagctaacaaaaggtgacagtaccgaattgccttcgaactcagagtacttttcaaaagttgtcagtacaggttcttccttaggaggcgagtgctctatccagctgagctatgacgactcatgccgcaaacccttgattttactgggtttctgggattttccccttcggctatatataagattatcaactctttttcgagttgtcaatctacagattatttcggtaactgttcgctaccttcacagatatatttattctactatagaatacctgaaatgacaaccttaaaaattcaggcttccctgcaaccagataattcccttgaatcttcgaccaacttccgggattcccatcagatcttcctggttcatacagatatcgaagatcaggtcgttgcagttgatcgtcatctgatacagcttctcgccggtcagtttgttcgtggtttccatccattcaagaatctctcccattacattataccggtcgcactccatgccataaggcataaaatacgtatctacaatagaaaaaatatcttcgttagcgattcttcttgagatcatggcatacgtatccatatcatccatagtcagattttccatcgcttcttcatttccccggcgtgcttcgtagatcatctgcgttcttttccgggtcagctgctgatcccgttctctctgggcaatatttttttgaattggcaacaaaatcttgccctccgtagaaagaccggataaggtcaggttgctgaatccttcccccggtgtccccttggtacgttctgtcagatattctcctgcatttgccagataaaagatcagagtcacacccacacgcacatcgtcacacgctccggaaaaacagactttttcagaacgttgttctaccatcacatcttcctgactggtgataccgcttccggcaaaatacggaaaataatattccatccgaaactgatcctgctcatcataagttccacagacacgcagtccgatattcataccaaaatatcgggacaattccgcaaaaatctcgttttttccctgctctgcgatctttttctcatcacaggaaacaatcacctcttgcaggatctgatccagatctttctgctccagttttgaaaatcctatagcccgaagataactgtgcatacagtcttcctcctttcttattatccattttctgttaccgcatcacaggaatgacccggtaacttttctccgcatgccaacaccagatatccattgttcttcggatatctggtgtccgtaacagccgctgtctttttattattccatcgtaactgttcagtatcctcacagttacgagtcaaaatgcatttctaatcaccttcgatgatggcattttgacttgcattctatctcttatttatgtttcggtacgattttttcgattccgcccatgtatggctgcagtgctttcggaatatttacgcttccgtctgcattcaggttgttctccaggaatgcgatcagcattctcggcggagcaactacggtgttgttcagcgtatgagcgaaatatttaccgttttcaccgtttacacggatcttcagtcttctggcctgtgcatcacccaggttagagcagcttcctacttcgaagtatttcttctgtcttggagaccatgcttctacgtcgatagatttcactttcaggtcagccaggtcacctgagcagcattccagagtacgaaccggaatatccagag

SEQ ID NO: 2621 - DNA, 8401 bp, Unknown
  gut microbiota DNA sequence
agaagacggtctgtcttatctggaagcggaagtggacatgatcgagcaggaggaggaaaatcttccggatacggtaaaagaagcgatgcttcgcagcatgagagaactgttcggggcatactgcaaagaaaaccagaaaatgaatcaggaacaggtgcgtcagacactggagatcgaagatattgcggaactggtagatcatatcgcgatgaatattccactgaccttccagcaaagacagcagatcctggaatccgtatcgttgagtgaccgttacgagacactgggcgtgatcctgtccaatgagatcgaggtgatgcgtcttcgcacagagatccaggaaaaggtaaaacagcggatcgataaaaaccagagagattatatcctccgggaacagctgaaactgatccgggaagaactgggagaagacgataccgtatccgacggggatcattttatgcaggaagcggaaaaactgcaggcaccaaaagagatcaaagaacgtctgatgaaagagatccgccgcttcaagagtcttggatacaacaattccgagagcagtgtgtcaagaggttatattgagacactgttaaagttgccgtgggagaaagcgtccagagacaataagaacctcgacaaagcgagccagattctggaagcggatcactacggtctggaaaaagtgaaagagcgagttctggaatttcttgccgtgcggacactgacaaagaaaggcagcagcccgatcctctgtctggtcggaccgccgggaaccggaaaaacatcgatcgcgcgctccgtagcaagagcactgaataaaaaatatgtccgtatcagtcttggcggtgtccgggatgaagcggagatccgtggacacagaagaacatacgtgggagctatgccgggacggatcgccaacgggctgatccaggcaggcgtgaaaaatccgctgatgcttctggacgagatcgataaagtgagcagtgactataagggagatacagcatctgcgctgttggaggttcttgattccgaacagaacagcaaatttgccgatcattatgtagatcttccactggatctttccgaagtattatttatcgcgacggcaaatgatccacagtcgattccgcgtccgctgatagaccgtatggaagtgatcgaaatttccagttatacggaaaatgaaaaagaacatattgccagagaacacctgattccgaaacagatcaaagccaacggtctgaaggaaaatcaactggtgatcggggatgatgtgttaaaagacattatcgagggttacaccaaagaggcaggtgtgcgtaatctggagagaaaattcggtgagatttgcagaaagtctgcaagaaagatcctgcaggacaaggaaaaacaggtggtagtcacaaaagacaatctggaagaattccttggcagatcccgttatacttaccagaaagtcaacgagaaggatgaaatcggtatcgttcgcggactggcatggacaagcgttggcggagataccttacagatcgaagtcaacctgatgccgggaaaaggagaatttcttctgaccggtcagctgggagatgtgatgaaagagtctgcccaggcaggtatcagctacatccgctccgtggcagaccagtatgctatcaaaccggaatttttcaaagagcatgatctgcacatccatatcccggaaggggctgttccgaaggatggaccgtctgcaggtatcacgatggccacggcgatgctctccgccattaccggaagagcagtgagagcgaatcttgcgatgaccggtgagatcacgctgcgcggacgggtactcccgatcggtggtctgaaagagaaaatgctggcagcgaaaaatgccggtatcacaaagattttagtgccggatcagaaccgtccggatgtggaagagattgatgcggagatcaaagaaggtcttaccattgtatttgtagaaaagatggagcaggtgctgaaagaagcgctggtgtagaaggagaaagttatgattataaagaatgtatctctggatatcgtgtgcggtatcaccagtaagatgccgaaaaccggaagaccggaagtggcatttgcaggaaaatcaaacgtgggaaaatcttccctgatcaacggactgatgaaccggaaatcccttgcacgtaccagtgcggcacctggaaagacccagacgatcaacttctataatgtcaatgaagcgatttatctggtcgatcttccgggatacggttatgcgaaagcctccgaggagatcaaggcgaaatggggtaagatgatcgaagattatctccacaagtccaaagagatccgctgtgtatttctgctggtggatatccgccacgaaccgggaagcaacgataagatcatgtacaaatggatcctggatcatggctatgaaccggtcattatcgcgacaaaactggataagatcaagagaagccaggtacagaaacagctgaaagtgctccgtcagggactgcaggtggtgccgggaacgaagatcattccgttttcagcccagaccaaacagggtcgggaagaaatctgggatctgatcgatgaactgaccggaatggcagaaccggaggaagcgccagaggaataaggcaggagtactgtgcggaaatttataaattccaacaggaaaaacttgtaatataaaagaaaatcagatacaattaggcttgatatgcggaaaaacacgcaatcaggcctatttttgtgcgcggagagccgctgacggatattagaaaaaagaaggatccggtcagtatctgtcgtagaaaaaacaaagaataacaatttcgtaagaaagaaatggagaggcaatgggaattataaaagcagcaaaactggccttcgactacctccggtacggagaagagggagaagaaccggaagtaaacagagccattgaccacgtggatctggatattgaagagggacagtttatcgctatcttaggacataacggaagcggaaagtccacgctggcaaaacacatcaacggtttgctggtacctacggagggaactttgtgggtggatcatatggataccgcttcggatgcagatatctggaacatccgtcagaaagccggcatggtctttcagaacccggacaaccagatcatcggcacagttgtagaagaagatgtgggatttggtccggaaaatctgggtgttcccacagaagatatctggaaacgggtggatgagagtctgcaagcggtgggaatgaccgcttaccgtcatcactccccaaacaaactgtccggcggacaaaaacagcgtgtagccatcgcaggtgttatggcgatgcatccaaaatgcatcgttctggatgaacctactgcaatgctcgatccgaacggacgaaaagaagtactgaaggcagtacgggaactgaacaaaaaagaaggggtaacggttatcctgattacccattatatggaagaagttgtatttgctgacgatgtgtatgtcatggatcgcggacagatcgtgatgcacggtgttccgagagaaattttttccagagtggatcagctgaaaaaataccgtctggatgttccgcaagttacgttactggcgtatgaactaaaagaggcaggtcttgcaatcccggatggtatcctgacgatcccggaactggtggaagcactgagcaaaccgcagatccatgtaccggaaggctggaagctgccggaggcaaccgcgcagaaagaagaaaaagagctgtcacagggcaaagaatccctgaaactggaacatgtaggatacacatataatccgggcagtgcctatgagatgcatgcgttaaaagatgtcaatctggagattccgcagggacagttcgtgggaatcatcggacataccggaagtggaaaatccacactgatccagcattttaacggattgatccgaccgacagagggacatatttattttgaagggcaggatatctgggcagacaaatttcctcttcgtggactgagaagccaggtaggactggtcttccagtatccggaacatcagctgtttgagacggatgtactaacggatgtctgcttcggaccgaagaatcagaaccttccaccggaagagtgtgaaaaacgggcaaaagaagctctggagcatgtaggactcgatgaaagttactatgcgaagtctccgtttgaactgtccggaggacagaaacgaagagtagcgatcgcaggtgtcctggcgatgaatccgaaggtactgatcctcgatgagccgaccgcaggactggatccgatgggaagagacgagatccttgaccagattgcaagcctccacgcgacgagaggaatcacgatcattctggtatctcacagcatggaagatatcgcaaaatacgtggagcggatcatcgttatgaaccatggcgtcaaaacctttgatgatacgccgaagaaagtgtttgcgcattataaagaactggaagccatcggacttgcagcgccgcagatcacctatatcatgcatgcactggaagaagaaggaatggatgtggataccagcgctatcaacgtagatgaggcaaccgcatcgatcctgcaggcactcaggaaaaaggaggaagatcacaaatgatgcgagatatcacaatcggacagtattatccggcagattccattctgcaccgactggatcccagagtgaaatttgtgagtacgctggtctatattatctcactgttcgtattttcttcctgggtaggatatggagtggcggcactgtttctggtggcgctgatcgttctgtcaaaagtcccgtttggatttatggtaaagggattaaagccgatcatggtgctgttactgatcacgatgttctttaacctggtatttacgccgggagaggtattatggtcgttctggatcctgaaaattacaaaagaaggtatccggcttgccatcaagatggggatccgtctggtatttctgatcatcggtgcgtcgatcatgacactgaccaccacaccaaaccagctaaccgacggtctggagcggctgcttcgaccactgaacaagatccatgtgccggtacatgagatcgccatgatgatgtccatcgcacttcggtttattccgatcctgatggaagagacagacaagatcatgaaagcacagatggcgcgcggcgctgattttgagaacggcaatctgatccagaaagtaaaaaatatggttccgctgctggttccgttatttatctcggccttccgcagagccaatgaccttgcgatggcgatggaagcgagatgttaccacggcggcgacggacggacacagatgaaaccgctggcatatgagaagagagattatctggcgtatctggtcgtggcagggtatctggcactcagtattgtgttccgggtagtcggaatctaaattaagaaataaagattccgttgacagtattccacgagatgctgaacagctatgaaaagagttaattggtgaagtaagctgttttccggttcctgatggactggaaaacagctcttttattcgcagctgtgaaggcaggaaagagtacatgtattagtgaaggagtggaaacttagacagaaaggacgaaacatgaagcgagtaaaattgacggtcgcctacgatggaacaaactactgcggctggcaggtacagccgaacggtctggcggtgcaggaagtcctgaaccggtgtctctcggaacttctcaaaacgaagatcgaagtgatcggagcgagccgtaccgatgccggggtgcatgcactgggcaatgttgcggtatttgacacagaggcacggatgccggcggagaagttttcctatgcgttaaatacacggctgccacaggatatccgcatccagaattcctgccaggtaccggatgattttcatccgcggtttcaggaaaccgtaaagacgtatgaatataagatctacaaccggaagttcccggatccgacaaaacggctgtacacgtatttttattattatccgctggatgtggaaaagatgcggcagggagcggcgtatctgatcggagaacatgattttaaaagcttttcgacgtataaaccggaggtggaaaatacggttcggacgatctatgaactggggattcaacggtcggaagatgatgtgatcacaatacggatcagagggaacgggttcttatataatatggtgcggatcatagcaggaaccctgatccgggtgggcggaggttattatccgccgaaacatgtcaaagaaattctggaagtaaaaaacagagagcttgccggggagaccgcgcggccggaagggctgacactggtggaaatccggtatccggagtgggaggcgaaaaaagatggacatcacgtatcagtggatccgctcccgtagaaagacgatcgcgatccagatcgatcgggaaggacaggtgatcgtgcggacaccgtatggaatcacgaagcggcaggtagaagaattcctggacgagaaaaaagactggatcctgcagacgaggcagcgggtggaaaaacggaaaacagaacagatctcgatcagcgaagaggtgcgccgggaaggcatcgagcgggcaaaacggatttttccagagcggacggcgtattttgcaaagcggatgggtgtggattatggcaggatcacgatccgggaacagaaaacacgctgggggagctgtagcagcaagggcaatctgaactttaactggaaactggtactgcttgcaccggaactgttggattatgtggtggtacacgaactggcacaccgcagggagatgaaccattcgaagaatttctggaaaatcgtggaggcagaacttccggattaccgggaacgtcgcaggagactgaaagagtgccggatctgagagtgctgaaatgccggagggtacggttgaggtcaggagatcctgaaaagtgtcaggaaaccgtcagaatccaccggtaatggcccgcaaggtgtttttggtgagcggaagtcaaagaaagctgaaaaaacctggaaaaatcacgaaaaaatgattgacacacacggaacagtatactataataagcgagtgtgacgtagtgcgaaagtatcttaccaaagccccggaaagatatttttcattatagagataattatagtttaaagattgaattacaggagggaaatccatgaacagttttatggctaatccagataagattgaaagaaaatggtatgtagtagatgctgaaggctgcacattaggacgtttagcttccgaagtggcaagcgtattaagaggaaaaaacaaaccagttttcactcctcacgtagatacaggtgattatgtaatcgtaatcaatgctgaaaagatcaaagtgaccggtaaaaaattagatcagaagatctactacagccactctgattatgttggtggtatgaaagaaaccactctgagagaaatgatgaacaagaaaccggaaaaagtcatcgaacttgctgtaaaaggtatgcttccaaaaggacctctgggaagacagatgatcaaaaaacttcatgtatacgctggtgcagagcacggacatgaagctcagaaaccggaagttttaacattttaataggaggtaagtaacattggctactacaaaattctacggaacaggaagaagaaaaaaatctatcgccagagtatacctggtaccaggaactggtaagatcacaatcaataaaagagacatcgacgagtacttcggactggagactctgaaagttgttgttcgtcagccactggcagcaacagacaatacagaaaaatttgacgttctggtaaacgttcacggtggtggatttaccggacaggctggagcaatccgtcatggtatcgctcgtgccctgctgcaggcagatgctgagtacagaccggttctgaaaaaagccggatacctgactcgtgacccgagaatgaaagaacgtaagaaatacggtctcaaagcagctcgtcgcgctccgcagttcagcaagcgataatcgactgctcagactatatcaaaatggttcaaaaagcccggaaaatcaaggttttccgggcttttgctatatctaaacgggatgatatggtttgaccaaatttggcaaaacgagagccgttttcacccaatttttagtggtccgcaagtggttaaccggccaaaaagagggcaaaaagagggtcaagtggtgcccaaagtggttaaccgagagccgattttgtgggtgttttgggggctacttttcagccctctttcccctcgtttttggctgtggcagtttggcatagtttgacctaatttgaataattgaatatgaatttgatacagcactcagtgtaaa

SEQ ID NO: 2622 - DNA, 803 bp, Unknown
  gut microbiota DNA sequence
ttcctcatctgtatactctgtgtaatctttcatcctgttttcccctctgttacccccgctgacgggcgatctcgaaagccagaacccctgctgccacagaagcattcagggaatcaatatctcctttcatcggaatcgaagccacgaaatcacaggtctctttgatcagtctgctgactccttctccttcgtttccgatcaccagacccatcggtcctttcagatccatctggtagtacggtgtgccgtccatatcggcacatacaaaccacataccttctttcttcagctgttccatggtctgttttaaattggtcactttcgcaaccggtgtgtaattgatcgcacccgcggaagtccgtgctacggtcgatgtcagtcccacggctctccgtttcggaatgatcacgccgtgtgcacccgccaggtttgctgttcggatcatggctcccaggttgtgcggatcttcgatattgtccagtacaaagataaacggcgcctcacctttttcctttgccttttccagaatatcttccacggttgcatattcataagaagctgccatcgcgatgacgccctgatgatgaccggtctctgacaactgatccagtcgttcttttttcacataattgatgatcgtatcacctttttttgcttcccggataatagttcttaccggaccgtccggacagccgtccagaacatataatttatcgatcggttttccggcgcgcagtgcctctaagaccgcgtttcttccttcgattttattttccatcttctaatgcctccaatcccatttt

SEQ ID NO: 2623 - DNA, 598 bp, Unknown
  gut microbiota DNA sequence
ctcgcccagtgctcccggctcttttgttctgtccagaacggagatctgttttacagtatccgggatagcatcaaccagagcctgtgcacagaatggtctgtacagacgaacttttacaacaccgactttctgtcctgctgcctgcagataatcgatggtctcttcgatggtatcatttacagatcccatagcgataataacgtgttctgcgtcagcggaaccatagtagttgaacagtttgtaatctgttccgatcttttcgtttactttgtccatgtattcctgtacgatagccggcagagcatcgtagtacgggttacatgcttctcttgcctggaagaagatatccgggttctgagcggaacctctctgacatggatgatttggattcagtgcatgtttacggaatgcatcgattgcgtccatatctgccatatctttcagatcttcataatcccatgtttcgattttctggatctcgtgagatgtacggaatccatcgaagaagttgatgaatggaacttttcctttgattgctgccagatgagcaaccggagtcagatccataacttcctgtacggaagattcacacaacatt

SEQ ID NO: 2624 - DNA, 1501 bp, Unknown
  gut microbiota DNA sequence
gttcggctccgaggagaattttgtggcaaagatgaatgaaaaggcagcagaactgggtatggacagtacacattttgtgacctgtacaggactgcatgatgaaaatcattatacaaccgtgcgtgatctgaccaaactgttaagttacgccctgcagaatgataccttccggcagatctactgcacatcagaatatacgacaagtgctaccgcatccgcaccggaaggactgcatttcctgagtacgatgttcaagaagatggattctcccgcggtcaatggcggagagatcgaaggcggaaagaccggatataccagcgaagccggacagtgtctggcgagccttgccaaagtagacgatgtggaatatatcctggtgaccgcaggagccccgggaggaccttccaccgagccataccatatcgaggatgccaaaaccgtctataaccgtatccaggcgggagaacagggatctgtggcagatacggcagcagattcacaggatgatcaggcgacgacagagacggacgaagctgcctgaaagattttaaggaaaagttaagaaaaaagaagaaagattcgtcagaagtgtatggtatgataggaacatcaaaggagatcttattatactaacaggttcgaatagacagaagtgttttccgtgcggccacatggaaaacacttcttttgtatatgtaatttcctgtaaagtaaaaaaatgacccgaaagcatcagcttccaggtcattttctcaagttaagggatgcaaatattatgctctttcaactttgccggatctcaggcaagaagtacaaacgtacattttcttagctccaccgtctaccttaacctttacagattttacattggatttccacattttgttagatcttctatgggaatggctcacgttgtttccgaaatgagcacctttttcacagatcgcacactttgccatgactgcacctccttaacactatttatcgtaatcgttcgtaatcatagattcgcaacactagatattctaacagaagaattatcattttgcaagcaaaaatataaatttttcaaaaattatatttctttttctacaaaaacaggttataatacatacagtataattcatgaacgaggaaatttctaccccaaaatggattataaaatgagaaaaagagcaggttattgtagaagactcaaaaagtgtccgggcagcagaaccggaaaaccggagaagacgaacggcgggcagaacaataaccgggaatggaggttgacctatgaaagggcgtatgaacacgggaatgggagaaattaccatcaacacagatgtaatcgccacttatgcaggcagtgtggctgtggagtgtttcggtattgtaggtatggctgcagtaaatatgaaagacggtctggtaaaacttttgaagagagacagtctcaaacatggaatcaacgttacattaaatgaaaacaagatctccctggatttccatgtgattg

SEQ ID NO: 2625 - DNA, 3125 bp, Unknown
  gut microbiota DNA sequence
ggtctgttcttttcactgctgatcaacttccggtatatcgtaaagaatgcagaggagggtgtggcagttaccgtactttttgatgatggggtggatcaggcgacgatcaacagcatcggggaacagatcaagtcctataaaggcgtaacgaaagtagagtatgtgtcggcggaagaagcctgggacgaatggtccaaacagtattttggtaatacagaactggcatctgagatggcagaagggttcaagaacgataacccgctggcaaactcatccagttattctgtctatgtggacaagatcgagcatcaggatgccctggtaaaatatatcgagggacttgatggtgtccgggaagtcaaccagttaaagggagcgacacagaccttatcttcctttaataccttactgacttacatatccgtggcgatcatcctgatcctgctttgtgtggcggtcttcctgatcagcaacacggtagcaatcggtatttcgatccgtaaagaggagattggaatcatgaaactgatcggtgcgacgaacttctttgtaagagcaccgtttctgatcgaaggtatgatcatcggtctgatcggagcgatcattccgctggtattactttttgtcatgtacaagaaagtgatcgaatatgttcttaccaagttcagtatgttgagcagtgtggtacagtttatgagtgtcacacaggtatttgaagtactgacaccggtggcgctgatccttggtatgggtatcggactgttcggtagtgtgatcacgatccgtaaacatctgagagtctgatgaaaagggaacagtaaggaaacagagatttataaaagaaagatacaaagggggatgcagcgggaaagcggcagccccttttctacacttatctatgcccggaaaaagagcaaacggaaaatacggggtatcataggaacagacgggagacaacagaaatgacagaaaaaatgaaaacctggatcaggggatttgtgggaggcgtagcagcctgcgtggttgtgggcggtgccggatattttatctgctttggttcccttccgttgatcggggatcaggcactgagcatgagtgatctggcgaaagcgtccaagatcgcaaagctagtggacacatattatctggactacaaggatgaggatgaaaaaagtcagtatacgatggaggatggcatgtacagcggaatcgtggcaagcctgcaggatccatattccggatattattcagaagaggactataaacaactgcaggaatccacacagggagtgtataccggcgtgggacttacgatgtccaaggatccggacagcggtgtggtgagtattgtagatctggcagaaggcggtccggccgagcaggcggggatccagaaaggtgatatcctgactgcggtggacggagaggatattacaggaaaagaactgtcggagatctcaaaaatcatccgggaagataacaaaaaacagatagttttaacaatcgaacgtgacggcacagcgacggatatcacggtatcactggaaaaagtggaggtcacggtggtaaagagccggatgctcgacgattctctgggatatattcagatcacagaatttaccgacggtacttcggaacagtttaagaaggcttacagtgaactgaacgaacagggaatgaaggggttgctggtcgatctgcgggaaaatccggggggacttctgacagcggtatgtgatacgctggaacagattcttccgaaaggtatgatcgtgtataccgaagataagagcggacatcggacggagcatacctgtaaaggaaaaacaccgatcgatattccgctggtggttctggtcaatgaaaacagtgccagtgcagcagagatcttttccggggctgtcaaagatcatgaggttggaaccctggtgggaaccacgacgttcggaaaaggaatcgtacagcagacctttgccctgggagatggcagcgcggtcaaactgaccacttcgaaatattacacaccgaacggagtaaacatccagggaaccggtatcactccggatgtggaggttggctggccggaggatgcggaagaatttaccagtccgtcgcagtttaacgaactttcccaggaagaatgggagagtaaggatgcacagatgaaaaaagcaagagaggttcttgccgagaaggttgcacagggagagcagtaatggtaaaatgagaaaaagtgccgaaggaggacagcttatggaaaactatgtaattacgacagacaatactgctgatctgccttattcttattacaaagaacatcaggtagaatatatgtatctgacttaccagctggaaggtgtcacatacaacaaagaaaatgaactggatgtgaaagagttttacaaccggatgcgggcgggttccatgccgatgacatctcaggtcaacagtgaggaagcgaaagatgtacttcgtccgattctggaagcgggaaataatgtgctgcatctggcattttcttccggactgagcggaagctataacagtgtgcggctggcagcagaagaactgaaagaggaatatccggacagaaagatcatcgtagtggattcgctgtgtgcatctctcggggaaggtctgtttgtctacaaggcagtacagatgaaagaagcgggaacgtccatggaggaagtggcagcgtggctcgaagaacataaacagaacttctgccatgtatttaccgtagatgatctgttccatctgtacagaggcggaagggtatccaaagccgcagcgatcgtgggaacaatgatcaatctgaaaccgctgcttcacgtggatgacgagggacatctgattccattaagtaaggtacggggaagaaagaaatctctggcgacgctggtctccatgatggaagagcgcatcggaagctggaaagataaaaatgatattatctttatcagtcatggtgactgtgaggaggatgcacagtatgtggcaaaactggtcagagaaaagttcggatatgaaagttttctgatcaatacgatcggggctacgatcggaacccattccggaccgggaacagtagcgctgttctttatgggggactaccgttagaa

SEQ ID NO: 2626 - DNA, 2257 bp, Unknown
  gut microbiota DNA sequence
acgatctccctggatttccatgtgattgtagcttacggagtaagtatccgtgcggtttctgacaacctgattgccaatgtaaaatataaagtggaggcattcaccggtattgaagtggaaaacatcaatattctggtagaaggcgtccgtgtgattgattaattgaaggaggagctttagaaagcgatgaatacaatagatgccaaactgcttgccaggatgtttctggcaggagctaagaatctggaagtaaaaaaagagtggatcaatgagttaaacgtgtttccggtaccggatggtgatacaggaaccaatatgactctgacgatcatgtcagcagtaaaagaggtaaacggtctggaagacgtacagatgaccacgctggcaaaagctatttcctcaggatctttacgtggcgcgcggggaaattccggtgttattctctctcagctgcttcgtggatttaccaaaggaatccgtgatctgaaagaactggatgccgtagcactggcacgtgcggtagacaaaggtgtggagactgcatacaaggcagttatgaaaccgaaagaaggaacgatccttaccgtagcaagaggggttgcagataaagcactggagctggccgaggatgcggaagatttacagaccttcctggaggatgtactggaagaaggacgcagagtgcttgccaaaactccggatatgctgccggtactgaaagaagctggtgttgtggattccggcggacagggtctgatggttgttctggaaggtgcatttgacgcatttatgggaaaagaagtagatctgacctttgatgccggagaaaatgcaaaagtcgtaaaagtgactccgcaggcagaagcagatatcaagttcggatactgtacagaatttatcattgtattaaataaaaaattcacagcagaggatgaggtgaactttaaagcatacctgagttctctgggtgattctattgtgtgcgtggctgacgatgaagtggttaagattcacgtacataccaacgatccgggactggcgatccagcgtgcactgacttatggttccctgtccagaatcaagatcgataacatgcgtgaagaacatcaggaaaaactgatcaaagatgcagaaaaagtagcagcacagcaggcagaagaagaggcagcaaaagcaccgaagaaagaggtgggatttatctctgtatcgatcggtgacggatttggacagatcttccgtgacctgggtgtggattatctgatcgagggcggtcagaccatgaacccgagtaccgaagatatgctgacagcgatcagcaaagtaaatgcagaccatatctttatcctgccgaacaacaaaaacatcattctggcagcaaatcaggcgaaagcactgacaaaagataaagatatcattgtaatcccgaccaagaccgtaccacagggtatcacagcagtgatcaactatgtaccggaaaaatccgtggaagacaatgaaaaagacatgacagaagaaatctcccgcgtaaagaccggtcagatcacttatgcggtaagagatacccatatcgatgacaaagagatccatgagggagatatcatgggtatcggcgatcatggtatgctggctgtcggaaaagaagtggcagcagtagcaaaagaaaccgtagaacagatggtagatgacgagacagaactgatcagcatctactatggagaaggtttcacagaggaagaggcggaagcactggcaggagaactggaagaacagtacgattactgtgatatcgaagtaaactgcggtggacagccgatctactactgtattatttctgtagaataataatacccaaaaatgggagaagaatagaaaaagatgctggacctatgagcagttcagcatctttttcaggtttgggaagaggtgagagaaaagtatgagagaaaatgaatcgattcgtgcgctgaagggcgtgggggagaagacagagaagttatttcagaaagtgggagtttctacggtgggacagcttctccggtattatcccagagattatgatatttaccgggaaccggtgagcgtggacagtctgaacgatcaggagacgggtgcggttcttgcaacgctgacggcatcgttggatatgaaaaaagtccggaatctgaccgtgatctccggaacggttgcggatgctaccggacgctgtcgcgtcacctggtttaatcagccgtatcttcgcaaccagctgcggcgcggg

SEQ ID NO: 2627 - DNA, 928 bp, Unknown
  gut microbiota DNA sequence
gccaatgaagaaaaactggttccgagagaatgggtaaataaagaaggcaattatgtaacaaaagactttattgactatgtaaaaccgctgatccagggcgattatcagccaattatggtaaatggtctgccacgccatctggttctggacatgaaaaagaaataatgtgccgaaattcatgtaaaaataagaaggatttttaacgtatttttcctttttttcttcggtttgacttgactataatgtgctttttgattacaattattatatacgagtgcgaactgcatgagtaaaatgttttccgcttttcctggtgggaaatgtttggaaatttaatatacttttaggaggaatgtttaaatggcaacaaagtgggtttatatgttcactgaaggtaatgctaccatgagaaaccttctgggtggaaaaggtgctaaccttgctgaaatgacaaacttaggactgccggtaccacagggcttcacaattacaacagaagcttgtactcagtactatgaggacggaagaaaaattaacgatgaaatcatggctcagatcatggaatccatcacaaaaatggaagagatcaccggaaagaaattcggtgacaaagaaaatcctcttctggtttccgttcgttctggtgcaagagcatccatgcctggtatgatggatactatcctgaacctgggtctgaatgaagaagtagtagaagttctggctgctcattccggaaatcctcgttgggcatgggattgctacagaagatttatccagatgtactctgacgtagttatggaagtaggtaaaaaatacttcgaagaactgatcgacaaaatgaaagctgacagaggcgtgaaacaggacgttgaactgacagcagaagatctgaaagagctggctaaccagttcaaagctgaatacaaag

SEQ ID NO: 2628 - DNA, 619 bp, Unknown
  gut microbiota DNA sequence
ctgaagcttctcgagggcagtgatgtggaagtgccggtcggcgcgaacagcaagaatgctatggtaccgctggctacggtaaataccagcaatattttatttatctgcggtggtgcattcccggatctgactgagatcatcaaagagcggttaaataaaaaatcgtcgatcggtttccaggcggatctgaaggacaaatacgataacgataaaaacctgctggataaagtgacggtggaagacctgagagccttcggtatggtgccggaatttctgggaagactgccgattattttcacgttgcagggacttgatgaggatatgctggtgaagatcctgaaagagccgcgcaatgcaatcctcaaacagtatgaaaaactactggagatggacgaagtgaagctggaatttgaagagaatgcgctgcgggcgattgcgaaaaaagcactggaaaaagataccggtgcgagagcactgcgggcgattctggaagaatacatgctggatatcatgtatgagattccgaaagatgacagcagcggagaggtgatcatcaccgaagagtatatcgaacacatcggtggtccgaagatccttctgagaggacaggaaccgctgt

SEQ ID NO: 2629 - DNA, 1291 bp, Unknown
  gut microbiota DNA sequence
actgcccgtgattttggggaaataccggaaaaaaagtatacgaaatggtttgattatgatagaataaaacagacactggtgatccggcacagacagccgggcgatcggatctgcctttttgacgggggcggcagtaaaaagctgaaagattatctgatcgaccggaaaatcccggcacagaaacgggatcagctgtggcttctggcggacgggtccgacatcctgtggatcataggagaccggatcagcgcagcctataaagtgacggcggaaagtcagaggatcttacaggcagagattaaaggaggaagtactcatgagtgataaaattaatgtattaatcagcgaagaagatgtagaaaagagaatccaggagatcggaacagccatcagcaaagaatacgaaggaaaatgtgtacatctgatctgcgtattaaagggcggcgtatttttcgcatgcgaactggcaaaaagaattaccgtaccggtaaccatggactttatgtccgtatccagttacggagatgacaccaaatcaagcggtgttgtaaaaatcgtgaaagatctggatcagccgctggaaggcaaagatgttctgatcgtagaagacatcatcgattccggacgtaccctgagttatctgatcgagatcctgaaaaagagaaatccggcaagcctgaagctgtgtaccctgcttgacaaaccggaacgtcgtgtgaaagaagtacatgtggattatacctgcttcaatattccggatgaatttgtcgtaggttacggtctggattatgcacagcgttacagaaacctgccatttatcggtgttgtggaaccgggcgcaggagaagactaaaaatacaaatgaataaaaacagtcacagactgaatgaagtataaaaagtactcccggcggctttctgaacatcagatacagaaagattccgggagtacaacccgaaaggagaaacaacgtgtcaaaacaactgaaagggatagtagtctggctgattgtattggtgctgatggttgccggattatcctatcttggcgagaagctgcagacgcagaacaattattcctacaaagaactggaacaggatctggagaatcatcaggtgtcggaagcagtgattcatcagaatcagcagaccccgacgggacagctgatcgtggttcttaccaatggaagaaacaaagacatgtacatcgatgacgtcaaagaagtgcgtcagatgctggagaatgccaacgtatcctaccagatgacggatgtgccgaaagaaagcaaact

SEQ ID NO: 2630 - DNA, 1028 bp, Unknown
  gut microbiota DNA sequence
acacattcttataaggatactgccggtactcatttccctctgaatctttttccgtactggcaagaatatctccgtccgaagccaggatcttccctttggttacccgctcctgatacgttccctgtcgtttgctgttgtacggactgttggcgtactcatcccgcagttccacattaaagtaaaccagataaccgatcagggcaaggaaaattcccacaaagcagtaggcaatgattgtgtattccttaccagttgaggcttttttctgtttgctcctggattttttcttcgagtgttttctcccggtatccagatcctcctgaaactccatttcctccaggcgggttctgttttggtggtttctttgattttttacgtttctcttttctctttctttcaagttcttcaccttcgtcttctctgagaatatacagtccctggatgatggcaaacatcagaatcgtacagatcaccgagcttccgccataacttaccagtggaagggtaattcctgtcataggaataaatttgctggttccgccgactgtcagaaatacctggaacgcatattccgcgcccagtcccatcgcgatcagcttataaaatggtttgctcatccgcatggaaacattgacaatcatcagatagcagctcatgcagaccagaagcatgcagattgcaaagatcgctcccagttcctcacagatcgctgcaaatataaaatccttgtccacaacagggatgatattcggcattccttttccaagtcccataccgaaccatccgccggcactgataccgaacagtccctgtgcaacctgatatccccctccgactttatcatataccgcaatcggatcctgccatacaatcacacgctgccgtacatgattaaacagaaaatacgccgcaaccgcagccactgcaccaccggcaagtcccgccagtgcataccgggctttctttgttgccacatacagcatgacaatatatgccacgaagaatacgaccgcacttcccaggtcctt

SEQ ID NO: 2631 - DNA, 1052 bp, Unknown
  gut microbiota DNA sequence
gatgcaggcgcgccatatccatgataaaacgtccctttcccattcccacttcaatctgtaccggctgctcattgccaaaaagctgcccccatgttcccttgtgtgtctccggttcctgtaccacataatcgctggctgcaatcgtctctttagagccgcgtatattccttaacctcatatatttccctccaggtattttcttgtgtaaaacagctatgtcgcgctttattctactataaaagaggcatacttggaaaggactatttttcattatgaatatgaataaatttgttatacatttccaataatttgtatacatatagacagttctgatttactttttgattgaataggtgtatgataatgataaattttaaacaaaggagtagggaaaaatggaatctgtaatcgacaaattgtctgaaatcgagacagccgcttcccgtattatggaatctgctgtcgaagaaacccgacgtcaggacaacgcggccgaggaacgtacctctacttatgataacgatacggatgctcaggctgccagaacactggaagctgccaaacgcactttgcaggaacaggcggatcgggaactggaacacctgaaaacctccaccgaacgttcccttaagcacatggatgcttattataaggaacataaagatgcattatgcgacaagatttaccacaaaataatcaggatgtgaagtatatgggatcattattatcttacagtggtctgaccacgaagatccgagccatgcagagcagactgctgactgacgatcagtaccgggaactggcagaactcaaaagcgttccccaggcagttacctatctgaaacagcagcccgcttatgaagcgatcctggactctctctcagaagaggctctgcaccgtggaaagattgaacagcttctggtgaattcgatttatcgcgattttaccaagatctatcaattttccaacatggagcagcgcaaatttctcaatctttatttcggacgatacgaagtgtccatcatgaaagaatgtctgaataagatctttg

SEQ ID NO: 2632 - DNA, 3247 bp, Unknown
  gut microbiota DNA sequence
agtccctttaaagtgatcagctggttataaatatcggaagactgtaacacaccaagatcggtagtgatcgtggagagctgctgatcgatggtgtccagcacaccgccggtctgtccgagggcagcagaactgtccgacaggctggtatccagctgggtgagaatcagttttaactgttctatggtcggattcacatccgaaagtgttgcggtcagcgttccactcaaggtagataatgcatccatggattgacttaacttcggaatcagagattcattcagagaattccggtaagtctgaagtgaggaacgactgtccgtcaccagtttttccagagaagttctggtattctgtgctgtggtcatagcttcctgaatactggaattgctggtactcaaagaatccagaagttcctgaaaagaagcattctgctgttgcagaacagtaattttctccccaatcagcccggaaagcgtggaatcggaaccgatggattcatgaagcttttgaagttcagcgagtaattctgcctgtttctggttcagactggttacagaatcgatactatcaccgatcaccgtattcacctgagaagctttcgtctcgaacgtaccgagttttacaattgcggaagcgtacgtgttatttaacagtgtttcaccattcgataatgcactgctgaactgactcgagaaagatcccagtgactgtcggctggcagcaagaagcgctgtcgtgtcagtcagcgttttggagccggagtccgcggcagaagatactgcatcgagagtctccagcgcatccttgatcagcttctcggaagaaccggatgtttcttcaaaatttttcagaactttttgatactctttcagattgtctctcgtctcagaaagtgcagtggaaagttcggaattgctcttatcaatctttccggtcagatcaccggcggaagtacggatcagttccgataccgtttctgcggctaccgaagaaaacgtgtcgttgatctgctgctgaatcgtcgaagcaccggttgcagtaatcttcggagcaatcgcatttttcttctcattgatatagtagtccagttccggctgtttcacctcgccgtccagaatactaaggagcaattcactgaaattttcgggaatcacgatagcggcataatattttccggaagtcacaccggcttttgcctgcttttcatcgacaaacgtccaaccgagctgcttatttttcttcaacgtatccacgatagtgcctccggcatccagagacatcatctctgtactggctccggcatcacagttggcgatcgccactttgatgttactggtattgccgtaaggatccatgttggcggcaatattgaaccaggcatacagcgatggaagaacacacacgccgaccatgacgattgctgctgccgggttggtaaacagccgccgcatatcacgggcaaagatctgaaatatctttttcatacacacagagcaaccggaaatatccggtcacataacctccttttagttttctgtactcccaaaataagagagtaaattttgtagaaaagtataacaaaaaatgatagcaaagtccagaaagccaccaagataaatgtatgaattttcttcaaaacctaccaactttacgcgcaccttcatttcccaaaacctgccaattttatgtgtacctcccgtctccaacacctatcaattttacgcacatcttccgtctccaacatccagaacccatgcccaggcttccactcgtcagacagccttatgctggcgctcttagcaaagatgagatccagcatttacgtaggctttcgcgagggtccgccgaccctcgtgaacatagccggagttaatgcttagctcagatttgcgttgccagcggttgtctgacgagtggaagcctgggcatgggttcgtccgtacgcgaaaagatttcgtccgtataccaaaaaggtcagatttacagtaagttagcaatgtgctaaaataaaaaccagcaaaacaaacagaagggaagatgagaaaaatggcttgtacaacaatcttagtaggtaaaaaagcatcctacgacggatccacaatgatcgctcgcaacgacgactccggatccggacattttacagcgaaaaaattcacggtggtaacacccaaagaacagccgaaaacctatatttccgtgctctcccatgtgaaagtagaactgccggaacaggcgatgcgctatacatccatgccaaatgcagaaaaaggagaaggaatctgggcagcaagcggtgtcaatgaggcaaatgtagccatgacagccaccgaaacgatcacaaccaacccgcgtgtacagggcgccgatccgctggtggtatatcagccggcaaaagacggtcaggaagaagtaccgggtggtatcggagaggaagatatcgtgtgcctggtgcttccttatattaagagcgcccgcgagggtgttgcccgactgggacagcttctggaaacgtatggcacatatgaaaataacggaatcgctttccaggatgctgacgagatctggtggctggagacgatcggcggacatcactggatggcaagaagagtgccggatgatgtgtatgtcgtgatgccaaaccagcttggtatcgatatctttgatctggaagatgcgctgggcgaacagaaagaatatatgtgctccccggacctgaaagaatttatcgaaaaatatcatctggatctctcgatggacggtgttctgaatccaagagatgccttcggaagtcatgacgattccgaccatgtatacaatacgccgagagcctggtacatggaacggtatctgaatccgaattccgtaaactgggacggtccggacgccgattacacaccactgtccgatgacattccgtggtgcatggttccggaaaagaagatcacgccggaagatgtaaaatatgtattatctgcacattatcagggaacaccatatgatccgtacttgtcctatggagacaaatccatgagcggtgcgtaccgttcgatcggtatcaaccgaaatgattttatgtctctgatccagatgcgcccggaaggaggagctgcatttggaacgctggaatgggtggcttacgcatcgaatgcatttaacacgatggttctattctatgcggatgtggacgagacaccggaatatcttgccaacacgaccggtgaagtctctaccgaaaacttctactgga

SEQ ID NO: 2633 - DNA, 678 bp, Unknown
  gut microbiota DNA sequence
gctgagtctggatctgagacagatgaaaaaactgttaaacagaaattcgattattgcactggtatctgcagcggcaagtgtctgcctgatggcattcctgtttggtgttttattcgcatccaagattgatgagggatggaagattgccggaatgtttgtcggaacctatacaggaggaagttccaacctgacagcaattgcagttggacttgatgcttcaagaggaaccattgcggctgctaatgcagcagactatgtaatcggtattccgagtctgattcttatgtttgcggcaccggctatctacaaaaattcaaaacggctgagaaagctgtggccgtatgagatgacagaggcagagctgcagggcgacggagatcatgaagaactgatggcatccaaggaatggtccattcaggagatcgcatggctgttggcaattggcttcggaaccgtatgggcagctacgaccattgcaggtatggtatttggaccgggcttccgcagtgcaggacgtattattctgattacgaccttctcgattatcattgcacagattccggcagtacgtaagctgcgcggcaactttgacctgggactttttgtggcactgttattcctgaccaccattggattcgccgttgatctgaaacagttcttcggatctacattctatat

SEQ ID NO: 2634 - DNA, 1825 bp, Unknown
  gut microbiota DNA sequence
ttttctttatttatcaccggttatccgacactgatccactctcgtataaacacaggctttaacccgttgcacacgtaaatcaaatgctataaaagaaaaactaccgtcaacttctacccaggatgttgacagtagtttttctctgactctcatcagatagccagcagatttttgattgcttccatataaatcagcacagattcttccatgccggacaccagaatatactcatccgcgctgtggatccgataatcgatgcctggcatctccggaccgaaggcgatgatatttttcagagattttgcataggttccgccgccgattaccatcggtttgttctcggtatctccagttacatctacatacgccttgtacaacgcggtaaccagtggtgaatctgccgggaagaacagggattcccctacgctctggatctcgatacgaccgttttcgtcttccagttttccttcacacatgctgcgaagttcctcttctttcagagtgaccggaacacggatatcgatcgtacaggagatcacgccgtcctcggtttttacgataccgttacagaaagtcagatctccgtaagcatcggcaaacttcagtccgatgcctgcaccgtcacaggaagttcccagatgggtattatagaaagtaacaaaatcatcttcaaatcctgctttttccaggcattcgaaggtaacacctgctgcattgacacccagcgtcggtgtgcttgcatgtgccggaacacctttggcatagatggtcagggttccattttcttcggttactttatattcctgcagttttgtctcggaaagtgctgcttccagtctttccttcagaccgttttctgccgggatcaccgtattacaggagtcgcagaccgcatttaccacaaatcctccgttcatggagatgatctttgtgtttttggaatacgccatcatgtgcacgccgcctttttccccgtggatacacggatagcttgcatccggtgtaaaaccacaggagagttcctcagcgacttcattatagtgttccatacatttggatccggtttcctcgttgcatcccatgatcaggcggacacgtttgtttaatttcacaccggaatcccgcagtagtttcatcgcatacagtgcttccagaaccggtcctttgtcatcggttgttccgcggccgtacacatagtcgccgtcgcgcgtcagggtaaatggatcgtgtgtccagtcaccgcctgccggcacgatatccagatgacctgcgataccaacgatctcgtcgccctcacccatctctgcatatccgcagtagttatccagattcaccgtcttaaatcccagttcctctgcaattttcagtcccacttccagtgcttttgcaggaccttccccaaacggcattccctctgccggtgtgccaagctgagaatcaatggcaaccagtcttccgaggttcgcaagcatctcgtctgtcaatgcatgaatttcttcttttatactcattaatctttcctccaaattttcatttaatatactcagtataccagataatggaattgttgacaatttgcattttgtagttgcaggattcatcatattcaggattacggttcattccgtatcagcaacacacctcgcggaatattaccagtgaacagtaactcttcaggttcatccggactagagcgtgtctgaaaaaggcttttcgtgagctgcgagttccagtttgtgggagagtttatccgaatgagggcggcgtagcgggctacggcaaccgaatgagggtaaaatataccgcaaagtggggcttgcagatt

SEQ ID NO: 2635 - DNA, 2264 bp, Unknown
  gut microbiota DNA sequence
gctacggtgtgttttccgtaggtaaacatggcgagatcattgctgctgtcaccgaagacataagcatcatccagctccagtccgaagtgtttcaggataaaatcgatggcggttcccttggaatatcctttcggtacaacttcatagacaccgcccaggcggtcgatcagatccatatcttttgccagagcagggagcagggtgtcggtatcggtctgctcgtcggtgtagatgacaaatttgtcaaagtcgcaaagtccgctttcgatatagtgctctttggtcagtcccagtgtggcgagataccggcaggttccctccagttttgcaaaccgggtaatgtgggaagagcggtagcagtcctcttttccctcaagaagaagccctgcatttgccgcccttacctgacggatgatctccgcctgacgctcctttgggatctgcgtggaggtgagcacctcatcgttgtatacaatatagcttccgcagccacacagatacccgctgaacggcagctgacagatcatcggcggcagacagcagatggttcgtccggtgttgataaataaaagatgtccgagatcattggctttttgcagagccgcagaggcagattccgggattttaccggtaatctcacttaaaattgttccgtcaatatcaaaaaataatgctttcttatttgtactcatgttgattctccatatcacctgtgttttcataaaattgcagtttattatacagccggagaatcggaaatgtaaatataaaataagaagaaaaatggattcgggggatttcagagggggcaaagtatgttaaaatagaactattcagcgggaaaacagtaacccgcagaaaaggataaaaagaaagctgtttcggagtgtgtaaaatacaaagatgcggaacagttataaacagaaaattttcaggaggaaaaaagatgaccaaaaaacagagaaccctggagattatagagcggttgaagaaagaataccccgatgcggcgtgcaccctggattatgaccaggcgtggaaactgctggtgagcgtgcggctggcggcgcagtgtactgatgccagagtgaatgtggtcgtggaggggctgtttgaaaaatacccaagtgtggaggctcttgccgaggcagatgtggaagatatcgaggcaatcgtgcgcccctgtggtctgggaaagagcaaggcgcgggatatcagtgcatgcatgaagatgctgcgggatgagtacggcggaaaagtaccggacgatttcaaggcattgttaaaattaccgggtgtgggaagaaaaagtgccaatctcatcatgggagatgtctttggcaaaccggcgatcgtgaccgatacccactgtatccggctgactaaccggatgggactggtagatggcatcaaagacccgaagaaagtggagatggcgctgtgggagctggttccgccggaagagggaagtgatttctgtcaccggctggtaatgcacggacgggaagtctgtacggcgagaaccaaaccgtactgcgaccggtgctgcgtgaacgacatctgtaaaaaggtgggcgtagagtaggaggatggaacgatgaaaatcgggatcatatcggacacacatggaaaattgcatctgccggttctggatctgatcgcggcctgcgatgtggtgctgcatgccggagatgtggataagagtcggaccctggatcagctctggatgcatctgaaaccgaatgcccctttctatctggtacgtggaaacaacgaccgggagtgggcagaacgtatcgcaaaaacacagcggttttgtcaggcgggtgtttcctttttcatggtgcacgacagaaaagatgtttcctgggatctgaatggcgtacaggtagttgtcttcggacacagtcaccagtttacggtggaagaaatcgacggaagactctggctgaatccgggaagctgcggcagaccgcggttcggcgcacctttgacgatggcggtgcttacgatcgaagacggagtggaaaaccaggagtggacggtggaaaaaatcacgatttccagtcagaatgtggaaaacaggagtatagtatggaaaaaaatacaaccaaaacagaagtaagagagaaaatacaggaacttttaaaaacattgaaggcagagcaggagaaaaagccgctgcgtctggtggaacagctggggtatctgatgtatgtccgcctgtttattgaatcacagaagagagccagcctgcaggagag

SEQ ID NO: 2636 - DNA, 4964 bp, Unknown
  gut microbiota DNA sequence
ggttctggtcatgtacggcgaccatctgccgacgatggatctgaaagtggaagatatgaaaaaccgttatctgttccagacgaaatacgtgatgtggagtaactttgatatgaagaaaaaagacaaaaacattgccgcttaccagatggcagcggaagtgttcaaccgtcttggcctccacgaaggaacggtcttcaactatcatcagaccagaaaaggaaccagaaattatcagctggatctgcaggcactgcagtacgatatcctgtacggaaaacagtatgtctacggcggagaaaatccatttgcggcaacacagatgcagctgggtatctatccggcgacactggaacggctggagtccatcggaaacggcagttactatgtctacggaaccaattttacggcgtcgagcaggctggagatcaacaaagaactgcaggagacgcagtacatcagtccgacgcagcttctggtgcagaatgtagaactggcggacggcgaccaggtatcggttgcgacacagagtaacagttccacgaaaaaagtactgtcacggacggattatctgacctataacgaagataatggcgagctgatgtcgcaggaaagttatcaggcgaaaaagtcggcaaaagcgatgattgagcggctgaaagaacagcacgagaaagcacaggcggatgagcaggcagatgacggacagacacaggaagagacgacaacggaggaaacaaccccggaactgtctctgactccggcaccggcatccaccccggaatcctgagaaaagtctaaagttgcgacataatttacttgattattaccaccactattatataatggaaagtaccgggaaaccggacaaatacattagataaagtggtggtaattttgaattatagagaaatcgtagattatattgaagagataccgaagtttacatcgaaaaaccctctggatcacacaaaagccttgctgaaacgcctgggcgatccgcagaatcagatgcaggtgatccatgtggcgggaacgaacggcaagggaagcgtctgcgcgtacctggactccatgctccgggcaggaggctacaaagttggtttatttacttcgccgcatctggtaaagatcaacgaacgttttaagatcaacggagagatgatctccgacgaacagtttgtgaaggcttttgaagaagtacagacgatcatccgacaggcacaggaagacggactggatcacccgagctattttgagacactgtttctgatgggtatggtggtctttaaagaagcagatgtggattatgtggttctggagacgggacttggcggaagactggatgcgacgaacacggtagaccgtccgctggcatgcattatcacatcgatcagcctggatcacgtggaatatctgggagatactatcggaaaaattgccggagagaaggcgggaatcatcaaaccgcaggttccggtgatctatgacggacaccagccggaagcctccgaagtgatcgaaaaacgggcaaaagaactgggttccccggcatttgcactgaccgaggatatgtatgagatgcagaaaaatacaagagaaggcattgatttttccttccattgtaagtattataatactgttcaactgtcgattccgtatatcgcaccgtaccagatgatgaacgcttctctggcatttttcacgatggaacagctgcgggatgtgcataagattccagtggaaaaactgatcgagggactgaaaaatacccattgggaaggccggatggagacgatcttaccggatgtcatcgtagacggtgcacacaatgcagacggcgtggcacggtttgtggagacggcatgccattttggaaaagagcatccgatcacgctgttattttccgcagtggctgacaaagagtatgaaaaaatgatccgcacggtcagcgaaaagatccgcccgcgggcagtcgtagccacggaagtgggcggcagcagagttgtacctgcgaccgaacttgcacagtttttcaaagaagacggatgtgaacaggtgattgctgaggcaaatgtaggagaggcatttgaaaaagcattatctttaaaaggtgatggaatgttattttgcgttggatctctgtatctggtaggtgagatcaaagagtacctgcagaagaatccaaaagcataggagagaaaagaatgattaattacgaagaggaattgaaaaaattcaaaccgtgtcttgatgtggacgagatcgagagtgcggtgtatacacgggatctgaccgatatcgtggatatcctgcaggagatgttgaaaacagagaaaaaagaccggaaagaataaggggtaaaacatgaattgtatgaattgcggagctccgcttggaaagtcggattactgtccgagctgtggttttcatgtggaagtacagaagaaaatctggcagctgtccaatacctattacaatctggggctggacaaggcgcagatccgggatctgtccggagccattgatctgttaaagcgcagcctgaagtttaacaagttaaatgttcaggcgagaaacctgctgggactggtgtattttgagaccggcgaggcggtagcggcgctgagtgaatggatcatcagtaaaaatatcatgccggaaaacaacatcgcttccgagtatatcgaacggctgcagcagaacgccaacaaactggatgtgatcaaccagactatcaaaaagtacaatgacagtctgaagtgctgccgcaagggcagtgaggatgtggcggtgatccagctgaaaaagattctgaaccagaatccgaagctgattaaaggctatcatctgctggcactgatctatctgaaaaaagaagagtacgaaaaagccagaaggatcttgaagaaagcggcgaagattgacaagacaaactctaccaccctgcgtttcctgcgggaagtagacgagcagaccggaacggttaccagtctcgagccgagacggtgggcatttggtctgcgggaaaaagaagacagaatgccgagaaatcagtccgtcgcttaccggacagaaaacgatgtggtgatccagccgccgaccttccgggagagttccatggcagcaactttgctgaacctgggatttggttttctggtaggagcctgcctggtatggtttttgatggtaccggcaaatacgcagcgcatcaacaaagcggcgaatgaaaaagtagtaagttacagcaatacgatggcaacacagtctgccgagatgaataagatgcaggaacagatcgaccagtcggaagaaacggtagcatctgcccagcagcagatcgaggatgcccagaatcagacgaccagttatgagaatctgatcaaggcgtatgcagctttccagagcggaaattatacttccgcggcgaatgttttacagaatgtccaggcagatcttttgtctgtggatgcgaaagaaatctatgattcgatctataagaacatccagacgacgatgaagaacaatctgaaaacacagggcgagcaggcattttacgcgaaagattatgagactgcgatcaccgatctgagtcaggcaatggagatggatgattcggactatgaagtgctgaatctgctggcgcattcctaccgactgaatgaacagtatgaacaggcggtagagatcttccagaagatcgtggatcggttcccgggtacgaaacgtgcgaccactgcacagaaatatattgacaacggtggcaaaggatttgacacggttggtcagaagagcagttccggtacaaccagtacacagacgcagagtcagacgacggcttcacaggatactgcacagagcggagataccaccggtacacaggatacaggcggaaccgaagccggtcagaccggtaacggagacaatgccgaaggaacttccggggaagacggacaataagagaaacctcagagcgggggaaatacaaaagaacttgtatttcccccgttttttgtatatggggaatacaggtcagaaggaaaaagaaggggaggatatctatggaacaatttcaggtgaagggacggacgttagtgatccggatgccaaaagagctggatcatcataccacagggcagattccgcaaaaagcagaccgaatgatcggggagaggaatattcagcggattgagtttgacttccgggataccggatttatggacagttccgggatcggtgtgatcatgggaaggtatcagaaactgcggctgctcggggggagtgttgctgcgacgcatgtcagtgacaggatctggcggatcctgcatctggcgggagtgacgaaggtgctggaagtagaaaaggaacgaaactggaaggaaaacaaataaggggggagaaaagatggaacagaagaatgagatgatgcttacgtttgacagcagatcgagcaatgagtcatttgccagggtggcggtagcggcatttaccacgcagttaaatcccacgctggaagaggtggcggatatcaagaccgccgtgtcggaggcaatcaccaatgcgattatccacggatatgacaatcaggtgcgaaagatccggatccgctgtcaggtcagtgaacggacactgtatgtgcaggtggaggatgacggcaaaggaatcgcggatgtgaaaaaagcgatggaacccatgtacaccacacggccggatctggaccgctccgggatgggatttgcattcatggaagcgtttatggatcaggtggaagtggagtcaaaagtgggcgtgggaaccatcgtccgcatgaaaaagaagatcggacagacgcagcagccatttgcataaaaggaggtcctatggagcgtaccctcgggttgatacagagagcacacgatggggataaagaggcgcgggacatactggtggaagagaatgtggggctggtctggagtatcatccggcgg

SEQ ID NO: 2637 - DNA, 2506 bp, Unknown
  gut microbiota DNA sequence
tccggcggtttcagaacagaggcgtggagccggaggatctgttccagatcggaacgatcgggctgattaaggcagtggataagtttgactgcagctatgaagtctgcttttcgacatatgctgttccgatgattaccggagagatcaaacgatatctgcgggatgacgggatcctgaaagtgagccgttcgttaaaagaaacggctgcgaaagcgtaccggatccgggaacagcaggagaaacagacgggcagggaaccgaccacgcaggaaatcgcccgggaactcgggatctcgccggaggaactgatggaggcgatggattcctatgtgcaggtggaatcgctgcagcagacaatctatcagggggagggaaacacgatccttctgatggataagctggaagaaaaagaaaatcagagtgagcgggtgctgaaccgcctgtttctggaagaaatcctgggaaaactggagggcgaagagagggaactgatctatcagcggtattttcaggaaaagacacagagtgtgatcgcaaaagagatgggtatttcccaggtacaggtatcgcggatggaaaagcggatcctgaaaaagatgcaggaggaagtatagagcacacattttggcacatactacttgcaaaagaaaggaagtggtatgatggcagggaaaaaatggtggatctggctgcttgcagttctggtggcagccggagtgctggcggtgcttctgatgcagcagggcacgccgcagacgcaaaaaggaggaaccctggtacaacggctggaggcgatgtgccatgggtgatgtactgtatatccagacagagaaaaaccggaagatcacggatcctcatgtgcgtcttggcgatatcgcggatcttacgagtaacaatccggaggttctgcagcgatgcaaagtacttcgggttctgacactggagccggaaaaatatggcagatatacggtttcagcaatggaactgatctggctgatccagaagaaagaagagaaggtggaagtggatcatgtcggcgaaccgcagttcatcctgacgtacgaggatccggcagggaaaaatatagtgatgagttggctgaaaacggcgtttgtatgcctgatcacattctttggaacgatgttttctatcatgactttcaatatggatgtggatatcccgactctttttgagaggatcagtggacagttcacctcgaatcccgccgggctgacgattctggaagcaacatattcggtggggatcgggatcggtgttgtctttttctttaatcattttggcaagtggaagatcacggaggatccgacaccgatggaagtggagatgcgcgaatacgaggatcaggtggatctgacgattctcgagatggagcgtcgaaaggaggaaaattccggatgagagaagccttgcttggcgcggtgggactttgtatggggatgacaatcgcaagcggtgtggtagcttttatcatcagcctcgggatcgtaccgcggtttgccgggattacgagaagcgccacgcgggtgcggctgtatgaggactgttccatggtcggtgcggtgcttggcaatctgctctttctctaccaggaagcactgccgcttggatatgtcggacttgccgtctacggaagtttctccgggatttttctgggaagctgggtggtagcactcggagaggttgtgaacatctatgcgattcttgtccgccggatcggtctggtcaaaggaatcggtctggtgatcctcagcatggcgcttggaaaagtagccggttctctttggtttttcttttgctgagcagagttcaggatacggaaaatgagaaaacaggcataaaaccggagaaaccggaagatactgatcaggtagagaagaaaaacagtgtaactgttcagtaccttcacagttacgagccaaaatgcatttaaaatcacctttggtgatggcattttggcttgcatgtctcgggattttggcaaaaaacatgccaaaacgcctcgcgggatactgcctactgaatagttacaaaacagttacaaaaaacagaaagaaaacaggtgaaaccacctgtgtatgaggatgaaacgatgcaggaagacaaagaaaaacagcagctatatgaagattacgtcaaacaggtgacaccgacgcacagtctgcccgcaaatatggcaaaagcctttcttgtgggaggtctgatctgtgtgctggggcaggcagttaccgaatgggcactggcggcggggatggatgagaagacggcgggaacgtggtgttccattacgttgatttttctgagtgccctgaccacggggatgaacctctatccacggctggcaaagtggggcggggcgggaaccctggtgccgatcacgggatttgccaattcggtagcagcaccggcggtggaataccagaaggaaggacaggtattcggaatcggaagcaaaatatttaccatagcgggaccggtaatcctttac

SEQ ID NO: 2638 - DNA, 29929 bp, Unknown
  gut microbiota DNA sequence
atccggctggaagagccagtctatgtggaaagctgggcatcggtggttggaaagaaagaaggagaaggtccgctggcagttttttttgacgagatcgagacggatgatcagctgggacagaatacctgggaggaagcagagagcatgctgcagcagaaggcggcaaggctggcggtcaaaaaggcaggatgcaccccggaggatatccggatcatctttgccggggatctgctggcgcagtccattgcctcctcgtttggaatcggagaactggatcggccgctgtacggactgttcggtgcgtgctccacgatgggagaggcgctgagtctcggagccatcacattgtcggccggtcacggcgagcgggtgctggcggtgacatccagccattttgccacggcggagaaggaattccgttttccgcttggctacggaagccagagaccgctgtcggcttcctggacggttacgggaagcggagcctgcgtgctgaaccggaagaagggaaaagtaaagatcacaggacttaccacaggaaaagtggtggactacggattgaaagactcccagaatatgggtgcatgtatggcaccggcagcgtgcagtacgattgcacagaatctgaaagattttggaagagaaccggaggcgtacgatcagatcatcacaggagatctcggctatgtcgggcagcagatcctgttggatcttctcgaaaaagaaggctatcaggcggtgaaaaatcacaaagactgtgggatcctgatgtacgaccaggagacacaggatacccatgcgggcggaagcgggtgcggctgtagtgcgtcggtacttgccggctacattctgccgaagatcgcctgcggagactggaaacgggtgctttttgtaccgacaggtgcgctgatgtcaaaagtaagcttctatgagggaaacagtgtaccgggaatcgcccagggtgtcgtcctggaatgggcagacggggaggtggaagagtcatgatcatgcattatatcaatgccttctgggtgggagggctgatctgtgcgctggtgcagatccttctggataagaccaaactgatgccgggaagagtgatggttcttctggtatgtgcgggaagcgtgttaagtgccctgcatctgtacaaaccactggtcgattacgcccatgcgggcgcaagtgtaccgctgatcggattcgggcatctgctgtttcagggggtaaaagaagagattgaacaggcggggatcctcggcgtatttaccggagggtttaaggcaagtgcgggaggaatcagtgcagcattgatcttcggctatctggcgagcctgtttttccatccacagatgaaaaaataaggaagaaagggatttccggctcttgccatggacggaagagatatagtataataatatggtttatgtgtaattgccagcgggatccgtcaaaagatcccgcaacagagaatgaaaaggtgaataatttgagagaagagataatcaaaagactggaacagacagtggaaagtgatcggtttttgcgggaggaaccgatgaagaaacatatcacattccgtgtgggcggaccggcagcctgttttctgacaccatccacaaaagagcagatcagagaaatcttacatatctgtcaggaagagaagacgccttactttatccttggaaacggcagcaatctgctggtgagcgatcagggatttgacggggttgtgttgcaggtctataaaaatatgaatcaggtgaccgtagagggagaacatctgcgggtacaggcaggcgcgctgttatctgccaccgccagaaaggcactggaagccggacttaccggtatggaattcgcagcgggaattccgggaaccatgggaggcgctgcggtcatgaacgcgggcgcttacggcggagagatgaaagacattctggaatctgtcaccgtactgacgccggagggagagcagaaggaactgaacaacgaggagctgcagctgggataccggaccagtgtggtaaaagaaaaaggctacattgttctggaagcggttctgagcctgaaaaaaggtgatccggaagcaatcaaaagccgtatggatgaactgaaagaacagcgcgtgaccaaacagccgttagagtacccgagtgctggaagtacctttaagagaccggaaggatattttgcaggaaaactgatccaggatgcaggtcttcgcggttatcaggtaggcggcgcacaggtgtccgaaaaacactgcggatttgtgatcaataaagaaaatgcgaccgcgaaggatgtggtggatctgatccatgatgtgcagcggatcgtatatgagaaatttcaggtgcagctggagacagaggtaaaattcctcggggaattttaaaagcgaaagaggaagagtatgagatttgtaattgttacgggaatgtccggtgcgggaaaaagtaccgcactgaaaatactggaagacgcaggatatttctgcgtggataaccttccgattccgcttctggaaaaatttgcccagtttatcgtggagggcaattccggaagcatccagaaggtagcactcggcgtggatgtgcgaagcggcggtgacatggaaggggtggagaaagccctcgaggagatccgcctgacaggactcgagtatgagatcctgtatctggatgcggaagatgaagtgctggtaaagcgttacaaagagaccagaagaacccatccgctggcgggaagtggcagggtggaaaacggtatccgcgaggagcgcagacggttaaaatatctgaaagagcatgcggactacattctggacagcagccagcttctgacgagggaactgaaagcggaactggacaagatctttgtgaaaaatatgggatttaaaaatctgatgatcaccgtcctctctttcggcttcaaatacggaattccgtcagactcggatctggttttcgatgtgagatttttgccgaacccctattatatcgatgagctgcgtccgttaagcggaaatgataaaccggtcagcgattatgtgatgaactgcgaggcatccaggatctttctggataaactggcggatatggtttcgttcctaatcccgaactatattcaggaaggaaaaaatcagctggtcgtaagcatcgggtgtaccggtggaaaacaccgttccgtgacactggcaaatgcgttgtatcagcgtctggaacagtccgaagaatacggagtacggatcgagcacagagacatcggcaaagatgccatccggaagaaaatgaacgaagtgaggtaagagagcatgtccttttccagcaaggtgaaagaggaattgtccagacagatatctacagcgcgccactgccagattgcggagattgcggccatcttaagcgtctgtggacaggtcagtatctcagccaacgatcactttcgtgtgatcgtacatacagaaaatgtgtctgtagcaagaaaatactttacattaatagaaaaaacatttaatatagaagctgtaattcacgttcggaagaatgtctacctgaaaaaatccaatgtttatcgggtagaagtaccttcccatgaggatacggttcgaatccttcaggctaccaagttcatgtcgccggagcaggagatcgccgatgacctttccgttatgagtcgtctagtgatccagaaagagtgctgtaagcgggcattcctgcgtgggacatttctggcagcgggttctatcagcgatccggaaaaaggctatcatctggaaattgtctgttccacacaggagcgtgcagaacagatacagtccatcatgagagaatttgaactggatgcgagaatcgttgcgagaaagaaaagtcaggtggtctacctgaaagagggatcccagattgtggaatttctgggactggtggaagcagggatctcactgatggatctggaaaatatccggatccggaaggaaatcagcaataatattaaccgtaaagtgaactgcgagactgccaatatcggcaagacggtttcggcagcagtaaaacagatagaagatatcaggtatatcgaaacacatgtgggcttctcacaactcacggaggagttggaggagaccgcagtttgtcgtctgcgttatccggaggctactctgaaagaactgggggagatgatgagtccgccggtggggaaatcaggagtgaatcacagacttcggaaactgggaagaatcgctgacgagctgcgggaaaataaggaggattacaatgattaagaaaccaattacaattcagatttccaatggattggaagcaagaccggtagcaatgcttgtgcaggttgccagccagtatgaaagcagaattcaggtggaaagcggagataaacatgtcaatgccaaaagtatcatgggtatgatgactctggggctgaatgtaggcgagagcgttaccatctgtgcagaaggtacagacgaagaagctgcgatcgaaggaattgaaaaatatctgacaagtaagtaatagataggtaattgaaaaacgaacagttacaaaagacaagggcgtccggaaaggatgcccttgtcttttggtgcaatgaatgcgatatttagaataattcttttacccggaaccagtaactgtaaaaatcttcaaatcccagggaaagataaagccgcttggcaggtgtgtttccttccacgacctgcaggtaggcgcccgtcattcccagctcttttccacggtttaacagcgccgtacagacggaacgggcatattttcgaccacggtaatgcggatgcacatggatcgcatagatccccatataggaacgatccagaatcccgagtccgatggcgacaatctgcccgtcttcgttggtgatggaagcggcaagggtgtctttcgggatcgcatgatacatggatggcacgatctggcggtggatggcactggtcgtactctttaaggcaaacagcgactggatccaccggtcattgatcgtccgctcgatccggacatccaccggcggtgtggtgatctgccagggcgtaagatccagtgtcataacttccgtgacatgctgcaccacataccggcggtcaatcagccgtttttcaaaatcatcggaaagcaacggcgtgatcttaaaaatagaaggcgttccccagcggtggtaagcgtcttcacaaaaatcaattttttcctcgatcggtatcgaggatggtccgatctgttccacacagttggttctgtgtgtgtaaaaataagaaaaacgcagaagccatccgtcatagagctgaatctgatgagagggccacgcgttcaaagaaagatcttcgatcgtcttgatggtgggtttcataagtaaatacctccgtatagcttcattataataaagaagaaaaacgcaggcaaccagaaaataagaaaaaacttacattttttaaaacggcttgcagaaggggtcaaaaaaggatataataaggggcatgatatggatactgccctaacaggcggtatttgcagaaaggtatctggagagatgccgggagcagattcaacagataggaaaacatatgaggagagtagatcatgtcgaaagttttaaaaacgattgttaatgtgatcctgttttgcgccattgtggttgcagcggggcttctgattccgccgttcgcaggtgtgacaacagtgatggtggatgatgtcgatatgcagaccaacctgtcacagggatccgtggcttatgcagtggagaaagacagcagtgaattgaaacagggagataaagttctggtaagccaggatggcggacaatatgtatatgtggtggacagcatcgatggcagcagtgtggtactggatgaccagctgagcacagacgggggaaccacacagcaggaactgggaagtaccgtgcagaaagtaatgctcgtggtaccggtgatcggttatgtatctatggcactccggaacactgagggcctgatcatcgtaggacttgtcgttgtatttgtcatcattctgtttattctcgcagaagtctggaagaaagacgatgatgaggacgaagaggaagacgaggatgacgaagaagacgaatcggaagaagagcaggaagaagaacctgcagtgatgtccagacgggaacggaaaaaagccagaaaagcagaaaagaaaaaacagaaacaggaagagaaagctgcggtagccgaggcgaaggcaagagcaaaacaagaaagacaggaagcaaaacttgcaaagaagaataaaaacgctgatgtggaagataccgaagagacaccggaagagattccggcagaagcggctgatctgacacaggagattgttcttccggaggacctgacacaggaagcgcaggatatgggaagtacacaggaagttgtattaccggcagaagaacatcagccggaagaagaaagtacagagaatgaagatccgaacaaatccctgttagaggaaaccgcaagtctgtttgcggcagatatcgcaagcatgatgagcgagaaccagacggaagagacggaaccggaagtagcagagcaggaagaagaaaacgaagaaccggaggaagtggatcagacacagccggtagtgcttgaagaagtatccggggaggaacaggagtcggaagagaagaaactggcgatgccggtatacacgaaagaagagctgcttgcgaaagcagaagcagacggggatcagccggaaatcatcgaagatgaagtcagcggagttaccctggtagattactcggatgtcctgtaaaaaaagaaaaataaaattttttgaaaaaatttgaaaaaaccccttgcaattgcaaggggtttcgtttataataacccatgttgtgacattgatagcgatgaagcgtgaggttgctgcagagattgcaggttttccgtggagcgaatgtcaagttaagaaactggcgacaagtcactgtatacatgttgaatacgtccaccagaagtgtggaaaaccgcgtggaagtcctgaggacacacacgggaaagtgtacagtcaccgcttgtcgtactcgtaaagtgcgaaaaggaggcgactttttttatggcaagtcaagtaatgagaattattctgaaagcttacgatcatcagctggttgatgcatctgcaagcaaaatcatcgaaactgtaaaaaagaacggatcagtagtgagtggaccggtaccacttccgactaagaaagaggtagtaacaatcttacgtgcggtacacaaatacaaagattccagagaacagtttgagcagagaactcataaaagactgatcgatatcatcggaccgacacagaaaactgtggatgctctggcaagactggagatgccggctggtgttagcatcgatatcaagatgaaaaacaaataatttcatcgaaagaattatccggaaaagttagatatagaagcaacacattcttaggaatcaacatcccttatgggtcatagtgttccacttatatcggctgtttctaggatgaacacccgagttggtgttccgctgtagtttaaacaggaggtaaaaagaatgaagaaagcaatcttagctacaaaagttggaatgactcagattttcaacgaagatggagttttaactccagtgactgtattgcaggcaggaccttgcgtagtaactcaggttaaaactgttgagaatgatggttacagtgcagtacaggttggttttgttgacaagagagaaaaactggtgaacaaaccaatgaaaggacagtttgacaaagcaggcgtttcttacaagagattcgttcgcgaattccgtttagaagatgctgaaagctatgaagtggctcaggaaatcaaagctgacatctttgcagcaggagaaaaagtagatgctactgcaatctccaaaggtaaaggattccagggcgcaatcaagagacacggtcagtccagaggacctatggctcatggttccaaataccatcgtcatgctggttccaacggtgcttgttccgatccgagccgtgtattcaaaggtaaaaagatggctggacacatgggtaacaaaaaagttacagtacagaatctggaaatcgtaagagtagatgctgaaaacaatctgcttctggtaaaaggtgctgtaccaggtcctaaaaaatctttagtaacaatcaaagcaaccgttaaaagtgctaaataattttaacggatgatcggtggacccgatgccgcgaggcatgattcttgaaaaggaggaacacacagatgtcaaacgtatctgtttataatatggaaggcaatgaagttggcacactggaactgaacgacgctgtgttcggtgtagaagtaaatgaacatcttgttcatatggcagttgtgcgccagctggcaaataaacgtcagggaactcagaaagcaaaaacccgctctgaagtaagcggaggcggaagaaaaccttggagacagaaaggaactggtcatgcaagacagggttcaacaagagctccacagtggacaggcggcggagttgtattcgcaccggtaccaagagattactctttcaagatgaacaagaaagaaagaagaatcgctctgaaatctgctctgacaacaagagtacaggaaaacaaactggtagtcctggacgaactgaaattagacgctattaaaacaaaggatatgcagaatgtactgaacaacctgaaagttgaaaaagctatggttgttaccgataacgaaaacgtaatcgtatctgcaagaaacattccgaacgtgatcacagcatctgttggaacaatgaatgtattcgatatcctgaaatacaacacagttgttctggacaaagcagctgttgcaaaagttgaggaggtatatgcataatggctaacattcaatattatgatgtaatccttaaaccggttgtaactgaaaaaagtatgaacgctatgagcgagaaaaaatacactttcctggttcatccggaagcaaacaaatctatgatcaaagaagctgttgaaaaaatgttcgaaggaacagaagttaaaactgtaaacaccatgaaccttgatggtaagaaaaaacgtcgtggttacacagttggaaaaacagctaaaactaaaaaagcaatcgttactctgacagagaacagcaaagacatcgagatcttcgaaggtctgtaagattgcaaagcggacaaagtcaataagacttgagcgaacatccgatcgctcttactatcgctgaatgaaaggagataaatacaatgggaattaaaaagtttagcccatatacaccgtccagaagaaatatgacaagcctggattttgctgaaatcacaaaatccacaccggagaaatctctggtagtatctctgaaaaagaattccggacgtaacaatcagggtaaaattacagttagacatcgcggaggcggaagcagaagaaaatacagaatcatcgacttcaagagaagaaaagatgatatccctgcaactgtagttgctatcgaatacgatccgaacagaacagcaaatatcgcactgatctgctacgcagacggtgaaaaagcatacatcctggcaccagaaggactgaaagtcggcgctaaagttatgaacggaactaacgcagaagttagacctggtaactgcatgccgctgtcagagatcccagttggtactatggtacacaatgtagaacttcatcctggaaagggcggacagctggttcgttctgctggtaatggagctcagctgatggcaaaagaaggaaaatacgcaaccttaagactgccttcaggcgaaatgagaatggttccgatcaactgccgtgcatctatcggtgttgtaggaaacggagagcacaacctggtaaacatcggtaaagccggaagaaaacgtcacatgggtatccgcccgactgtacgtggttccgttatgaacccgaatgaccatccgcatggtggtggtgaaggaaagaccggtatcggccgtcctggtccatgtactccatggggtaaacctgctctgggcctgaagaccagaaagaaaaacaaacagtccaataagtatatcgtaagaagaagagacggtaaaacattagcgaaataaggaggttacgtaaatggctcgttcattgaaaaaaggaccttttgcagatcagagcttacttaaaaaagttgatgctatgaatgcagcaggagataaatcagttattaaaacctggtcacgtcgttccacaatcttcccatctttcgtaggacacacaatcgctgtccatgatggaagaaaacatgtgccggtatatgttacagaagacatggttggacataaactgggtgagttcgttgctacaagaacttacagaggacatggaaaagacgagaaaaaatcaggtgttcgtaaataaagcggtatagcccaatcttgaaaggaggattttagtcatggcaaaaggacatagaagccagattaaaagagcaagaaatgctaataaagataccagaccatctgctaagttatcctacgcaagaatgtccgtacagaaagcttgttatgtactggatgtaattcgtggaaaagatgtgcagacagcactgggaattctgacatacaacccacgttacgcttcaagcgtaatcaaaaaattactggagtctgcaatcgcaaatgctgagaacaacaacggcatgagccttgaaaatctgtacgttgcagagtgctacgcaaataaagcacctacaatgaagagaatcagaccgagagcacagggtagagcatacagaattgagaaaagaacaagtcatatctctatcgtgttagatgaaagataataaggagggtaatcatgggacagaaagttaacccacacggccttagagtcggtgttatcaaagactgggattccaaatggtatgcagaaaaagactttgctgacaacctggtggaagactataacatcagaacattcctgaaaaagaaactgtacagtgcaggtgttgctaaaatcgaaatcgaaagagcttccgagcgtgtaaaagttatcatttatacagctaaaccgggcgttgtaatcggtaaaggtggttctgaaatcgagaaagtgaaaaaagaactgcagaaatatacaacaaagaaactgatcgttgacatcaaagaagttaagagaccagacagagatgctcagctggtagcagaaaacatcgcactgcagctggaaaaccgtatttccttccgtcgtgctatgaaatctacaatgcagagaacaatgaaagccggagcaaaaggaatcaaaacatccgtatccggacgtcttggtggagcagatatggctcgtacagagttctacagcgaaggtactattccgcttcagacactgagagcagatattgactatggcttcgcagaagctgatacaacctacggaaaagttggtgtaaaagcttgggtttataatggcgaagttcttccaaccaaaggaactaaggaagggagcgataaataattatgttaatgcctaagagagttaaacgtcgtaaacaattccgcggatccatgagaggaaaagcattaagaggaaataaaattaactacggtgagttcggtcttgtagcaatggatccatgctggatcaagtctaaccagatcgaggcagcccgtgttgccatgactcgttatatcaaacgtggtggtaaagtttggatcaaaattttcccagacaaaccagtaacagcaaaaccagcagaaacacgtatgggttccggtaaaggtgctctggaatactgggtagcagttgttaagccaggccgtgtaatgttcgagatcgcaggtgtacctgaagaaacagctcgtgaagcattacgtcttgcaatgcataagttaccatgtaaatgtaaaatcgtttctcgtgcagacttagaaggcggtgataacagtgaaaattaaaaattatgtagaagatttaaaagcgaaatcagctacagaattacaggaagaattagtagctgctaagaaggaactctttaacctgagattccagaatgcaaccaatcagctggacaatacaagcagaatcaaagaggttcgtagaaatattgccagaattcagaccgtaatcgctgaaaaggcgaacgtacagtaatctaagaaggaggcactaaatcgtggaaagaaatcttagaaaaacacgtattggtaaagtagtaagcaacaagatggacaaaacaatcgtagttgctatcgaagaccatgtaaaacatcctctttacaaaaaaatcgtaaagagaacatataaactgaaagcacatgatgaacagaatcagtgcagcatcggtgataccgtgaaagttatggaaaccagaccgctgtccaaagacaaaagatggagactggttgaaatcgttgagaaagtaaaataatcgttatcagttaattcgtataggaggaataccagcatgattcagcaggaaagtagacttagagttgctgataacacaggtgcaaaagagattctgtgtatccgtgttatgggcggttctactagaagatatgccaatatcggtgatgttatcgttgcttccgtcaaagatgcaacaccaggcggcgttgttaaaaaaggcgatgtagttaaggctgttgttgtacgtactgtaaaaggtgttcgtcgtaaagatggttcttacatcaaatttgatgagaatgcagcagtcatcatcaaagatgacaaaacaccaaggggaactcgtatctttggaccagtagcaagagagcttcgtgagaaacagtttatgaaaattgtatccctggctccagaagtattataaggaggtaacctgatggcaagtttaaaaattaaaaaaggtgacaccgttaaggtaatcgccggtaaagataaagacaaagaaggaaaagttctgtctgtaaaagacggtaaagtcatcgttgaaggtgtcaacatgatcacaaaacatgcaaaaccttctatggctaaccagcagggtggaatcatcaacaaagaagctccgatcgacgcatccaacgtaatgctgatccacaacggaaaagcagttcgtgtaggcttcaaagttgaagatggcaaaaaagttcgtgttgcaaaaggcagcaacgaagtaatcgactaattgagagaggaggcaattgaaagtgagcagactgaaagatacttacaaaaatgagatcgtagatgctatgaccaagaaatttggttataaaaatatcatggaagtgccaaaactcgataagatcgtaatcaacatgggtgttggcgaagccaaagaaaatgctaaaatcctggaagcagctgtaaaagatctggaaacaatctccggacagaaagcagttctgacaagagcaaaaaattccgtagctaacttcaaaatccgtgaaggtatgccaatcggttgtaaagtaaccctgagaggggaaaaaatgtatgagttcgctgatcgtctgatcaacctggctctgcctcgtgtacgtgacttccgtggagttaatccaaacgcatttgacggaagaggaaactatgcactgggtattaaagaacagttgattttcccagaaatcgagtatgataaagttgataaagtaagaggtatggacatcatcttcgttacaacagctaagactgatgaagaagctcgtgaattattgacattattcaacatgccgttttcaaagtaagaataggagggaaaattcatggctaagacagcaatgaaaatcaaacagcagcgtaaacagaaattctctacaagagaatacaatcgttgcagaatctgtggtcgtccacatgcttacttaagaaaatacggaatctgcagaatttgcttccgtgaattagcatacaaaggacagatcccgggtgttaagaaagcaagctggtaagagttgaaaacggatcgaaagatccgaagaaagcccgcatcacttggcaaagccgcaaggctgcgctaaagtgagagggtatacacatacaaaacaagaacatgaaaagtctaaataattaggaggaaactatcatgacaatgagcgatccgattgcagatatgcttacaagaatccgtaacgcaaacacagcaaaacatgacactgtagacattccggcatccaaaatcaaagttgctatcgcagacattctggttaaagaaggttatgtagcaaaatatgacatcgtagaagatggaaacttcaaaaacatccgtatcactctgaaatacggtgctgacaaaaacgaaaagatcatcactggtctgaaaagaatttccaaaccaggtcttcgtatttacgctggtaaagacgaactgccaagagtactgggcggactgggaatcgcaattctgtctacaaaccagagtgttattactgataaagaagctagaaagctgcaggttggtggcgaagttctggcattcgtttggtaagatttgatcacttcgcgcaagcaagagatatagaaactgaaaacagaggggactaagcgtcctctccgaaaatctaagttaataggaggaaaatggtatgtcacgtattggaagactgcctgtagttgttccggctggagtaacagttgaagttaaagagaacaattacgttgttgtaaaaggttctaaaggaactctggaaagaaatctgcctgtagaaatggacatcaaagtagaagatggccaggtagtagtaacaagaccaaacgacttaaagaaaatgaaagctctgcacggtctgaccagaacactgatccacaacatggttgttggtgtcagcgaaggatatcagaaagttctggaagtaaacggtgtaggttacagagctcagaaacagggtaagaaattagttctttccttaggatattctcacccagttgaaatggaagatccggaaggattggaaacaactgtagatggcaacaagatcaccgtaaaaggtatcagcaaagaaaaagttggccagtacgcagctgaaatcagagaaaagagaagaccggaaccttacaaaggtaaaggtatcaagtatgctgatgaagttatcagacgtaaagttggtaaaactggtaagaaataaataaggagagtgcaaaaatgattaataaagtatcaagagcgagtgttcgtactaaaaagcatagaagaatgcgtcatcatatcgttggtacagctcagagacctcgtctggctgtattcagaagtaacaaccatatgtatgcacagatcattgatgataccgttggaaaaacattagtatccgcttctactcttcagaaagacgtaaaagcagaactggaacagaccaacacagtagcagcagcagcttacctgggaactgttatcggtaagaaagcagttgaagcaggaatcgaagaagttgtattcgacagaggcggtttcgtataccatggtaaaattaaagcattagcagatgcagctagagaagctggcctgaaattctaggaaagagaggagcgaaatacatgagacatacaatcattgatgctagtcagttagaattagaagaaaaagtagtctcaatcaaacgtgtaacaaaagttgttaaaggtggacgtaccatgcgttttacagctttagtagttgttggagacggcaacggacatgttggtgcaggacttggaaaagcagctgaaattccggaagctatccgcaaaggaaaagaagatgctatcaaaaaattagtaaccgtagcaagagatgaaaacaacagtatcacacatgactacattggtaaattcggcagcgctgaacttctgatgaagagagctccggaaggtactggtgtaatcgctggtggtccggctcgtgcggttatcgagttagcaggtatcaaaaacatccgtacaaaatgtatgggttccagaaataaacagaacgtcgtacttgctaccatcgcaggtttaagtcagttaaagactccggaagaagtagctagacttcgcggtaaatccgtagaagagatctttgcttaaggaggactggaaaatgttaaaaattactttagtaaaatctacaatcggtgcagttccaaaacacaaaaaaacaatcgaagctctgggactgaccaaaatgcataaaactgttgaactgccggacaacgcagcaacaagaggtatgatcaaacaggttcagcatttagtaaaagttgaagaagcgtaattagaatagaaggaggtgccacaatggatttatctaatttaagacctgcagaaggttccagacagagtgatgacttccgtagaggccgtggacacggttcaggaaatggtaaaacagctggtaaaggacataaaggacagaaagctcgttccggagctccaagaccaggtttcgaaggtggtcagatgcctttatacagaagacttcctaagagaggtttcaagaacagaaataccaaagaaatcgttggtatcaatgtagaagctctgaacagatttgaagatggagcagaagttactatcgcagccctggttgagagcggactggtttccaatccgaaggatggcgttaagatcctgggtaacggagaactgacaaaaaaactgactgtaaaagttactgcagtaagcgaaggcgcaaaagcaaaaattgaagcagcaggtggaacagtagcataagaggtgagcttatatgttaaagactcttcagaatgcatttaaagtgaaagacgtcagacatagaatcttttatgtgttaatgatgctggtagtcatccgaattggctcccagctccctgttccgggagtcgacggaagttatttcaaaacctggtttgagagtcagacaggcgatgcatttaacttcctcgacgcatttacaggcggttcattttcacagatgtctatctttgcacttagcattacaccttacatcacatcatccattatcatccagcttctcacaattgcaattccaaaattggaagaaatgcagagagacggagaagatggaagaaagaaacttggcgcaattacccgttatgtaaccatcggattatctctgtttgaatctattgccatggcaatcggatttggtaacaggggattgattccggataacaattttgttaaaatagttgtagtagttgttgcattaacagcaggttctgctttcttaatgtgggttggtgaacagattaacgaaaaaggtgttggaaatggtatttccatcgtacttttgatcaacatcgtatcacgtatcccaagtgatatgacgacactgtacgaaagcttcatgaaaggaaaaattatcgcaaaagcactcctctccggcgttattatcgctgcgatcattataggtgtggttattctggtaattatcctgaacggagctgagagaagaattcctgttcagtattccaaaaagatgcagggcagaaaaatgatgggcggacagtccagccatattcctttaaaagtaaatacggccggcgtaatcccggtaatctttgcatcctctattatgtcttttccgagtgtgattgcttctttcctgggcaaaaccggtggaacaggtatcggtggaaagattctggcaggtatgaacagtaataactggtttgacctggatcatccatggtattcgattggcctggtggcttatatcatcatggtaatctttttcgcttacttctatacttcaattactttcaacccgttggaagtagctgataacatgaaaaagcagggtggtttcatcccgggcatccgtcctggaaaaccaaccgtagattatctgacaaagatgttaaactatatcatctttattggtgcagcagggcttactattgtagcggttatcccgttcttctttaatggtgtattcggtgcgaatgtgtccttcggcggaacttctatcatcattatcgtaggagttgtcctggagacactgaaacagattgaatccatgatgctggtaagaaactacaaaggttttttagataactaaaaggttgtggcgttttacgccacagccttaaagtgctattatagtaattattttaattactgaacaaaaaagaaggagagggtacaaaatgaaattaattatgttgggtgcacctggtgcaggtaaaggcacacaggcgaaaaaaatcgcggagaaatatcagattccgcacatctccacaggagatatcttccgggcaaatatcaaaaacggtacagagcttggaaacaaagcaaaaagctatatggatcagggacatctggttcctgacgagttgacctgtgatctggtcgttgaccgaattaatcaggcagactgtaaaaacggttatgtattggatggttttccaagaaccattccacaggcggaagctttaaaagctgcgcttgataaaatgggtgaaactattgattatgcaattgacgtggaagttccggatgagaacatcgtaaaccgtatgggcggacgccgtgcgtgcccgggatgcggatgcacctaccacatcaaacacaatcctccgaaagtggaagatatctgtgatgtatgcggcgcaaaactggtgctgcgtgacgatgacaaaccggaaaccgttaccaaacgtctgagtgtgtatcatgaacaaaccaagcctttgatcgacttctacaaaaaagaaggcgtattgagagaagtcgacggaacacaggatctgaatgatgtgttccaggctatcactgaaatcttaggagcgtaaaacatgtcagtatcaataaagactgccagggaaattgaattaatgagggaatcctgccatctgctggagaaagttcatgacgaacttgcaaaagcgatcagaccggggatttcaacctgggaaatcgatcatttgggtgaagaaatgatccgaagcttcggatgcaccccaaatttccttcattataatggatatcctgcatctatctgtgtatcggtaaatgatgaagttgtacatggaatcccgagcaagaagagaattcttcacgaaggagacattgtcagcctggatgccggactcatctacaaaggttatcattcggatgctgcccgtactcatgcggtaggggagatcagcccggaagctcagaaactgattgatgtaacccgtcagagtttctttgagggaattaaaatggcaaaagcaggaaatcatctgtatgatatttccgctgcgatcggcaattatgcagagagttttggatacggcgtagtcagagatctggttggccacggaatcggaaccagcctgcatgaagatccgcagatcccgaactttgcacagaaacggagaggaatccgtctggtgccgggtatgacacttgctattgagcctatgatcaccatgggcagaccggaagtttgctggctggatgacgactggacggttgtgacagaagatgaatcactggccgctcactatgagaacacgattctcatcactgagggcgaacctgaaatcctgacactcacgaaatagaggtgcctggatggaaggatatggtgttggcatgatggccagatcccttgccggtcatgataagggaaaggtctatatgattctggatgtgaaagagccttttgtatatctggtggacggaaagctccggacactggatcatccgaaaaagaaaaggatcaaacatgttcagattgatcggcatattccggaatggatcgaaaacgtgatccgggaaggaagagatcttcaggattcggatgtcatccgtggaagaagagaatacggcgaaaagtaaaacaggagggaaagcaatgtctaaggcagatgttattgaagtagaaggcactgtccttgaaaaattgccgaatgcaatgttcaaggttgagctggaaaataaacatgtggtattggcacatatcagcggtaagctgagaatgaacttcattcgtatcttaccgggagataaagttacgatggaactttctccttatgatttatctaagggcagaattatctggagagataaataaagaatagttatcccgaaggggacgcaccagctggatactttcctccgtaagcaacgtgggcagggtaactttgagctagccaccaactacgactaagactctcgcgagagcgctcgagcctaagtctgcgtaggtgtcggatctcaaagcttaccctaaacgcccacaaagtgttgctgacggaggaaagtatccggctggtgctggtttgagatataggtggaagaagaaagtacttcggacgggatgtatacggctggtgccggttttgggatagagggagaaaagaagaagtaaatatggaagtgacgggaatgcacgagaaaagatcgttgtatgcagaagcgttgaaagactgaaaaatcaggaaaaaaattgaaaaaatggcttgcattttttcagagacgatgctatactgtaaaacgaacttttgtgaatgcgttctttttttgtgcgcaaaaaacagggttcttccaccatgagcaggcgcaagaatgcgtcttagctaagaaggagaaaggaggattcacatgaaagtaagatcatctgttaaaccgatctgcgaaaaatgcaagatcatcaaaagaaaaggtagtatcagagtaatctgcgagaatccaaaacacaaacagagacagggctaatccgtcaattagatctgactgtttggaagcgagagcttcaaaattaagtgcggctgcagtaggacacatctggatgtgttgtactgtttagatattataatgagagtgctccggagtggtgtaccggagagcctccggcggatgaacgccgtagagagcgttgcatcccttataatattgcttaataccggctaagccggaaaggtcatggagacatggctggatgcttcacataccggcatcccaattaggaaaatattaatatgaccggatgagacacacatttcagacatatggtgacatatgggctgtctggactggtcaagtagaagatggaggaaaattacatggcacgtattgctggtgtagacttaccaagagaaaaacgtattgaaatcggattaacttatatctacggaatcggtagaacaagcgctacccgtatcctggaagcagctaacgtagatccgaacacccgtgttagagatatcacggacgaagaagtaaaaagaatcagtgctgtaatcgatgagactcagactgtagaaggtgatctgagaagagagatcgctatgaacatcaaacgtctgcaggagatcggatgctacagaggtatccgtcatagaaagagcctgcctgttcgtggtcagaaaacaaagaccaacgcaagaacaagaaaaggtcctaagagaactgtagcaaacaagaagaaataattcgtggcaaccagtaacatagaatagaagaaagtgtaggttagtttttaaaatggctaaagtgacaaagaaaacgacaaaacgtcgtgtaaagaaaaacgttgaacgcggacaggcacacatccagtcatctttcaataacacaatcgttactctgacagatgctgaaggaaatgctttatcatgggcaagtgccggtggtctgggatttagaggttcaagaaaatctactccttatgcagctcaggtagcagcagaaacagctacaaaagcagcgttaattcatggtctgaaaactgttgatgtattcgtaaaaggaccgggatcaggaagagaagcagcaatccgtgctctttccgcatgcggacttgatgtagtaagtatcaaagacgtaactccggtaccacacaatggttgccgtccaccaaaacgtagaagagtctaattaggaggtcagtagattatggcagtaaatagagtaccagttctgaaaagatgtagatccctgggtctggatcctatctatttaggaattgacaaaaaatccacaagacagttaaaaagagcaaaccgtaaaacatctgaatatggtctgcagctgagagaaaaacagaaagcaaaattcatctatggtgttctggaaaaacctttccgtaactactacaagaaagctgaccagatgcctggtatgacaggtagcaacctgatggctatgctggaaatgagactggacaacgtaatcttccgtctgggattcgcaagaaccagaagagaagctcgtcagatcgttgaccacaaacatgtactggtaaacggcaaacaggtaaacattccgtcttacctggtaaaagccggagatcagatcgaaatcaaagaagctaaaaaatcttctcagagatataaagacattctggaagtaaccggcggaagactggttccggaatggctggatgttgatcaggaagcattaaaaggaactgttaaagaagttcctgcaagagatgcaattgacgtacctgtaaacgaaatgcttatcgtcgagttgtattctaaataattgtgagttatggctcaccgtttacgcgtgggccatttcccatatgttaccctcagtgaaaatcattatcccaataaggagggcctggtatgtttgattttaacaaaccaaaaattgagattacagaaatttccgatgataaaaaatatggccgctttgtagtagagccgttagagcgtggctatggtattactctgggtaactccctgagaagaatcatgctgtcctctctgccgggtgctgcagtcagccaggtaaaaatcgaaggcgttctgcacgagttcagttccatcccgggtgtaaaagaggatgtaaccgaaattatcatgaacctgaagagtcttgcgatcaagaacacaagcgaaagcaatgatccgaagattgcatacatcgagttcgaaggcgaaggcgtggtaagagcatctgatatccaggttgaccaggatatcgagatcatgaatccgaaccaggtaatcgccaccttaaacggcggaccagacagcaaactgtatatggaactgaccattacaaaaggtcgtggttacgtcagtgcagacaaagggaaaacagatgatatgccgatcggcgtattagctgtagatgcaatctatacaccggtagagcgtgtaaacctgacagttcagaacactcgtgtcggtcagatcactgactatgataaactgactctggatgtttatacaaaaggaactctggatccggatgaagcagtcagcctggctgcgaaagtattgagcgagcatctgaaactgttcatcgacctctctgaaaatgctaagactgcagaagtcatgattgaaaaagaggacaatgaaaaagagaaagttctggaaatgaacatcgacgagctggagctgtccgttcgttcctacaactgtctgaagagagccggtatcaataccgttgaagaactttgcaacagaacttctgaagatatgatgaaagtccgtaacctgggacggaaatctctggaagaagtacttgcaaaattaaaggagctgggattacagttaaatcctggtgaagaataagaagcagctcgtttgttgcaactgccggtaactggccggtagggtaaaggaatatttgtagaagatcaagcagtccgtcagtaagaccaaagaagcatgaccggctgttccacaaatggaggaaaataaaatggcaggatatagaaaactgagcagaacatctgcacagagaaaagcgttaatcagaaaccaggtaacaaatctgttatatcatggtaaaatcgttactacagaagcaaaagcaaaagaaatccgcaaagttgctgaaggtctgatcgctctggctgtaaaagaaaaagacaactttgaaacagtaactgttacagctaaagttgctcgtaaagatgctgatggcaagagagtaaaagaagttgtagacggaaagaaagtaactgtttacgatgaagtacagaaagaaatcaagaaagacgctccttccagactgcatgcaagacgtcagatgatgaaagtattctatccggtaaaagctgttccgacagaagctgctggaagaaagaaaaacacaaaagacgttgacatggcagaaaaaatgttcaacgaaatcgcaccaaaatatgctgaccgtaacggtggttacacaagaatcatcaaaatcggaccgcgtaaaggtgacgcagctatggaagtagttctggagctggtataatttcagaattgttcaaacgataatataagacgccgatctgtggaaacacaggtcggcgtttttggcatctttttacatagaaaatgcaacaaattactatataaaattatcaggataacaggtatgatagagatatcaaagattctgaaaatgcatcccaaacagctgagatttagcaaaaatatataatatcagcgaaggaatggatgaatatcagaagagatgtcggaagagaagaaaggatggataacaaaatgaataaaccaatcgcactgacccctccgatgggctggaattcctggaacacctttacctgggatatcaatgaaaaaatgatctgtgagatggcagaccgcatggtagaagacggatatctggaagccggatacgaatatctggtcattgatgactgctggagcctgaaacagcgtgatgctgacggcaatctggttccggatccggagaaattcccgcatggaatgaaatgggtcagtgattacgtacacgaaaaaggactcaaattcggtatgtattcctgtgccggaacccatacctgcgccggctatccgggaagctttgaacacgaattccaggatgcgaaaaagttcgcagagtggggcgtggattatctgaaatacgactactgcttcaaaccgcgccagattccgggtgaaatcctgtacaaacgcatgagccttgccctaaagaactgtggtagggagatcctgtttgcagcatgtaactggggaaccgacggagtctatgactggatccgttcctccggagcgcatacctaccgttctaccggagatatccaggataactgggaatccatcacaaacctggcaatctctcagatgggaaaagagccgtataccggtaatttctgccacaatgatatggacatgcttgtcgtaggaatgcacggcgccagcaatgatggatttatcggaagcaagatcggcggctgtacggatcaggaatacctgacacattttacactgtgggcaattatgggatctccgctgatcatgggctgtgatctgcgaaaagcatccgaggagacgaagaaaaccctgttaaacaaagatctgatcgccatcaatcaggacttggagtcacgcggtgcgtatgtgatcaaaccacttccggatgtctataacgaaaacgaggcatttactctggtaaaaccgctggcagatggagatcttgcaatcggtatctttaatttcagcgatacacagagagaactttctctggaattctgggatatgggtatcccatatgctgccggggtatccctggctctgcatgactgcatcacaggagaagaactgggcgaatttactgaacgatttgcaccggttgttccatcccatggatgtgtggtagtgcgtgcgcatctcgtagaaaaataaaaacaaagataaaaagaaagctgtggaaaaatcaatggattgcagaaaatgcggtgcacatctgacttccgatgagaaagccatctacatgaaactggtgtcacgaaccgcttcgagtttcctgtgcatggactgtctggcggaagcgctgcactgtgagcgaaaagcgattgaagaacggatccgatattatcgggaatccggcaactgcgtattgtttcgataaacagaacccttctttaccgggaaaatataattccggtgaagaggggtttttgtagtcgttgacagccattcaacagctgttttataatgcagacagaaaagatcgaaaaggagacggggcatggaacggacgaagatcgagcagttatttggaagttatgctttctgggagtatttgtcagaagaagaaaagaagatgcttcaggagcagattcgatggagtacatacggagaagggcagatggttacggataccggaagggactgtctgggtattttcctggtatgcagcgggatcctgcgtgcaaatctggtttcggaagacgggaaggaagctaccgtgtgccggatccatccgggcgaactctgcgtgatctcggcatcctgtctgcttccggcactgccgtttgatattcagatcgacgcggagacggacagtgaagtctacctgcttcccaccggtgtgctccggcagatcatggaaaagaatctgtatctggaaaactttatctataaaaagatcaacgagagtttttccgatattatcgccgcgatccagaaaatcctgtttgccagcctggaacagcgtctggcaggatttttattggatgagtcaggaggaagcgaagacggaaaaatctacatgacgcaggagcagatcgcaaaagccatcggaagtgccagagaagcggtcagcagaacactgaaagtgctggtaaaagaaggatgcgtggaactgttccggggcggcgtagcagtcctcgatcggaagcagttatacaggaagttgtagcatgattcataaaaagaaaaagggatagcaatggaaatacgaaaaacgcttcattgctatcctttttggattattaagagaagaaattatttctccagcagtttcagaatattttctttgctgtccacgccgacgctggtagctgtcagctcgccgtttttaaataccagaacggtaggaatgctcatcacgcggtattttcttgccagatccgggttttcgtcgacgttgactttgccgactttgatctttccctcattttccgaagcaatctcttcgatcaccggggcaagcatacggcacggcatgcaccaggtagcccagaaatcaaccagcaccggcacatcggagccgagcacttctgtttcaaaattttctgttgtaaatgtatattccatagtatgacctcctgtatttttatgatgataggataccacatctgcccggaaagattccgtgattaagtcacagaaaataaaaaagagaaaatatgacggtattttcgtaaattttctgtaaaattttaggaatcaaactgattacaaaagacaaaaggcgtggtataatgagcccaaacgggcagacagggaaatgtctgtgaaaaagagggtttatcgtgggaaaactgtaagaaagaatgaagagatgaggtgtactatgaaaggaagaatgctgtttatcttcaatccgagatcaggaaaagggcagattcgcaataaactgatggatatcatcgacgtctttgtcaagggcggctatgaagtagtggttcatccgacccagggagcgaaggatgcggaaaagatggcaaagatcatggcagaagaggttgatctgatcgtgtgcagcggtggagacggaacgctggacgaagtggtaaccggtctgatggaaatcggtgcgtcggtaccgcttgggtatatcccggcgggaagtacgaatgactttgcaaacagtctggagatttcccgggatatggtgaaagcagcgcaggacatcgttgacggtcatctgttttccgtggatgtcggaagtttcaatgaagataattttatctatgtggcagcattcggtatgtttaccgatgtctcctatgagaccagccaggatctgaaaaatattctgggacatcttgcttatgtgatggaaggggcaaagagaatcttcgatgtcaagacctaccatctgtgtgtggaagccaacggggaagtacacgaaggcgattatatctatggaatgatcacaaattcccattccgtaggcggtttccgcaatctggttggaaacgatgtcgagatggatgacggacttttcgaggtcaccctgatcaaaaaaccgaagaatcctctggaattaaatgagatcatcgccgcgctgatcaatgcgtacgatgacaccgatatgatcgatgcattcaaagcggacagcctgtatatccacggagatgaagcgatttcctggacgctggacggtgaatttggcggtgagcataaagaggtaaacataaaaaacagaaagcaggcgcttgatattttcatcaactcttgaatttcagaagttgatgggttataatatacaagaaataaaaacgtgaacgtaggaggtttgattatgttagtatcagctacagaaatgttaaaaaaagcaaaagcaggtcactatgcagtaggacagttcaacatcaacaaccttgagtggacaaaagctattctgcagactgcacaggaatgcaactccccggtaatccttggtgtatccgaaggtgctggaaaatatatgacaggttacaaaactgttgtaggaatggttaacggaatgctggaagagctgaacatcactgttccggttgctctgcatctggatcacggcagctatgaaggatgcctgaaatgcgtagaagcaggattctcttctatcatgttcgatggttctcattacccaatcgaagagaacattgcaaaaacaactgaactggttaaaatcgtaaaagaacacggaatgtctctggaagcagaagttggttccatcggtggtgaagaagacggcgttatcggcgctggcgagtgtgcagatccgaaggaatgcaaaatgatcgcagatctgggtgttgatttcctggcagcaggtatcggtaacatccacggaaaatatccggcaaactggaaaggtctgagcttcgaaactctggcagctgttcaggaactgacaggagaactgcctctggtactgcacggtggtacaggtatcccggctgatcagatcaaaaaagcaatcgatctgggcgtatccaaaatcaatgtaaatacagagtgccagctggcatttgcagatgctacacgtaaatacatcgaagctggaaaagacctggaaggtaaaggctttgacccaagaaaacttctggctccgggagcagaagcaatcaaagctactgtaaaagaaaaaatggaactgttcggttctgtaaacaaagcttgagaaatctaatcaaaactggtcggtcagaccaactttgatatacatggtaacaagtaggcagtctgcttatcaaaaaagtggactgccttttttgaagctagagcgagtctgaaaaatcatttccacaatctgcaagccccactttgcggtatattttaccctcattcggttgccgtagcccgctacgccgccctcattcggataaaatctcccacaaactgggactcgcagctcacgaaaagcctttttcagacacgctctagcagtcgataggccatggcggagaacatggcagcggaaaacatggagatggaaatcggggtaagacggaaaggataggaaaaatgagtgagtatgtaaacgtggttgagattttcggagaaaatgtatttaacgatgcggtcatgcaggcccgcctgcctaaaaaagtatacaaagaactgaaacagacgatggaagagggaaaagaactgacgctggagatcgctgatgtggttgctcatgagatgaaagaatgggcgattgaaaaaggcgctacccattacagtcactggttccagcctctgacgggtgtaaccgcagaaaagcacgatgcatttatcacagcaccgaaaccggatggaaaggtactgatgagcttttccggaaaagaactgatcaagggtgaaccggatgcgtcttctttcccgtccggcggtctgcgtgcgacctttgaggcgagaggatatacagcgtgggattgtacttccccggcgttcgtgcgtcaggatgcagcaggtgcaacactctgtatcccaacggcattctgctcctatacaggagaagcactggatcagaagactccgttgcttcgctccatggaagccatcaacaaagaagccctgcgtctgatccg

SEQ ID NO: 2639 - DNA, 6886 bp, Unknown
  gut microbiota DNA sequence
agacctgatttataccggaaggaccctgttcggcgcgatgcctccaaaaggtcaggagctggacgatcattacttcggaaccatccgtcagaagattgccggctacatgaaagatgtcaacgaagagttgtggaaactgggtgtatcctcaaagacccagcacaatgaagttgcaccggcacagcacgaacttgctccgatctacgcaccggcaaacattgccgtagaccacaaccagatcatcatgcagactctgaagcgtgtggcaagaagacacgggctcaaatgcatcctgcatgaaaaaccatttgcaggtgttaacggatcaggaaaacacgacaactggtctctggttaccgatgatggtatcaatctgttagagccgggaaaaacaccgcatgagaacgtacagttccttctggtactgagctgtatcctgaaagccgtagaccgtcatgcagatctgcttcgtgaatccgcatccgatgtcggtaacgatcaccgtctgggcgcaaacgaggctccgccggccatcatctccatctatctgggcgaacagctcgaagatgtggtagaacagctggtaagcaccggtaccgcagatcacagcttaaaaggcggccgtctgatgacaggtgtgcgtaccctgccggatctggcaaaagatgcgacagacagaaaccgtacttcaccgtttgcctttaccggaaacaaatttgagttccgtatggtaggatctcaggattccgtggcagcaccaaatattgtgctgaacaccatcgtggcagaagctttccaggaagcctgcgagattctggaaaatgcggaagactttgatgtggcagtccatgatctgatcaagaccaactgcgcggaacatcagagaattatcttcaacggaaacggttactccgatgcatgggtagaagaagcaaaacgccgcggtctgccgaacatccgctccatggtagatgccatcccggcactgactacagagaaatccatcgctatgttcgagcacttccatgtatttacaaagaccgagctggagtcccgtaccgaagtcaaatacgagacttacgcgaaagaaatcaacgtggaagcaagagcgatgatcgatatcgcagcaaaacagatcatcccggcagtgatcaaatatgcgaaacacctggctgacgccatcatctccatccagaccatcccgggtatggacgtgagcgtggagaccgaacttctgaaagaaaccacaaaactcttgagagaaagccagacagccctgaagatcctccaggaaaaaacagaagccgcatccctgatcgaaaacaatgagcgacaggcaagatactaccacgacgaagtaaacaccgccatggaagccctgcgcaaaccaatcgacgaactggaaatgatcgtagacaaagaaatgtggccaatgccatcctacggagacctgatgttcgaagtctaaacacaaaatcaaaccaatcacataaaaacaggcggatgatctgttaacagatcatccgcctgttttggggtaaaaaaggagggtgccagctacctccttccaaaggtacctggcacaattatgaaaaagtgttatcaaaagtaattcgcttgtatcttgcttttgatttgatataatacattatatgcaccagaaatgaaaaaatcatgatgcaaaagtgaatgtattttaaaagaaaaatgaacaaattgtgaataaaggagaaacaacaacgatggatgtaagaacatatctggaacagcagcaaattcatccgcaactgatccacgccgtagaagaattcagaaatcagtacccggtggaagagaaagtaaaataccgggtgacagaacccatgatgccgttttacggaaccgagattctggagatgggaatcgctgccctgttgcagaaagaaaacctcctgctctccggttccaaggcgacaggaaaaaacatcctggcagagaaccttgcctggatcttcggaagaccttcctataatatttctttccatgtcaataccggaagcggcgatctgatcggaaccgatacctttgaagacaatcaggtgaaactgcgaaaaggaagcatctaccagtgcgcggagtacggtggatttggtatactggatgagattaatatggcaaagaacgatgcagtctccgtgctgcatgcgacactggactatcgaagaagtatcgatgtgccgggatatgacaagattgatctgcatcctgctacacgttttatcggaacgatgaactacggctatgcaggaaccaaggaactgaacgaggcgctggtatcccgattcctggtgatccagatgccggatcagaacgaggaaacgctggaaaaaatatttactacttctttcccggatggaaaaccggaagctatcgaacagtttatcggactcttcctggatctgcaaaagaaggcggagaacggagaaatctccacaaaagccctggatcttcgcggcatccttgcttccctgcgagccataaaacaggggctgcatccgtccctcgctgtgcggatgggcgtgatcaataagtgttttgacggatttgaaaaagagattgtagaagatgtggtcatgacgagaatcccggaagagtggaccgcagcgcaggtgttttagatgaacagagaagaactcgaagagagacagttagagatcgcaaaccggatgaaaaacatcatctggaccgtctgcggggattatacgctggaggcgaagccggatgtggatggctttttgaaatcaaaatatatcgcactgtacgatgggatcaaacagggagcctttgcaaaatattttgagaaagaaattctcagcatgtatctggtaaaaaaagtctatctgggtgcgcgtgaggatgcgctggtggcgatcgcacagctgtgtatcgaaaaagcagtgggaaaccggatcgcccgggagcggaaaggcgtggcatcgatccagaaaaaggcgtatgcatacgtgctggatcatgagatggatacgctggtaagatcggagttcggacggctgcaactggcgatgatgcggcaggtactgaccggggacaggcggtgtgaggaaaagatccgaaaacagctggatcggatcgaaccgctggaggaagctgtggatacgatggaagtcatccgcacgatcgatgcctgttataacgcctgggtggatccaggatttgaacagatgcacgggaatctggaacaggtgcttgcagtgacggtggaagaactgatggagtacaactggcgggattttcttacggaagagatgtatgaagaaaattttgaagcctatctggaacagatgagcaagcagatgacggcaaccgggcagaatcacgcagaagagaaagaagaaaaggaagacagttcgaaaaaaagaaagatcgtccgggtatccgaggaagatctgaaaaaggtatacacgtatattgaactgaatttcgggaaaacctatctgtcaccactggaagaaaaaaagatcaattttcagctgtgccgcggaatccatgccgactgtggactgtattttacggatggaatcctggcaaatccggtaaagcggaattatcagctggaatacgcgaaaaagcagcagggaaaaaacaaatacgcctattatgacaatcaccgcaccgtcaaacagaacatcgcgattctctccgggatcctgaaaaaagcgatggcgatgcggcaggaagagacgacgatcctttccgaccggggacggatctgtccggaaagactctggaagatcggcagaagccgggatgcgaaactgttttcccagatctgtccggcagacggaagtacctttgtggtggatgttttgatcgatgccagcggttcccagagggtgcggcaggaacaggtggcactgcaggcatatatcatcatgcaggctttgagcagcgtgcatatcccacaccgtgtgatgagcttttgtaccttctgggatcatacgatcctgcagcgctaccgggagtacgatgaagatgcttcggcaaatgaaaagatattcaactttacgacttcctcaaataaccgggacggactggcgatccgggcggcttcccttgggcttctcgaacgggaagaggagcggaaaattatgatcatcctgagtgacggacgcccctatgatgtgatcctgaaccgtccgaacgcgagaaatccgcagccctaccacggagattatgcggtgcgcgataccggcacggaagtacggcgtctcagaaacctcggggtgtcggttctcggggtatttgcaggggaggagaaggatctggaagcggagaaaaagatcttcggaagagattttgcctatattcgtgatatttcccgattttcccgcatcgtaggtagctatttgaacaaacaattagaagaaaattgttaatatttctcattgaatccgacaggggattttgttatagtaaaatagtatgactctaagctgttagagttttagtagcagtttggagactgaatatgaatcctcttcgttcggaggatgagacaagggagaaaagaaaaatggataagaagaacgaaagctttaagccttatatcagtgcggacaaagttcttccggaatttaccgtgacatcgattctgatgggtattattctggcagtggtattcggcgcagcaaacgcatacctgggattaaaagtcggtatgactgtatctgcttccattccggcagcagttatttctctgggtgtgattcgtgtgatcatgaaaaagaactctattctggagagcaacatggtccagaccatcggttccgccggtgagtcattagcggcaggtgcaatcttcaccatgccggctttattcctgtgggcagaggaaggaaaaattgatatgcccggttacctggagattaccctgatcgccctgtttggtggtatcctgggtgttctgtttatgatcccgctgagaaaagcactgatcgtagaagaacatggtactctgccgtatccggaaggaatggcatgtgcagaagttctgctggcaggtgaagagggaggttctaacgcttctactgtatttgcaggtatgggacttggtgctgcattcaaatttatcgtagacggcctgaaaattgttccgtccgatattgcaactccgaatatcaaaggatatgcaggacagatcggtgtggagatctacccggcactgatcggtgttggctacatctgtggaccatccatttcctcttatatgtttgccggcggtatcattgcatggctggttttgatcccggcagttgtcttcttcggcggaagcatcgattttgccacactgggtaacaccggtctggcaggtcagaccatcgcagaagtttatgcagcaaacggagcaagtgcaatctggtccaacgttatcaaatacgtgggtgccggcgcgatcgctaccggtggtgtgatcagccttctgaaatctctgccactgatcataaaaacatttgccggagcaatgaagagtctgaaaaatacatccggcggaacgaatgtccgtactgaccgtgacctgaagatgccggttgttctcggaatcattctgatcgtgatcatcctgatctggctggtaccgtctgtaccggtaagccttctgggtgcattcctgatcgcaatcttcggtttcttcttcgcaaccgtatcttccagaatggttggtctgatcggaagttccaataacccggtttccggtatggcgatcgctactctgctgatctccactttcgtactgaaagctaccggtaacaccggtatggcaggtatgaccggtgctatcgcaatcggttctatcatctgtgtcatcgcagcgatcgcaggtgatacttctcaggacttaaagaccggatttatcgtaggtgcgactcctgcaaaacagcaggtaggtgagctgatcggtgttgttgcttccggttttgcaattgcaggcgttatgtctctgttaaacaaagcatggggctttggttccgcagagatccctgcaccacaggctactctgatgaaaatgatcgtggaaggtatcatggatgcaaaactcccgtgggtactggtattcatgggtgtattcctggctctggctctggaagtacttcgtgtaccggttatgccgtttgctatcggtctgtatctgccgatctacctgtcctgcggtattatggtaggtggtgtggttcgtctgttcctggataagaagaaagaagcagaagctaagaagaaagaaatgatcagcaacggtacgttgtactgtgccggtatgatcgccggcgaaggtctggttggtatcctgatggcagttcttgctatcattaaagtgggtgacaacagtatcgctgctattatcggtggtctgtttaatctgtccggtgctgcaggaaacatcgtcggactgatcgtgctggctctgatgatcctgagtctgctgaaattctctgtatggagtaagacaaaaagtaaataatgagagataaaagaaattatctggattttgttcctgtaaagaatccggagcttccctggcaggcggatgaggaaggtatcgtcacggtggacgttacccaccgcggcatcgccgcaaaagtggcgcaggttgctttcaaccgcccgaaggtaagtcatattcacatggatgtattcggaagttttatctggaaagaaattgacggagagcagaacatctatgagatcggacagaaggtgaaagaatatttcggcaaagaggcagaacctctttatgaacggctgacaacgttcttccgcattctggcagagaacaaatatatcacttataaaaaataagaaattgaaaaactgtcattccgggcagaat

SEQ ID NO: 2640 - DNA, 780 bp, Unknown
  gut microbiota DNA sequence
cgggctttctgtttcctgaaattgcagctgtaacggaatgttctgtccttttggatagacaaatccttccccggctccccaggtgatcgtctttccccggatcagcaatgccgccatctcttttgccagccgcatatccgcgatcaccaagttatttttccgggcaaatacatccaccgcaaaggtatggttcacatccgtccctgtcgtgatcaccggaacggctccgatgctctctgctgcaaattttgctagttcattggctccgccgagatgaccggacagaagagaaatcgcataatttccctgttcgtcgatcaccacaaccgccggatctgtctttttactgaccacgaacggtgcgatcgttctcaccgcgataccggtggcactgaaaaatacaattccatccagttttgggatccattcttccgcccattcccgcagcgttcctgtcactttctgaaaggaatgtcgttccggcagatccacatatttactttttacaaatccatatatttcctgatcctgtttttgcagatctctcagaagtttctctccaagaacgcacccatgttccgtgaaagcaataattcctgtctttttcatcttattcggtagcttccctgaactccgtggtaaatgccggattgtacagttcggaacgattgtaatggctgtgcgccaccacatcaccgatgatcatcagtgcagttttagtaatattgttttctttcgcagtctgtgccagagttcccacagtgcagacaaaggttttct

SEQ ID NO: 2641 - DNA, 1535 bp, Unknown
  gut microbiota DNA sequence
ccagcgactttaatgcattcatcattctgtcttagtctccttttttgctgttgctgtctttttcgcttttggttttttcgcagcttccgcttctttcgccgtgcgtttttctttctcctcggctcccttcttctccgcagtctctaatttctgctggattacttttcggagtccttctttttttgccgttgcagatgtcgctttctctccttcttttccggctgtctttttcgaggttttcgccgttttgttcgttgatgtctttgcagctgtctttgtaaaactgtagatagacacactcagcggtgcaactttcactttgatcgtatacggccggtcatccgtctcttctttcttcgcaattttcacacgcggattgaccacgccggaaccaccgtattctttcgcatcgctgttcaggatttctttgtattttcctgcatacggaacgcctaccagttcctcttcataggtaacatccgagaaattgcagatcacaaccagtgtatcttcctgtttttttgcttttcgaaggaaggtcaccatgctcttttcccattccacacagttgatccactcaaatccatcggaatcatagtccagttcccacagtgccggatgcgtcttatacagctggatcagcgctttggtatagttctgcatctgccggtgtgccggtttttccaggtcttcccagtcaagagctttattttccgcccattcgtgaacctgaccgtattcctgtcccatgaacaataatttcttgcccggatgcatcataaagaaaccatatgccgcacgcaggttggcgaatttcttatcttcggttcccggcattttctctaacagagaacctttctggtgtaccacctcatcgtgggagagactcagcataaaccgctcgctgtacgcgtagatcatactaaaagtcagttcgttatgatgggaaccacgaaaatacggatcattgctcatatagccgatgaaatcgttcatccagcccatattccatttgtaatcaaatcccagaccgtcttccgtctccacgcttccggtcactctcggccatgccgtggactcttctgcgatcagcagggcatccggatgtttctttttgaaaatggaatttaggtgttttaagaattccacggcatccagattttcattgccgccgtagatatttgccacccactcaccgtcgttctttccatagtccagatacagcatcgaagccaccgcatcaaaacggataccgtctgcatggaacttttctgtccagaacagtgcattggcgatcaggaagttcttcacctgtggtctgccgtaattatagatcagtgtaccccagtgcgggtgatacccctgtctcggatcgagatgttcgtaaaggcatgtgccgtcaaaattggcaagtccaaacgtatcccgcggaaaatgcgccggtacccagtcaagaatcacaccgattcccgcctgatgcagggtatccacaaaatacataaagtcttccggtgaaccgtaacggctggtcggtg

SEQ ID NO: 2642 - DNA, 2473 bp, Unknown
  gut microbiota DNA sequence
ggttttggccagaacctgcaaaacatctgaaaatcctcacttctgcgggcggaatcgccaaggatggcggaagtttcggagccgtcatggatccgatgatacatcagaatccggttgcagtatacgaaagcgccctttctccgggaaagaagttcccatgcctgccagtcttcatcacttcgaaaaccggggaaaaagatctgttccggaagattttctttgacgaaggtcacagaaggacagcagatcggacagccgaaggaaagaatccggcggcggacaaatttgctgttctgaaaaagctttggacgcaaaggaagcagcatggtgcgttttacatttaaaagggggttgcgtgttacggtctttccgtttcgaagttcgccgtaatcggtgaaagcgatcagaggtttttttgcctcggagagtttctgcaaaacagtttcggtatagaaacggtcgtaggtatcatcctgatgagcgatggtcatcagttctgtctttgcacttcggtaggcaaacatccagtcctgggtaataccggtttccccgtggttgatgtgtaattcgaggtggtatttgtcggcaagattgcggatgtaggcgttatcggtggcggtgacaatgatgatcgtagaaggaaccgtctgatcgaggagtgataaaatacactcctcaagaaacggactttctttgtatgcacaaatggcaaatgtatggttttttcctgtatatttcattgatttcatcctttaaaaaaatatcatacaaactttagcctattttttaatgcttgtcaaggcgtgaggaggaatcgtaagaatcctgcgaacctttcagatcgatctgttcaagcgtttcaaagaaggcaatatctttctggcgcatctggcgaagttcctgttttcttctctttttgcggcgccatctacgtagtttcaggtaaaagaggatcagcagtaaaattacgatcagaaccagaattccaatgaggaaaaccaggatccagtctacctggctgtataccagttcaatcgtgtgatcggcctgaatggatgtcagggtaatgttctgctctcctttccggaacggatattcttttccatcaacagtgcaggaacgcaggatacaggatgcgcccggtgtgactgtggtggtgtaggaatccccgcggtaaacagtgaccggtgaattatcgaccgtaccattttttgcgttcacggtgatggtgtaggaaggaaccggtttaaatgtcacttcgatggtgtgatcggaggccaggtcatcgaaggtatagccggaagtatcgctggtcaccgggacagtctgcccgtctaccgtaagggtatccaccacataatgttcttccggcatgaaagaaactgtcagggcgtggtgctctttcccggaggaggcttcgacctgaccgtgggaagcggaagcagagacggtgtataccgggatctcttcaaagacagcctgaatcgtatggtcttcctggacatctgtaaaggtataggagagcgggtactggctgatatccacttcctctccgtccacgataagagactggagtcggtgatcgtcatcacatgcgtaggagacggtgcaggaatcgccctcatcaatttccagattactgtcggagatttttccgttttccgcgctggtggtcacactgtgcaccagcggaagggttgcttcgtacagacggaagcgtgtcgttccgatgatggcggaagccataagaaggtgccccggctctaactgacagatgccttccggttccacctcgaaagcatcatgaccaggaagggtcagataataacttccgacacgtttctgctgagagattgagtagacatccagaacattcatatagccttcccgctgcatgtaagggatgctgatgatagaatccccggagacgcagaagtcctgaaacgaactccggctgtaggaaaggtgaagatttaatttatccacgatctcaaaattactgtcggtaaaataaaaagcataatcagcgatccggtttgccatcagtacatactgatctttttccggaacataatcgatgccgaaaaagttgatacttccgtttcctacctgaacttttcttttaaagtggagcgtattggcgtccacgataaagacagcaccggcattggacggatcgttggtaaaaagaccggcaatagcgatttcctgtgtgtttggattgtaggtcatgccgtttccgtgttcgtagtcggtctcggtgacactgaaggcataactgtactgttctaccgggttgccatcagcgtctgtggtattgcggtagaaggcgatcagggtatccggttcggttgtctttttcgaagcatttaccaggcatacgatatactgatcggtggcacacatggactggagccagcctttttcattgataatggaagattctgtcatcatattccagggtacggtttct

SEQ ID NO: 2643 - DNA, 562 bp, Unknown
  gut microbiota DNA sequence
gtattaattagaaaacgagaacaagatacatagataagtgtagaggagaataaatcatgaatattattgttaccggcggcgctggttttattggtagtaactttgtattccatatgctgaagaagtatccggattaccggatcatctgtctggacaagctgacctatgcaggcaatctgtccacactggcacctgttatggataacccgaatttccgctttgtgaagtcagatatctgcgaccgcgaagcagtggataaactgtttgaagaagaacatccggacatcgtggtcaactttgcggcagaatctcatgttgaccgttccatcgaagatccgggtatcttcctccagaccaatattatcggtaccagtgtgctgatggatgcttgccgcaagtacggtatccagcgttatcatcaggtttctaccgatgaagtttacggtgacctgccgctggatcgtcctgatctgttcttcaccgaggaaactccgattcacaccagctctccgtacagtagctccaaggctgccgctgacctgctggttctggcttaccaccg

SEQ ID NO: 2644 - DNA, 4413 bp, Unknown
  gut microbiota DNA sequence
aaaagtcattgtatttttctcttcgtgttctaaaatgatgtacatattcgtaggtgtaatgaggtttatttggaagttcactatgaggggacttcggaacaggatgagtcgatacaacgggtacttgctgaacgtggtaaaaccgtgtacgcaaccgctgtgcgagctggcgcaattctcgtggataatggaaaccttaaactgctcggtgatgtcaaggtgtttggcagatagagctacggagaaaagatatgaattttgtaacgaaagaaccaataaacaaaggctggtcgagtgataaaaaatactgtgttaccgacgaaaacggcacacggtatcttttgcgtgtttccgatattgcacagcacgacacaacgcagtctgagtttaatatgatgaaacaggtcgcttcttttggagtgcctatgtgccagcccattgaatttggcacttgtgaggatggtgtttattccattcaaagttggattgacggcgaagatgcagaacaagtcatgtcgggctattctgataccgagcaatatgtatatggcttggaagcaggacgtattcttcgcaagatccactccattcctgctcctgcaacgcaggaggattgggaaatccgttttaaccgcaaaatggattataagatcaaaaagtacgttgagtgccccatcaagtatgagaacggacaggcatttatcgactacataaacgagaaccgtcatttgctgaaaaacagaccgcaggtatatcagcacggcgattaccacatcggcaatatgatgatcgacagaggcggtcagctccacgttatcgactttaaccgtaacgattacggtgatccgtgggaagaatttaaccgcattgtttggtgtgctcagaaagctcctctctttgcttccggtatggtaaacggatactttgataataacgtacctatggagttttggagattgcttgctctttacatttcaagcaatactctctcatctgtatattgggcgattccgttcggacaggacgaagtgaacaccatgctgaaccaagccaaggaggttctgtcttggtacgataatatgcgtaatcctgtgccgacatggtatttcaaagggtattatctgcagtacatcgacgggattcctttcaagctgaaaagtacttttgatttcagctttatgaaagagtatggaacggtgttcaaggtttacgatgaccaggattccggaaacatctgctttggtactgaaaaagacggtcagcgttattttgtaaagttcgccggtgctcctaccgagcagtacggcggcgatcctgcagatgctatctccagattgaaagctactctcccgatttacagcgatctgaagcacgagaatctgattgagcttattgaagccaaggaaattggcgacgggttcgctatggtattcaagtgggctgatggcgattgtatgggcagaatgtaccccgcggcatatcgtcgctttattcagcttcccatcaatgacaggctcgctgtgttcagcgacatattgagcttcttggaatgtgttgtctcgcgcaattatgtagccatagatttttatgacggcagcattatgtatgattttgtgaacggaaagactacaatctgcgatattgaccttttccgcaaacaaccgtgtgtcaacgatatgggacatatgtggggcagctctcgcttccaatccccggaagaacatcagctcggagccgatattgatgaaattacaaacgtctatactcttggtgctaccgcttttgcgctctttggagagtataaccgcacacgggaaaagtggcagctcagcgacaagctctttgagatcgcaacgagagcagtaagtgatgatcgtgccaaccgtcagcaaacaatcagacaattcacagctgaatgggaggcggcacaataatgaaagctattgcattttgtggtcttgcatgttgcgtttgttccgaaaataaaggctgtgtaggttgccaagacggaggctgtgaaagccacggctggtgcaaaaactataactgttgtaaagaaaaagggctgaacggctgttgggaatgttctgaatttcctttcaccggatgtatgctcgataagccccgtattcgtgcttttgcagagtttgcaagaagatatcgtgtacggactgttattttgcacctgtttctcacaggcatacctcgcttcaacacaatcagtcacccaaaagcattggaggctcgctacaaggctcactggcgattaccttgaccagactttcactggcaagctgataacagcttgcagaacacacgactttcacctgagagagcgcgcccatggcgcgcaaacgaaacgtgcgccgcaaggcgcacatattaaaaaaattgggaaagtgaaacttttcaccttcccaatttttatcctgcgaggtcaaaaaaagccagcaaaccccgtccctaaacggcaccttatctaaactgctccaaatattcttttactgatttgctcatttccttcgaaaagtctgaattatactttcgattacaaaatgcacagcaccactcttcgtaggtgctgtttttacacttatatgcaaacatctctcgcaattcatccccctccatattacgatatgtattctcatgcacaatatgtttctgttcacaccgttctggttttttacgtttcatttgttgctttgtaggccagccaaatactatcataactgccggaaatacatattctggcaattgtaagagttttctctgctcttcgcaattctccataatgtcgccaatataacaggaaccaatgccaaagctttctgctgctaccactgcattctgtgccgcaatggctgtatctgttaccgcaagcatcaaatctcctacatccggttttcttggtttgcaccctgcttccagataagcatcataccacttcttacaatctgcacagaacaccagaaccatcggtgcctttgcaataaatggctggtggtcgcagctttctgcaagtgcttcttttaaattttgatctgtaatatccaaaattgtatataactgctgacatcctgctgtcggagcctgcatagctgcctctaaaatcacattcttcatctcgtttgggattgctttttcttcatatactctcactgattttctgttgtataaactttctataatttcattcattctttactatcccgccttccttttgcattactttctatcttataaatttcatatttttcattataaatgttagtacttgcaagtgcaaggtgatagtatccgcagtgctggattttcttccacaattctcattgtttcttactgaatgatgatacttttttcgcccttaatcccataaaaacaaccgtttaacgattttttaacctgctttcataaagcttaacgaagactctgaggtgcaatactttctgtaaaattattatacccctctgctgaaaaatgagtatacagatttgaaaagttgcaaccactacacacaatattcacacaaaattctctttatgttttcaatttttataggctttgccaagtgagcattcattcctgctgccagacacttttctttatcttctctgaatgcatttgctgtcatggcaataatcgggatcgtctcagcatctggatgtttcagtgaccggattgtttttgtcgcagtaatcccatccattacaggcatcatgatatccatcagaattgcgtcaaaataaccttccggtttctcctggaacattctgaccgcctgcaatccatctcttgcaactgtcagatttgcaccttcatcagacaacagcgtttccgcaatttctgcattcagttcattatcctccaccagcaataagtttaatccgctgatatccatctgtgccgctgttttctttactgtatctggtgcggaagcaagtttaaacgggatcctgatgataaaggttgagccaatgccttcttcgcttttaacttcaatagttccacccatcttttcaatcagaccttttacaatcgccattcccagtccaattccctgctgtgtacttcttgcatcctctctttcctgcgaaaacggctcaaatatatgctcctggtattccctgctcataccaatgccagtatcagttatggtccactcatatgtcgtaattccgtcaacagcttctgtataatctgacaccgtcattatcttgccgccaatccggttatacttaatacagtttccataaatattaagaaatatctgtcttaaatgtaccggacttccataaataaaaggatatcgaagcccttccttttttgcacggaactgcatctggattcctctgtcttttgcccgctgttctatgatagtcagaacatcctgacttaattcctcaaagttga

SEQ ID NO: 2645 - DNA, 379 bp, Unknown
  gut microbiota DNA sequence
cctcatcgatgatccgcagggtatcatccttgaacttccggacgatccttgcagccaaagcggctcccacgcctttgatggcgccggagccgagataccgttccatggcgatcgaatcttccggaagtttcgtctcataggactccatcttaaactgctgcccgtatgtggcatgttccacataagagccgtgcagttccagaagttctccctcgcccacatattcaaatgttcccacacaggtcagttctgatcccttcacgatcagattcagcactgtgtatccgttatcttcgtttcgaaatatgatatgatcgacatatccttcgactgtatcctgtgacatgctttattttcctaactcttccatcacttcagc

SEQ ID NO: 2646 - DNA, 1033 bp, Unknown
  gut microbiota DNA sequence
gataaaatctgatcgatgcgtttcataataactcgctgttccatgacagatttaagcctttaccatctgtaaaaaggtctgctgcagggaaaaatcttccgcaaaggctccacgcacgatggtggttacagttttgctgcctggtttctgaacaccgcgcatggtcatacacatatgttctgcctcgatcatgaccatcacacccttcggctgcagatgttcttcgagagcgtccgcaatctgtgcggtcatattttcctggatctgcaggcgtcttgcatagacttctaccgtgcgggccagtttgcttaaacctgccacgcgctgatccgggatataagccacatgagcttttccgtagaagggcagcagatgatgttcgcaggtggaataaaaggtgatatctttttccagaacgatattgttattggtagcgtgaaattgtttggacagatgcacaccggcatcttcatagagcccgccgtagatctgctcgcacattctggcgatacggtcgggtgtttcgagtaaaccttctcgattgacgtcttcgccgataccttccagcatcagacgaacgccttctttgattttttcgtgatccatcatggtacaaaacctcctgtgtaaataatgctgtatactgagaaacttcctgtaaaatcagacatagaaagattctgagcatacaaaaatatgcatcaggatgttctgcatagatgtacagaataatatgtaagaaaaaaacaccctgatgtgaagaaaataaagctactgaaaaataactatgagtatatcccttcacaatcggatgttaatcatctggttgttgcaacgggtgcggtaaccatatcgtaagtccggtccgcaggcgaaccgacttttcgtttctgtggcaactccccatccacaaaacacttgacgcatggaaacctattttgcatagtatttcaatcgaaacagcagacacatagggtttctctgctgtttgaaaggattatagcactcatggaaagagggtgcaagagaatac

SEQ ID NO: 2647 - DNA, 1821 bp, Unknown
  gut microbiota DNA sequence
ggtgacgcatccaaggacgatccgttaaacggagatgacatcggtgacaacgaactgctggtagtaagtttcggtacttccttcaacggcagccgtgcagcagatatcggaggtatcgagaaagccctgcagaccgcatatccggactggtccgtaagacgagcctttaccgcacagatcatcatcaaccatgtacaggcccgtgatgacgagaagatcgacaatatggatcaggctctgcagcgtgccgtagacaatggcgtaaagaacctggtggtacagccgactcatctgatgcatggcgctgagtatgacgagctgacagaagcagtagaaagctacaaagataaatttgaatccgtaaccatcgcagaaccactgttaggagaagtcggggacagtgacgatgcagtcaatgatgacaaaaaagcagtagcagaagccatcacagcagaggcagtaaaaactgcaggatatgatgatctggatgcggcagaggcagacggaaccgcattcgtattcatgggacacggaacttctcacactgcaaagatcagctacagccagatgcagagccagatgaacgatctgggatacaagaatgtatttatcggaactgtagaaggcgagccggaagataccgcatgtgaagcagtgatcgaaaagatcaaagaagcgggatacaaaaaagtagtgcttcgtccgctgatggtagtagccggagaccatgcaaataacgatatggccggagatgatgaggattcctggaagagccagtttgaggcatcaggagcatttgacaagattgatacccagatcgcaggactgggagagatctctgctatccaggatctgtatgtagcacatagtaaagctgcaattgatggaaagagcgcttctacagcaaactaaaacatatcagatacgtaactgctcagcacccactgtgaaggtactgaaaagttatgacagatgaataaaaggaacagcctgtccgatcagctgctattcagtgactggtcagactggctgtttttttgccaaaatcacgagacatacaagtcaaaatgccatcaccgaaggtgattagaaatgcatactgcatcgtaactgtgagggtactgaacagttacgacgcaacattgacaagtaattggagcggtgctagaataaacaggaaatacagcataactgaataaaatgtgtaaggtgccggacgaaaaaatgtccggtgaaaagggaaaccggtgagaatccggtacgaactcgtcaccgtaattcgcgagttgaggctaataaccactggaaaaccgggaagggagccaaagtgtcagagcgatcagtcgggagacctgccttttgcagtacgggaataagaacagttactgtgctcggtaactgagaattcaggccacgagggactggaagtacaaaaataaggaagtcagaatcatactggctgattcttgtgtaacctgtgcctccgctaattggcggaggtttttcttgtattggacagtaataattggtccggtggatcaattatgattttcttttttattcatttatgtactcatatctgagaacaggaggatttaacatgaaaaagaaactggtagtattgatgttatcagcagccatgacagcaacacttctgactggctgtggcgacaccaaagaaacaacatccgaatctacagcaaccgaaacagaggcagaagccaccgaagaagccgcagatgacagtgcatctgaccaggaggccgcagataaagtagcagccctgatcgatcagatctatgtgcaggaaagaaacgacaa

SEQ ID NO: 2648 - DNA, 1280 bp, Unknown
  gut microbiota DNA sequence
gaatcggattttcttttgccgtttccgctctggcaatctcttctctgatatcgcccagggtagcttctacttctacaccgagcacttcgttcagattggaattggcatctgcatccactgccagaatcggtccctttttctgttcgcagaggtactgaatcagaagtccgcacaatgtggtctttccaactccaccttttcctgcgactgcaattacatgtgacattttcttatcctttctgatagtttcttgttattcagttctaccttatcactatagaatctatcgtataagattgttacatcttatgaccttatcattaatcgcactgtaattttacaatgctgtttgcgagatcgaccatcaggatctttccttcgatgctggtctcttctcccatgatatcgcggataataactttttcatcctctaccagaatcttgcttacattccggcagatgacggtatcatcgctttctttatatacagtagccagacacattgttattcctcctttaaccaagatgtcttatgcatctcactgattatgactctttcaactcttctaactcttcttttaccgttgtgagtgccagacgtaatctgagattacctttctggaaatcagatacagcttctttgatctgttttgcagctgtatccatacccagttttgccaggttatcagccatctgatcgagttctgctgcatgatgttcgttatgatccaccatgtaatttaacagtgctacggattcgttcttacatttatcagaaccgccactgcatccgtcgcatgcatgttcttcacagccatggtcatgctcatgtttatgggcagggccgtcaccatgtggaattacatttccattctcatcttttaataagtgcatgtcctactcctttctctcatttcccccagtaggggatatgacaatcttttgtcaattatgttttattatactccttttccctatggtattcaatagaatctatgcaaaatatttataaattcagctgtacttttttatatacaataggtggtttttgtaaaaaatgtcatgttttctgtgtttagcactttgatttgttaaatcgttaacatgacatttcacagtttttcctgtttttctgcatcctttcgtcgttctatcctatccgggggatggggtcacgacatgccgcagacagctttcatgttacaggttcgtaatatttttgccctagttatttcacatttttatggtaaaatgcaaaaaattgggagttttccggtatt

SEQ ID NO: 2649 - DNA, 11237 bp, Unknown
  gut microbiota DNA sequence
ctatctcaagaaaccaatattatcgttcttccagataatagcggtttatatcaacctgttctctaattctgctccatttcttctcccactctctccagcaaatgcccaatcgcaaacatcaccgtctcgtaatgcatatactccagaatattccgatccaccaacacctgcaggcttgccgggaattcgtcatcggattcccagaatctcagtataacgggaagaaatgaaaacatgtccagctgataagccacatcgcctttttccagcctgatcccatgaagtcgcttgcaggctttcgccagttctgcggtttttccgtcgaatttctttccggcatcccggaaaaagttgctgtcatttgccagattccctccctgcaccgtagaaaggctgccgatatgaacccattcatgggcgggatgacagtattctttggaattacacaggacatcgtagattgtcatggcttcgttgtaatttgcatttttttccgtctggaattcatccacagaccaggtgattcctccggtgatgcggttgatccggtattttcttcctacaaagaaaatatagagatacttttcatcatgatccagagcaaatttccggatcattttttcctgatcgtattccaggaaatgggaggacatacggtctttcatcgtttcatagtttgacatgtcgatttttcctttctatggatcatatattatccaaaatctggattttttacttgttttggataatatgttatctataaaaatcatatcacatcaaataaaatttgcaattttaattccatcttcagccaccgcgttaattaccagtttcttatgaaggaaaagattttcgttcattgctcgaacaaccaaaaacagagtattttcaaattttgttgtatctcaaaatcaaaaatactctgttcctcttaaattatatatttcttatcaatgttattatcttttacacagcctccacaaccgcagccggtgccgcaaagtttctggcggcttcgcctaattttacaaatccctggttatccagtgcttcttctgcgatacttacgcagttgtcggcagctcgatccaggttgtagaggatgccggagaagcaaccggtcatcgccggatcgcatttctgattctttacgcggttcaagtgggctttgttgaatttcttttctgctttatgcaatttctttttatttttgaataccagttccgcttcctcttcactgccctcttttacggctgtcatcgccaagcgcagcagatccagaaggacattgatgcaattttcaatttccttgccggcttcctcggaaaagctcatgccatcgtcctggatttttatccagatgctgtcgatatcctgacaccggtcggcgatacgttcgatattgttggttacatacagaagtcctgctgtttgttcagactgaagctctgtcagattaccgctggaaaacaatttagtgatatagtccgtgatttcttcctgcaggtgctggacgatatccagctgatttttgaatttttcatatgcagctgaggtctttttctgattcagagaacctttcaggctgttcagcatatgtacggcaaatcctgtcagattttccagttcctgagataccagatacatcgcagccaccggctgatcaatcactttgttatccagatacttcggttcataaactacacctgtgttcttatcttctccgcgtataatcgtggtaacgatcttcaccataatcgggattagaggcagccataccagcgtacagaccacgttaaatgtcgtatgtgcattggcaatctggcgggagatcacatcgatctcatttccttttggagaaatataacgtacaaattgtgcaaaccacggaatgatccagataaatacgcaggtacccgtgatattgaaaatgctgtgcgcgattgctgttcgttttgcatctttggactgtccgatagatgctaaaagtgctgtgattgtcgtaccaatgttatcgccaagcaaaatcgggatggctccggtcagtccgatcacgctgctgacaccgtccggtcctgcctgggaagcaaagctctgaaggactgcgatcgttgcagaggaactctgtaccaccagagtcatcaccgcaccgaggacaacacccagcaccggaacagaagatacttttcccatcagatctacaaagatagggcttcctgccagtggtttcataacgctgcccatgatctcgattccttcaaacaaaagtccgaaagaaaagataaccataccaatatttttaaccttttcttttttccctaagaagttcagtatgaatccgatgaagatcaacggataaatgtaatcactgattttgaatgccatcagctgggctgtcatcgtcgtaccgatattagcaccaaagataacggaaatcgcctgtggcagactcatcaatccggcacttacaaagccgatgaccataacggtagttgccgaactgctctgtaacacagccgtaaccagggctccggccagcgcacccatgatcggattcttcgtgagaaattccagaatcttcttcatcttttctccggctgccttttgcagcgcatcactcatactgttcattccataaaggaacagcgccaacccaccaatcagcccaaatactacttttacattttcattcattttgtgttctcccttttccggcagctgtctgctgctcgattcttgaaatcatctgtaaaatctctgttatgaatctgtataattcatttacggtttacagtatagtgggagaacgcatatggctctatcatggtattgtatgattttcgttaaatctgtgtaaagctgatagttagttcctgttaactccagttaaaaggtcaggcgcatctgattccagacagcatcgccgtggacagatttgtctgttactccttcattttggaaaccaaattttgcataataatggatcaatgcatctttgcaggtcagcaccagacccttccttccctgttttctggcatcttcgatcgcccgctccagcagttctcctgccagcccgcgtcttcgataagccgggattgtattcaccccgaaaatcatctgccaggcaccgctttcgtcgtgcatggaagctttttcgtacatttcatctgtcagatccggttcgttggtgacaaaaccgtcgacgaacgcaaccagtttgttgtcattttgctcgtcgaacatcagccagaaatggttggcgtaatgaataaggcggtcggcgaattcctcttttgtggcggcttcggccggtgggaagcactcggactctacggcggcgatctgtggcagatcatctatggttgcagttctgattatcatgatattgtatcctccaatttactatctattaacttttttctttctatttcgcagctgatatcattttcgggtatagtctgcgtggttatgcatgatattttcaaagagccatccgaccagcagacatttgttactctatcccaacaccgaaaacgccataaccgcaactcccagcaccaccaggatcactcctgtagcccggttcagagtctttggcgttgctttattggcaaatactgctgcgattcttgcccagaggaaggtaaagacaacacacaggatccatactgtccagtctggtgtgccgccgatggcaaagtgggatacggctccggtgagggcggtgaaggtcatgataaatacactggttcccacggctgttttcaattcatatccgagaacggatgtcaggatcagaagcatcatcataccgccaccggcaccgataaatccgcagataaagccgatcatcactccgcagatcacagactgaatcgcacgttttttcgcagacacctgtgccatggcttcttttgtagtcatgaccgggcgaaggatgaatttgataccgagcaggaaggtcatgaagacggagaaatttcccatcgttgtggacggtaccaggctggaaacgtaacttcccactatggtaaacaacaacacggtaaccatcatgatcagaccattttttatatcaagattcttattcttcccataagtatatgcggatacggcacttgccagcacatccgaggacaatgcgattcccactgccatgtagggatccattcccaagaatgtgatcagcatcgggctgatgaccgccgccgcactcatgccggcaaatccggtcccgagacctgcacccatacctgcaaaaaatgtaacaattactgtcagtaaaatactcatttctttttgttctccttttgatatgtattcagattttcctctgtctgttccatcacctgttcaaaaactttccttgattctgcagatatcccggaaaataaggtttcgataaatgttttctgaatctcacatccctgtctccagacatgctccgctttccgggtacagatcagttctgtctttctccggtcgcccggaacctcccggcgttccagatacccttcctgcaccaggcgttccacatggagcgataccagatttgccttgatcccgcggatctttacgatatctgcagcagttttatactgcggattgtttttcaggaacatcaggatatccagggatgtctgcgggatgccggtctgctggcataacggtcggcacagctgattatagacatccagcaatttatgtatatactcaatgcttatcatgccttctatacctctctttcatttttagaatgttcatttttgaagtattttaacatgaaattcctattattacaagcgtgaaataatcattacattttcatgaattatattatatctttctgtctatataatatcttccttctatttcttacaaaatcctgaagtttatggtaaaacatgtcagaatttgttatgatacgggcagaacatataaattttgagggaggatttcaatatgtttaaggaaaaaatacgtatacagcttcttgggggaagtctgacggatcacggcagctacacagatggcaattatcagggatatccggttgtcattacaacagagtcggcggtttatcatgttcgtatcaatgccgtctccgcacaggatcccgacaacgcacaactggcgcagtatctggaataccagaagcaaaatgtcaaacatctggtagattattcctgtacttccacctccgttctgctgacgataaaaatgccggcagtaaacggaaacaaagttccggatatgatcaacggtgttgtggaacctctgattcaatatctgagcagcggtaattatctgccctgctgtgaatcctgcggcagcacacaggagtatctgtcaaattatgaggtaaatggttcatatcattatctgtgtacctcctgtgcacagcagattgaacagaatcttcagcaaaatcagcagacaacccgtgcaaagaagagtaatctggttgccggactcgtaggtgctttcgtcggttccctgatcggatgtgcactctgggtattgatctatcgtctgggatacattgccggtattgccggagcggtcactgcaatctgtgcactgcgtggatatgaactgcttggcggtcatctggatcgaaaaggtgtgatcatttccactgtgatgatgctggtgatgattttctttgccaatcggctttcctggacctgggatgcttacgatgcactgaaagacgaaggatacaccttttccgagtgttatcagtatctggataacattctggatctttccgaactcaccggaagctattacagcgagctgttcatcggatacggacttaccttactctgtagtgtacggcgcatcatcgacgctttccgcaccagtagtggaagttatcgcatgaagaaggcgcagtaatcaccatagattctgtaatagaatcattcgagcaataaacacaaaaagacagaaatcggaatcgtcccgtaccattggtacatgtctgaaacagatttctgtcttttttatttacgcgagcaacgattcaaagtccgtacttgcacgagaccctgacgactatcgcaataacgagtaaaaaaatcccgggaatacctttcacatcttctagagcgtgtctgaaaaaggctctccggaaatgatttttcagacacgctctagttctgccaccggatctcacctttctgaatcagtggataccgtgccagtgtggttccgtccagattctcacgatgcatatcaaccgcagtgatctgatgattttcataggtattataatagtagattcccttctgagcattccagcaggaagtgtagatcgtgatctcatattttccgtctgccacctcacagcatccgcgctgctggtccaccgatcccagaatgtggaaaaactggctgacgctttccgcctcggaatctcccgatactgcatgtgctctggtaaatgccacttttgcaaagcgggaagtagaagaaagatctcccggaagtccaagtgcacccatgccgcggctgtaggtctgtaatggcaactgctcggaaaaatgattctccggctgtttcggtgacagatgcatatactgattcaataaaaacatctgctgttcaaatggcggattattggtcagtacacctgccggattatcataaaccttcagtccctcccggacacattcgatggtgatacacgcatatttgtccgccagaatccagtgcagctgtgccgccggaaactgtggagcgaatacggttcccaccagattcatctccgccagcattttcttcgcctcttctaccgatgcgcactgggaaagaatccatggaatgaactcaaactgagccacgttttcccgtccctcctggatttcctggtagacagcgtttcctacgaagttcaaccctgccattccaagtcctttttcattgaccgcatcgtaatacagcgggtaatcatccgctacatgtgccatgccgatgatcgcataatgattttccagttcttccatatggcgaaaatgaaacggataatttcttggtgttactgtaatttcatctccataggagaattcataatccaacgtccgtcccatataaaaatcttttgtcttataagtggctgctgtacacatttccatctgctccttttctccaaaatacttgcatggctgttctgttttttctcattgttctgatgctttcataattttctctgcactggaagggtcccaggaagaaatctccaaaactgcatccggaatctgctgatctccggaatccggattatggaaccagacgcaggacattcctgctgctgttgccgcctttcctccattagtggaatcttctactaccatacatgcggaaggatccagtaataatgcttctgctgcggcaagaaacgtatccggtgccggctttggatgtgccatattttctccactgataaaagcagaaaaatactgagccaggtcaagatccttcaacactttttggatcacatcctccggagaagaagatccaactgccagcagatatccttcctgatgtagtttttccagaacttcccggattccttcacattgcgggaatccttctttttccacgatttcctttttcttttcttccattctccggttcatcgtcggataatcctcgaaaatatcaccgtaagcatccaccatcagctgccggaaaacttctctggtagaaccgatgcacggtttgtaaatctcatagtccagcgtgattccgtcctctttcagtacttcctgccaacaccgaaaatgcaacggttccgtattgaccagaacaccatccatatcaaaaatgatcccttttttctcagccagtcgattaactactttcgtatacgagggaaccggcacaccatacagttttcccatgcggaccacttcgtataccagtccgtcgatttctgatggtttcccagccattacatccctctgcatagaagtagttgtctccggtgcaagattagacaaaatatgtaaattaacatctaccatgtctttttgaaacggaacgcccatagcatctgcaagtgctgcgatttcccggatcatcgaacaaaacagttcccgcggagctccctcttcctgaaaatcccccgctaccgcgttacagtacagtcctgctgctccgatcggagacacataggagaatttttcaagtgcttctctgcgaatattttcggataaaattccgtcaatagcactgtctgtaaaatcctgccggatctgttccagttccggtctccagtctgtcttttcccgaactccaaagacgatccgcagaatctttccatgctgcactaacacacccggttctttgatgttggcagatacatagatgcatccgtctgttaccagaagttccggcagttctttttgcagttttgcaccggttccatagatattcagaatcggaatcacaatcgtatccggttttgccacgcggcggataaacgggacggtatcttccagtgaatacccttttacacacaccaggatcacatccggttgttccttgtagtgttccatatccgttgctttcacagcaattgtctcaggattcggatcccagagacgctccagagtcaatccatgctctttcatagcttccagatgacggccacgggcaatcagtgtcacatcttttcctgcctttgtcataaaatatcccataactccgccggttcctccggctcctatgattgcatattgcatttgtgttctccttttttctttgcatctgtcacagattctgatagtattcagaacataatcataatattatgtacgagatagttattattcaccaaataacacttctctgtttgttccgtaaaagatttcatcatgaccggacaattttttcaggatctcttccatccgatcccagttctgatccacgtcaaactcataactgtgtccccacagatagaaaagctgtggttcctcactgtcagatgccagaaaacggtcaatcagatccatcacatccgcatcattatgatggcaggttggattcagtgtcagcggctcttccggaagtccaaaatttccggtccgctctatcgtacgggaataacggataccacaggcacgcgcaatatccactacggtatcgttataagtaccaaacggatacgccattcccacaacaggctgcccaaaccgttcttccagatttttcttgtcttccagaatctcattgcggatcgtctcttcatcatatttgggaagatctgcatgtgtcagacaatgtgctgcaatctcatgtccctgatacagttcttttaagccttctatgttcattcgatgaatcagaagcccctttgaatgttcccatacatttgtataagactgtataccgctgtttaagttaaaggtgccttttacaccataagtattcatcatttccaccagacggcgatcctgtgtcacaccatcatcgtaactgaatgttaccgcttttttctttccattccacataacaattatcctccttgggcaattttaatgtactcagtcatctgtcacactttctgtcatatttattactcaagcactttctctaccatctgtgcatcgatcgttacggactgcatatgattgacttcaatctgatacagagcattggctgcgatatgctctgcggcctgttccagatcacggataccgctggtattcgcatgtttctgaatgattctgtccagcccctcatctgtcagaataatttcattttctttcagactcattcgcttcagtactttcggcagtgcgtattttgagaaaataattttcttttcttcgtctgtataatccggaatgtcgatcaccgcaaaacgggacatcagcggtgcactgatctgggatttatcgttggcggtggcgatcggatagacacctaccgtagggatcatacattccatatagttatcggtgaatcccaggttatcaagaagggtcagcagaacatccgccgggtttccgtttcctttgccggaggcagctttgtccagctcgttgatgataaataccagattggactctcctgccatcgaaaatgcatccatgatgataccgggttttgcattggcatagacacgggaacttccggtcagctgttccggatcattgatggaactcatatccagggttgtccacggcagtttcaggattcttgcaaccgcataggcaatctgtgattttcctgttccggcaggtcctaccagaagcagaccgtatgccggtaacgtatgcgtacggttgatctggatgatcgtctcgataattctctgttttaccttctccataccgtacagttcttcatcgaggattcttcttgcttcctgcgggtcgatagactcaaagtaattgctcttccactgtacattcatcataatcgacagtgctctctgtgcatgccgtctctcttccggagatacctcatgggattttgcaaccgccaggtttcttctcgcccagagacgaatattatccggcagtgtttttccggcgcaggtcataaagtcggtgatgctctggatactggtcagtttcatatcatcgccgatttcttctgcatcctcatcttcctcgatctcttccggtgcattgcttgccagaagacgttctatcataaactgtaaaaaaccatcctccgccgaaagtttggtgccgccaccgaaagcgatctcacggatcttataaacggcatacccattttctctgttctcaccggacagccggatatgaatatgattaccgccgagccattttaacagactgacaaaacgggcatcgatctgcaggatgtccgcggatacgataccgtcttcctcctcaaattcaaaagtcgtctgtttcgctggattagaaaagaatccgctggaatggtgtttccactgccgttttttgttatccagcaccagcagcgggcgttccgatgtagcggtggattcgtcggagcggaaggttgtataagtacaggtcaacggtttgtctttatccggggtattattaaaatcaaatactggcattgtaatttctcctttatcaccgttccgtttttaactctcatcaccggaacagttcttctgttttttcgatttccttttttgtgcaggtgaccgtttcataaatgcaaaaatctaccgtattattacctgtcacactttaacagtttaccatgattttccgaaaaaaaaa

SEQ ID NO: 2650 - DNA, 16134 bp, Unknown
  gut microbiota DNA sequence
ttcggttttccgatacgcgccgcagtgcctgtaagacttccttttccgtctccacatccagatttgccgtgatctcatccagcaacaggatcgatggttctgcaactgctgccctggcgatggataacaattgccattgcccctgcgaaaagatctccggggtacacacggtatcgtaaccattttccagactgtcgatcgaatcttcaagaccagtcagtcttgctgccgcctgcacctgtttttccgtgattctccgatcatacagtgtaatctgctcacgcaccgtacccggcaccatatggaaagactgctccacatagccaaacagcgatctcctttcctcttccggaacttctgtagcagaaacattaccgatccgtatgcttccactctgcggctcatacagaccaagcagcagcttcaggatcgtactctttccggcaccagtacgcccggacaatgtgacctgttcgcctttttttacctcaaaactcacaccttccagaaccagatgttcgtcatagccaaagactacattttcaaaggataccgcggtctgatctccgacatctgccgtatgtatcttatctgttgtaacctgttttttctgtccaatgatatcttttgctgttttccggacaccctgtcgttttccgttcgctctgtctgcttcagctgcttccaaattgaaaaactcattgattctgtgaatacctgccatcgctgactggatcgtctgaatctccataccaaggctttctaccggtgtgaaaatctgggaaatgtaattgatcacggctactgctgttccggcagacattccaaagaatgtcagaatctgctgattgccagatgcagataacagcatcacaacagcaaccacaacggcattcagaatcagaataaccggtgagtaaatcgcatcatagaagttcgttcgttccatcgcccgatagctgtcgctgatatatttgtcataccgctcttccatatatttttcttttccaaaacagtggatcgtccgaatattgtgaagcgtctccggcacatgacccgaggcacggcctactgctcttcggttctcgatctgcgcggtcaacatgtttttctgtacatgtctggtaaaccagaacaaaaatagcaataaaaacagtaaaaccaacgtcaatcccttattccgaaaccagatcacagccaggatactcaggatcttacatgtatccgcaaacatactgatgattccggaagtaaacaggttctctaccgtatccacatctcctataaaccttgataccatcgttcccggttcctgctgattgatcgtatccgcactgaggctgacaaacttttccatcaggcggcttcgaagcgcatgcgtgatcttctgtccgaaaacagtcagaagactctcgcgcgccgtatccataaaacctgtcagggcaagcacaacaaaatagaggacaaagaacgaaaacgctaccgcatgtcctgccgtaatactgtccacgatttttccaagaagaagcggcgggatcagagaggctccgatggctccaagtactgcgatcaggatcccgatcgacagccatttttgtctttttactgtagtaatcagaatatttcgtacatttcctttatgcttcatgactgtcctctccttcctgtgtggtaaataatgctgtatacgccggtactttctgcaacagttcctcatgtgttcctacgactgtttttccctcgtccatccagatgatctgatccatctgtggaaacagatacagtcgatgtgacaaaagcaacacgattgaatcacgggtcatcgcccgtacattggcaaacacttctttctccgtcgatttatccagtgcagaaaacggatcatcaagtaccagtaacggctttttatggcacagtgttcttgccagtgccacacgctgtgcctgacctccggaaaggcgaaccccaccatttccaatcaaggtatcctccccctcttccatatcagaaacttcccggtcaatacacactgctttcagataggttttcaaatctttttcgtctcccaacaacacattatctctgacgctgtcatgaaacagctccggatcatgccccaggtaggctacgatacccttacgttctgcctcttccatctgcagcaaatcttttcctgcaaatcgtaccgttccctcatatggacattcacataaaaataacttcccaagagttgattttccacaggctaccggaccggtcacgccgatgatctgtcccggttttgctgaaaaagtcacatgttccagcacgcgctttccatccggataagcaaatgagacatcttttacttccagatatccaggtctccattcttttccgtcttcttcctcgtttaccgagtcaagcagcggacggatacgattccaggaaacctgcgctttatgtacggcattgaagagttttgccgcactggatgattttgcagaaagcttcacaaagcatgccagaaacgtggtaaatgttgcgattgaccagctgctccatccgcttcccagtatgtttttctgaccaaaatacagaataaacaatacactggtcatagaaatcactttataaatcggaggcatggcactgttccagatatttgcctttaccgcggttgtttcataatcggtaagattcttctcataagccatctgccggtctctctcacagccaaacacccggtaagtgacagcgttctgtgcacgatcaagagtcgctgcgctcaatactccgcactgctttttatacgctgctccggttctctggatcatccgtttcatcttctccgctgtaatatatgaaatcggcggaaagatcatacacagcagagcaagccgccagtcataccacaaaagcatgcctgcataggctgtcagagccacaccggtatcaaaaatctccgtcgtgaatttacgcatgccctccacacaatcatctacatccaggatggctttcgtcatgatggttccttccccttcttcccgaaggctcgccctccccctggtcacaagactgtgatacaggatctctttcattctccggtttacattatttgcaaacctgcgtacataaaaacgtttgacatatctggatacctgtacgatcccgattgctgccacataaccgattacaagaaacagcatattggcaaaagttccgctgcctctcagaatatccaccaacattcccgtcatccgtccctcaaaccacggttccgccagaagtcccaggttatagatcaggccggagattgtaattgtaagaagaactttccattctacccgaaaatacgaaccgattttttccgaacaaaacttctcatcctctctcttcttttgcagttccttgttttccatccccgtcattctcctcttttgtcaaaatccgtgtaatattttcaaatcctgcctatcgttctctttttctattcgtataagagcttcaaatatctccctctttatattttttcattaatttagccagtgctttattttctcctgcaagaatcaaaatctctcccctgcacaggttttcttccggattgatgctgacgcaaatcgtttcccccctcttgattgcaataacattaatttcatatttttttcgaagattcagttcttccagattatgatcgatccaactatccggaaccgcaagttctaccatcgaaaaggaatctgacagcataaagaaatcctgaaatcctcctgaaatcaggtttttaccaagacggatacccgtttcgatttcggccatcactacacggtctgcaccgatctttttcagaatcttggcatgcatctgattcatccccttggcgattaccagtggcacacctgcctcttttgcctgcaatgtcgccagaatgctcgactccatatcttccgagatccctatgatcaccacatccatgttactgattcccagcgattcaaatacacggctgtccgtcacatctgcccttgcagcataagtcacataatctgctatctcctgcaccagttcctggtctttatccactgccagaacctgttttcctgcctgtgacagcgtctgtgccacagcataaccgaattttccaagtccgattactgcatattgtttatccatgatttttattatcctttctgctaatctgttctcccctgttctcttatccaatcagaatcctctgttccggtctctgaatattcgcatccacatgccttgttctgcgcccaagggctaccgcaagtgtaatcggcccaattcgtcccatatacataacaagtatgataatgattttccctgctgccgggagctgtgaagtcagagaacgggtcagtcccaccgttgccaccgccgaaacaacctcatagacacagtccagaagcggatgaccactgacggcaaccagaaggatcgtggccgtaagagcagtagtcagtgcaaaaaagaaaatcaccaccgcagagcggatattttcttccacaacttttcttccccatactaccgtatcatgatttccacggatataagaagtaaccagcacgataagaagagcaaccgtaattgtctttacaccaccggccgttcccatcggtgaaccgccgataaacatcaggatcatactcaccatcgcagacccatccgtaaaatttttctgtggaatcgtctcaaatccggctgttcttgttgttatggactgaaaaaaagcagccatcactttctctcccggtttcagacctccgagagaccctgtatgattccagtccaacaggaggatcagaagtgccccgcctgtgatcaggattactgtcgtcgtcaataccagttttgtatgaagggtaaatccgcggataaaattttttctggttcgttttcctctcagcagatcctgcacatgctcgatcacttcccaccagacggggaagccaagtccgctcaagataatcagtcccatggttgtaacattcatcagaggattggttacaaaaggcgcaaaagaagattcacctaccagatcgattcctgcattgcaaaacgcggatatcgaatggaaaatactgtacccgattcctctccacagcccataatgaggaacaaaccaaaagccataacatatcgctcctgcaatctcaaccaccgctgttccgatcagaagtcttctgacgattcccacgcttcctttcagcaccggaagattataggtatcctgaatcagtttgcgactctgcaagctgatttttcttcgaaaaaccagaaatatcatgatcatacatgccatgattccaagcccgccaaactgaatcagccccagaatcacaatttttccaaacacgctccaggtggttgcagtgggcacggtcacaaggccggttacacacacagatgtagtcgccgtaaataacgcatcaagccaatatacgccctttccactggccgatgaaaccggcagacacaaaagaagcgttcccagtatgatcactacaccaaatccagtcatcataattctttctgtcggcgtatgccactgcctttttttctgtttttcagacatcctctttttctcttctttcctatattttttccaaaatatcaactttctgtttcatttctgatattttataaccaatgattcttcttttagaatccgaaatctgcataatcctccggaagaaatctgtggtaaatgatatggcagccctcatctttaaagcagtagtaatatggatcttccgagtccacaaagcggatcatcaggtcaaattctccgttgtccatcggttccatcgcgcactcagatgtctgactgcggaataattcttttacctcatccaacgtcgttccgtgttttgtaagcaactgtaccagtgcaaagataaatgcattctcgtcccggtgtttgtgcacatattctgtcgcattttccgacagaaagaagcagaaacgatctcctttgtgcgatacctgtacttccccgaatatttcttttgttgccttcggaaatccttccagtgactcctgcatcgcctctgcatcattttcgctttcaaaaaaatgattcagagaactcaaaggataatacagtcggatcggttctttcatatatccaagctttgcctgttcctctgcaatcacatcaatcagactgtcctgcagtcttttatatccattttcgtacatgattctataatcctttctggctggccccttcgaccgccggtcgtcgatggtgtcaggcaccatttaatttttatgaaatattttcacagctatgtgaattatataatctcacggatattttcgcaagcagaaagaacatcctgtacatttaaaactgtacaggatgttctcccttacacttttattctttatttcatactgtcgggttattcttcccctttgtcaaccttgctggctcttgcttcaatttctctttcctgtacatcaccaggtgcctgctcgtaacgggcaaatgtataagagaaatcaccggctccacctgtcatggaacgaagtaccgttgcatatccgtagatctccagttccggaacatctgcttctacgatggtatatccctgtttatccgggttcataccaagcacacggccacgacgtttgttcagatcacccataacatcaccggtgaatttatccggtacacggatctgcatatttacgataggctctaacagaaccggcgaagctgccaggaaaccgtctttgaatgccatccttgttgccgtcttgaatgccatctcagaagaatctaccggatgataagatccatcatacagaaccgctttcacaccgactaccggatatgccgccagaggaccggatactacagattcctgcagacctttttctaccgccgggaagtagtttttcggaacggctccgccgacaacgatctgctcaaatacatatggcgtatccagatcaccggatggttcaaaggtcatctttacatgaccatactgaccatgtccaccggactgttttttatattttttatcgatatctgattttttacgaatagtctcacggaatgctactttcggtttggaaagttccacattcactttatactgttcctgcagtttgctgacgatcacgtctatatgctggtcacccatgccatagagaagagtctgacggtttgcagaatcattgactactttcatcgtcagatcttcctgacacattttggagagtgcctgggaaatcttatccatatctgctttgttcactgctttgtagcgtttgcaggtatatggagcggaaatctccggtttgccgtagaataccggcacagcctttgttgccagagtatcgccggtacgcagttcgttgattttggctacggctccgatatcacctgcatgaagttccggaacctcaatcggttttgatccttccataacatacagcttgccgatcttcagttcttcttctctttctacattgtataaggtatctccggacttgataacaccggaacaaactttcaacagtgagtattttccgataaacggatctacgatcgtcttgaagacctgtgcggattttggcatggtgaaatcatagtcagcttcgaaaatttcactggttgattttacgataccggcgcgttctctcagattcgggctcgggaagtatccacagatatcgtctaacaggatcttaacaccctgcaggttgaccggagatcccatgcatacaggaaccagacttccatcacctacgcacatggataatgctgcggaaatctcggttacggagaattcttcgcccgcaaaatagcgatccatgaattcttcactggtctctgctacggcttcgagtaagatctctctgtatttttccagatattctttggaatattccgggacctcacattcttcttttttgtctttttcgatgtaacgacgacctttgttctttacgatgttgatatatccgacaaattttccgtcttcacgaagcggcatatgcagcggagcgatccgcttgccatatagctcggtcagatcttctactacctgacggtagctgacatcatccatatccatctctgttacgaagaacatacgcggcagtctgtatttttcacacagttcccatgctttctgggttcctacctgtacgcctgatttaccggagatcacgatcactgctgcgtcggcggctgcaactgcctcttcagcttctcctacgaaatcaaagaatccaggtgtatctaaaatatttacttttaccttatcccatacaaccggcacggtggaagtactgatcgagaattttctcttgatctcttctttgtcgtaatcactgatggtattgccatctgtcaccttgcctaaacgatttgtaatacctgaaagataagccatagcttctgtcagtgtagtcttacctgctccgccatgaccaagcagcactacattccttattcggtcagttctaaaaacgtccatatgtaatacctcccaaaaattagtatggttatatattactaaatttcttcgaatatttcaagttatttatgaaatattgacaattattttccgaacttttttgatttatgtttgtatattttatgttttttgtgtctaaattgtttcttttttgtatattttatcttcattttatgaaatttttctcagaggaactgttttttctatactgtgtgcctttttctcttttctttctatgctttttggcgttaaagttccatagtttaaagtgctaaatcattgacttttcccctcctgtgttttacaatggtgaaagtacgcaaaatacacgcgtaattacggagaaaggattttgacagacaactatgagtgattcactgaatataggatttatcggtctggggctgatcggcggatccatcgccaaatctctgaaacgttttcacccgcagactagaatttttgcatataccagaacggaagctacgctggatcttgccgtgtctgagggtattgtggacgtaaaatgtacgaaagaagatgaggcatttgcttcctgcgattatattttcctctgcgcgccggttcacgacaatatttcttatcttgaatggctgaaggatcatataagtccggactgtattattacggatgtgggaagtgtaaaaggtgagatccatcaggcggttcagaaacttggtctggacgatcatttcatcggaggacatccaatggcaggttccgaaaagaccggttttgaaaatgctaccgacatgctgattgaaaatgcttactatattctgacgccgggcggacagattgatatcccacgcctgacacagtttatggagctgatttcttctctgggagcgatcccgctggtacttacttatgaagagcatgattacatcaccgcagctgtgagccacctgccacacatcatcgcttctacgctggtcaacgccgtacagaagatggatacgccggaggaaaatatgaaactgatcgcagccggaggttttaaggatattacccgtattgcctcttcttctcctgtgatgtggcagcagatctgcctggaaaaccggtcaatgatctccaaagtgctcgacgagtatatccgcctgatcgtacaggcaaaatgctgggtggataatggtgatgcagatgaaatctataatatgttcagtaattccagagaataccgcaattctcttccggaagcgagcaaaggggtaatcgagaagatttatgccttttactgtgatatttatgacgaagccggtggtatcgctacaattgccacactgcttgcgatgaattcaattagtattaaaaatatcggcatcattcacaacagagaattcgaggaaggtgttcttcggatcgagttttatgatgaggaatcctgtgtgaaggcacagggtgttttgaaagaacggaattatacacttcatattcggtaagggggatgtacatatggaacttatgcaggcaaaaatgcctcttcgcggagaggtgaagattccgggagacaagtcgatctcccaccgcgctgtgatgtttggtgcactggctgacggtacgacaagagtgacgaattttttgcagggagcggattgtctttctacgatctcctgtttccgcaagttaggaatcgatattgaaaatacaccggaggagatccggatccacggaaaagggcttcacgggcttactgctccgacagagattctggataccggtaacagtggaactacaacacgactgatctccggtattcttgccggtcagaattttaccacaacacttaccggtgacgcatcgatccagagccggccgatgggaagaatcatcaaaccgctttctatgatgggtgctacggtcgagagtctgaagggaaaccaatgtgcaccgttacagattcagggacacccattgactgcgattcattatcagtctccggtagcctctgcgcaggtcaaatcctgcatcctgcttgccggactgtatgcggacggtgtcacatcggttacggaaccttatctttcgagaaatcatacggagctgatgctctcccacttcggtgcacaggtcaccagtgagggaaccacggcttcgattgctccggatccggaacttcacggattggatatttctgttccgggagatatttcttccgctgcttattttatcgtggctgctcttttggttccgggttctgaagtgctgatcaaagatgtgggaatcaatcctaccagagatgggattcttcgtgtctgcaaggcaatgggggctgatatcaccctgttaaacgaacggacagccgccggcgaaccggttgctgatcttctggttcgacacagtgaacttcacggtacggtcattgagggggaactgatcccgactttgattgatgaaattccggttctggcggttctggcagcttatgcgaatggaactacggttattcgaaatgcggaggaactgaaggtgaaggaatcgaaccgactggatattatggtgaacagtctgggagatatgggatgtgatatcgagggtacagatgatggtatgatcatcagaggtggcaaaccgttgcatcatgcttctatcgacagtcatctggatcacaggatcgcgatgtcgtttgcagtagccggtctggtttccgaagggggagtggaagtactgcgggcggattgtgtggatatttcttatccggagttttatgcggatcttggtaagctgatgaagtaatattttttattggctagagggacgccgagagctgcgggaaaccggggtggacaacatgggcagggcaactttgaactagccgctaacttcgactatattcacttgggtcagctgacccaagtgaaagtcttcgtaagcgtcggatttcaaagcttgccctaaccgcccataaagtgttgtccaccccggtttcccgcagctctcggctgtttcctggcaaaacaaatttgaaacaaccgttaatttttcgtcatatctttccagttacacgcaatgacaatttttatcgatacccagcccagcagggcaaaaagatgcctttcaaaagcattttgcgggcggttagggcgagttttaagatcctgtgtttagtaagacttggcgatgagcggctctcagtgaatcatgtgcatcgttgaaaaaatccccatatcaatcacgcaggatgcagattcgagtgtacaggtaaaaaaacgtaggcgtagcgggctacgctgaggcttttttgcctgtgcaatcggatttgcagacaagcgagtgatatggggattttttcataagatgtacaagtcgcacttaacacatagcttaaaatcgtcctgcccactgcttttgcaggggagctttttgcaatttggggcgtacgccttgaatatcttatttgtagaaatctacaacatcttccggattatagtacactttatcctgctcttctatcgttgcttttccatctttcacatcgataatcgttaccgcgcagtttggcggtacgtgacctctccagaagtcgtctttccggccgtcaatgtaatagagaaaggcccgtgtcgagcagccgtgtgctgctattagaattgttttattctggtagtccgggttgtggatcagatcctcgtagaaggcaccgcagcgatcaatcatctgctgaatagattcgccgtctttcggtggcttgtaaccgaagggatccgtgaagaactgttcaaaatcttttgacggaatctgataattctcccttcgacagcaaagtccttcccattctccgaaactgatctcttctattctctcatccgtaagaatcggtatatttctgtcacccagtaccagtccggcggtctcgtaagcccgctttaacgggcttgcgattgccaggtcaaaatgtacatcttttaatttttcaccggtgatttttgcaaggcggataccgttttcgttcagctcgatatccgttcttccttgcagccgtcccagagtattccatgaagtttctccatgacgaatcagatatattttcatcttttttactttctaagctggattcccatgccttccagaccattcaggatcttgttcatagcgccattgatttctgcctcttccagagttttctctttggagcggaaggtcagagaataagcaacggacttaaatcctttttcgatctgatcaccttcgtaaatatcaaacagttcgaagtgttccagaatctttccacctctctgtgcgatcatatgctcgatctgtccaaccatgatgtctttcggtactaccatggagatgtcacggtttactgcagggaattttgcgattccttcgtatttgcggtcgaaggatgcatgttttacgacattcaggatatccagaactgccacatatgcgcgtgttccgataccataagtatctgccactgcaggatgcacttcgcccagataacccatcacttcaccttcgtagctgatcagagcctgacgacccggatgcaggaaagtcttaccggctttcggatcgtactcagttttcttatgcataccgatctgatcgaagaactcttctactacacccttcatatcaaagaaatcaccgtctccgtacatacccagagtgaacatcatacgttcatccggcagttcggtcagaggaagttcttttggcagatatacattgcccagttcgtacagacggacatttttatttcttctgttatagttggttgccagagaagtcagcataccattcagagaaatggttctcatgatactgaaatcttcacccagcgggttggagattgtgattgcttttctcagttcatcctctgccggaatctgcagtttgtcaaataccttcgggctttcgaaggaatagcagtatccctgggagaatccacagtactcagccacatctcttgccacttcttcgattctcaatttaaatggcagttttcctgttgttgcctcaccacttggcagtgtggtcgggatattgtcatatccgtagaaacgtgcaacttcttctgcgatatctgcggtacggaagatatcatgacggaaagtcggagcaacgatctcgttggttgcttcatcataagccagttctactctggacagatactccagcatatcttctttggaaatatcggttcccagcaggctgttgattttttccggctcaaacggtactcttaccggctcttttttcttggtatatacatcagccataccaccgacaacttcaccggctcccagttcttccatcagctggcaggcacggtcgatggctgcctgcgcattattcggatccagacctttctcgaattttccggaagcatcggtacgaagtccgattctctttgcagacagacggatgttcggaccatcaaagcatgccgcttcgaacagaacggtttttacattgtctgtgatcatggaattttctccacccatgatacctgcgataccgatggatttttctccatcacagatcatcaggacattttcatccatctgacgttcctgtccgtccagagtaacaaatttttcgtcttttccggcacggcgtacatggatctcatggtttgcgatcgtatccagatcataggcatgcatcggctgaccatattcttccataacatagtttgtgatatctaccaggttgttgatcgggcggataccgttggctgccagacatctctgcatccatttcggtgacggaccgatttttacattttttacgactcttgcacaataacgtgggcagagatctttatcttctacagttacttttacataatcgttgatatcttcgtcgttaccggtagctgttacaaccggaggaacgaattttttctggaaagtagctgctgcttctcttgcgatacccagtacaccgtagcagtctacacggttggaagtgatctcatattcgatcactgcatcgttcagtcccagtgcttcgatcgcgcttgcaccaacggtagcatcttccgggaaaatatagattccgtattccggagcttccggatacatttctcttgtggaacccagttcttcaatggagcacatcataccgtaggaatccacaccacgcagttttccggctttgatcttgattccacccggagttttcttaccgtcgtgtccgcctgcaactcttccgcccggaagaacaaccggaactttgtctccttcttttacgttcggagcaccggtaacgatctgtgttacttcatttcctacattgacctggcagatgatcagcttatctgcatccggatgtttttcgatcttttcgatctgtccgatcacgatattttccagatcggcatccagtaattcatatccttctacttttgttccggacagtgtcatcgcatctgtatattcctgagctgtaacgtccagatccgggacaaacattttaatccatgataaagatgtattcattctttttatcctcctagaactgttttaagaatctgtagtcattttcatacagaaggcgcatatcgtcgatctcgtatttcagaagtgcgatacgctccagacctacaccaaatgcaaaaccggtgtattcttccggatcgatgccacacatctcaagtacatgcggatgaaccataccacagccaaggatctcgatccagccggatcctttacagaaacggcatcctttgccgccgcatttgaagcaggatacgtcaacctctgcactcggttctgtaaacgggaaatgatgcggacggaattttgtttttgtttccggtccgaacagttcttttgcaaattcttccagtgtacccttcaggtctgcaaatgtgatatgtttgtcaataaccagaccttcgatctgatggaaggacggagaatgtgttgcatccacttcatcagaacggaatacacgtcccggtgcgatcatacgaatcggcagtttcccttcttccatggttctcgcctgaaccggagaagtctgggaacgaagcagaatgctgtctgtgataaagaaagtatcctgttcgtcacgagccggatgatcttccggaatattcagtttggtgaagttgtagtccgcatactctacttccggtccttctacaacttcataacccataccgatgaagattctttctacttcttccagagcaatggtattcggatgacgatgtcctacatttgctttcttagccggcagagtcacatcgatgacttctgctgccatctttgcttcccgcagttctttctccagacgggtttttgtctcctccatcatggtttcgatctttgctctggcttcgttgaccatctgtcctactttcgggcggtcttccggagctacatctttcatacctttcagtacagaagtaagctgtccttttttaccaaggaaatttactcttacatcattcagtttgtccagggcatcggactgttcaatcttctcagaagcttcatccagaatcgcctgtaatgtttctttgatactattgctcatggcagttctccttttctatttgtttggggcggatgcaaggcaacgagtaaaatacgcttcgcgaatttcactcgttttcgcagcagttgccaaagtctcgtac

SEQ ID NO: 2651 - DNA, 2013 bp, Unknown
  gut microbiota DNA sequence
tgatatgcagtgcaaaaaaagccccgtccttccagtttcctggagggacgaggcaactatctcataatctcgcggtaccaccctgatttccgattaaaaaattaacggacactcattaagacttaacgcgtctgtacgtcttctcttactgtattttcagagaagcagctccggtgggaatctcaatatgcatctgaacttaaaggagcttgcagccggtgactccttctctctgtaagaaaatacatatctactgacactttcacagcttttttctatcggcatcaattatagtatgaatcttcttatctgtcaagttctatttctgattcccgccctctttgctactgctctttcttttcctctgtttcctcttcttccggatcattttcccggattccccgtagaagtccctgatactcattgcggatccgctcgctcgccacccggtgcagtctgcgaagacgttcttcaaagtaggcgttgatctctgccccgatcagaacgatatacatacagaaatacagccataaaaggattaaaataatcgttgtcaggcttccgtacatattggaaaatccgtcgtaatagtccagataaacggaaaatcccagggaaaacagcgaccatgccaccgcagaaatcaccgcaccaggtacctggcttcgaaaagatgttttcctgttcggcagaaatttatagaccatcaggaaaatcagtgccagtacgaccagagaaaccgcggtacgcatgccaatgatataagctgtcactcgcgccagcgccggaatgtatcgcgtcagaagcttctggatactgttaccaaataccagaaggatcagacttccgataacggcgaggataaaaaccagcgtatacaaagcggaccggatcctggttaccacataatttcttgtctcttttacatggtaaatcgcatttaccccgttcgtcagtccctgcagaccttttcccgcactccacagggtaaagatcgcactgatcggtaccactgcagtcgacttatcataaacttcctgaataatactcaaaagaaaacttcgaaaatcccctgcatccggcatcacctgcaaaatcatctccacaaccatatctttcgtaatcgaaacataggtgaccaacggaagcagaagcatcaaaaagggcacaaaggacatcaaaataaagaatgctgcctgtgcagcaaacgcactcacatgatcctgattcatgcggttcatgaatccggtcatgatttttatgaactttttcattttgttttcctttctgcgcaatatttattttttatatacttatttttatcatactattttttcagaaatcctgcaagttttctatcgtaatattctgataaaaaacctgcaggatctcccgccaacccattccgtcttccgcaagatgctttgctccgttctgactcatccccacgccatgcccataaccgccaccggtaaataccaacaaatcaattccctgttcgttcccggtatcgatcacaaaacaggcactcggcagcagttccatcgtgttacaggtacttccatcatttctgataatagacagtccttttactgacagaaactttcggatcgcatattcattttccagtgtcacactctgtttgtctgcctgaatctccagcatttttacccctccgccgggatttctttcctgtatcgctaaaccggtaaatgtgccaatctggggatactgtctctcacttcgctccttcagcacctcccagggaatactcactttccatcgataccagatatcttctttttcataatctcccgcttctgtctgtgatatcagttcccggaaatatgtttctgacatgtctgtctgctttgccgttcctgtttgctcttctgtgccattcccggctgccatagcttccactgcctgatggctcactgcaacacttttcagataagacgcacttttctttgcatcccagacttcatccgtatcggtatatccccaggaagt

SEQ ID NO: 2652 - DNA, 4061 bp, Unknown
  gut microbiota DNA sequence
acagagcatcaccatcccacgggtagcatccaccgcctgattgcttgtttcctgctccggaatattgttatacacctgacaggaaaccgtatcatccacatctgcattccattctgccattcgttgttctctgatctggcgtaccgcataggttcgcgcgcagaccgcctgtgcacagagtgcttccacaggtgcatcagcaggcatctcacttggtacaactcctttcagatacgattccagatccacctgattaatgatccgaaatccctcttcctctcttgtcacttccaggattccccgataggcgggtgctccctgatttcttctgacagattccaatgtcagcggtgttgtcgcttctgtcggttctacccagacagtctgccccggctgcatctgttccgacaggcaaagttccgtgcccgcctcctcctgcaccgtaaaatctcccttcacacagtaggctcccgcgcaggatatccgcacctctgaatgaacataatgttccgttccgtcgacggagatcagtacccggatcgtatcctcctttctgtccgtcttcgtttcattttccagatttgcgaaatcctcctgtgatatatcctgattttcttttctttcattttccgtctgttctttctctatattttccccggaagtcccgacttttgccatctgctgttccgcctgtaatttctccagataatcattttcctcttcccgtttctgtctcccttcccgtattcccatcagaaagagtaaaataaaaaacagtaccgttcctgcaatcgtcagcatccatttccatggaatatttttatttgtttcaccattttttcccatatttcagtatatggcatttttcaaaaaattatccagcgggacgggttgtgtttttttctgtcgatcaaagttgattcattgaacaatgactgacagacagtaaaacaagttaaaaagacgctgtattcggaatgttataccggatacagcgtcctcttattcttcttttcttattttaccagaaaacgatatactgtttttgtatcgtatttttctcctgctttcaggaatggctgtgcaaaatgcgtatcgttgaccgcattcgggcagtactgggattccaggcagaatgcatggcgtttgtcatataccgcaccattttttcctttttcgttatctacaaagtttgctgcgtagaactgaacacccgggcagtctgtataagcttccagcgcgattccagttttttcacagtatgcttttgccatccagtcaaaagctcctttcggtttgtccagtacaaagttatgatcatatccgcctgtcatctgcagctgttcaaagtccgcatcgatctctttaccgattgctttcggctgtgtgaaatccatcggagttccgactacaggagcgatctcaccggtaggaatggatttggaatcgatcaccggtgtatatgtggttgcattcagctgcatagtctgttcatatacattaccggaatcatgtccacccagattaaagtagctgtggttggtcatattggctacggtgtcctgatcggaaattccttcgtaatggatctctacagcattgtcatctgtcagtgtataagtaactgtcacatcgaagtttccaggaaatccctgttctccgtccgggctgtgatgatggaaggcaactgcctgttcttttgtctcagcttcccacatcataaattcaaatccatccggaccgctgtgcaggttgtttccgttttcattcggtgtcagctggatcttctttccattcagcatgaaagatgctccgttgatacggtttccgtttcttccgatcgtagaaccgaaatgtggtggatttacctgataatcttctccgtgatcatatccgagtactacatcggtcagaactccgtttttatccggcaccagcacgcttaccagaatcgcaccaaaatctgtcactttcattaccataccgtttttattggttaccgtatacaaagaaatggcttccccttttttcgttgttccaaaactctgtttctctacactcatcttatcctccattccagccgcttcctgattttctgccgagcaactatgtaatcacataaaaaaagagtcattttctgactcctcattttctttttttataaccccggagtgccgtttccctttttttgacgcctagcgactgctaggtgggtgaccgcagtatctcttttgtcttccgctgcgtaatgacggcctgacatccaatcaacaatataggagtcccataaacgtaaatgtaggttcaaaataaagagaggatcgtacaccccaggtgttatttcttattgtattataccctagtctatgttgtatttcaaggaataatgtacaaaaatatcaaattttcagcgaatatttagtttatttaataccaagaatattcttcacaacagcaggcatctctgccacctctgcaacggtattgtgacgcacttctgcattgcggatctcttcgatcgcgttcggtacagcaacgccggaaatctcagacagctgatcgatcagttcaaaatcacccatggaagcatatttgccttcatcaattgcttccatcacgcttcttgtgaacttatacgggcttgcggtagatgcaataacagttttagctgtatcaccggtttcttttgtgtatttaccatatacggttgcagcaacactggtatgtgtatcgatcacataaccacagtctttgtagatctttcggatcgtctccgcagtctcttcttctgtcgcatagtttccatagaaatcagccagctgtgctttcatctcgtctgtgatatgataagcaccatcttttgtcagctcttccatcagaactttatttttctccggatcatttcctgcaattctgtaaatcagacgttccaggttgctggagatcagaatatccatagacggtgatgttgtcaggataaattctctgtttctatcataagttcctgtagtaaagaagtcaaacagaactttattatcattggatgcacagatcagttttttgatcggcagtcccatattttttgcatagtacgctgccagaatatttccaaagttaccggtaggaaccactacattaatctcttcacctggctggatctgtcctgttttatacagatttgcatatgcgtatacataatatacaatctgtggaaccagacgaccgatattgattgagtttgcagaagaaaactgataacctgcatctgccagctctgctttcatctcactgtcgttgaagattttcttcacgccggtctgcgcgtcatcaaagtttccgcggatcgcaacaacgtaagtattgtcacctttctgggttaccatctgtttttcctggatcgggcttacaccgtccttcgggtaaaatacgatgatttttgttcccggtacatctgcaaaacctgccatcgctgcttttccggtatcaccggaggttgcggtcaggatcacgatatcattggtcacaccgtttttctttgctgctgttgtcagcagatatggaagaatcgacagagccatatctttgaaagcaatggtagatccgtggaataactccagataataagcgccatctgcttttacaagaggtgcaatgacatcggtatcaaatttctgatcataagcagactgaatacattttttcagttcttcctctgtaaaatcagtcagaaaacgactcattacttcataggcaacttcctgataagacatctgtgccagctgctccatgggaacctccagtgccggaatctgatccggtacaaataacccgccatcttcggaaagaccttttaagattgcatttgatgcagttactgtacttccatttcctctggtacttctgtataatacttccattctgtacactcctcacatatttttatgcttttatgtagtaaatcactatagtttagaattatagcacaggtcactttttctggcaatcctattttctcggatttccgatcgcaaaatatgcttccatcgtttcgttcaaaacat

SEQ ID NO: 2653 - DNA, 2039 bp, Unknown
  gut microbiota DNA sequence
atccgggaagttttcttcgatccattccggtatccggtctgcataggattcgtccacttctccaagaaaggccactccaaagttctgaagggttccttccatgctctggcgaaaagcttccagagacttctctgctttctgttcttctgtctcttctttcttttccggttttggagtagtctccggttcttccggctgttccggttcctctgtagtggaactgtcttttatttccggttttccggccttgttggccttgatgggaaccggttcggcatctccattctccgggagttctccatccgccgttcttccatttaccatgccgtctccgtcttgcttgtcaatacatccggtaaatatggtcagcgatgtaatgcagagcattcctgtaagaagggctctgagcaatatatttttatttttcacacatgtttccccctttataaaagatttcgagcgcacctaagatagatcgggattttagtgtattcatgccaaaacacctcgctggacagtggccactgaatagttactctttatttatcaaagcttcataggtgtgggacatcaggaactgccccggatcatcctcggtcatattttccatgatattctttaagctttcttttgaagcatcgtctccacgctccatgatatatttcattgcgatttctcttcctcttctgtctgcatcctgatccgctacgatatccagcatcaggttattaatttctgcctcatcaaaataggtggcttctttcttccagtcttcatagctggtgcccatgctggaagcacttctgaatgcgccaaccgttgtccaatatggaacctctccgttgcgtggcttctgtgacagataatctatcgttatgcggtatgccctttcattggtatatctatggctggggtaatcataccacatataggtcagggaagtgatgcacgcatcgtggaactgaaccagactgctgtccttcaaaacttcctccagcggatcgatcacccggtcatcgtggagccttccggcatacttatatgcacacgttcttacttcctcatcctcatcccccatcagtttgagaatggcatctaccatgccgtcaatgcccatagcccattcagatcctatagcaagggctgcctgtttccgtacattggcattctcgtgctcggtcatattcaaaacgaactctgcaaccgccggattgctcacggcacctccaagacttcttaaagcggcaaataatactacaggttctgtttccttggccagtacttcttctgccatcttttcttcctcactgcttgtgccaaacaggcctccgatcgtggtgaatgcataggcgcgaacgttggcattttcactgtggagcatgttatccctgattgttgtggtatatggaatcttgcatccatcatccttgaggattttgaaagcctcatcggtaatattttcttctctgccataaaagtcttctgtatagtttgtataagcatatgtagaataaagtgccagtgcttcgtcttctgtgatatttttcacgtctttgatacgatctatcagatcctgagcagacatactttcatattcttttttcgtaacctgtgccggttcataatcatcgtccgagaaatctgtttcgttctcggtatccgtgtctttatctgaatctttggtttctttgtcctcctttggtaccggtgttttgggcggagcatccgtttcggcagaatcgtctccggtatctgtcgtttctactcctgaagttgtgtctttatccttgtttccgtcctttccacagcctataggcatcgccagcatagctgcgatcagcagcatgctaataacttttttccacatcataaagtttcctcccttcgtttctgcaaaactttttctatgattgaccttaccttctctataattatattaaacaatataaaaccagttttcactattacttgtgttagttaccgatagttgtttgtctgtttcctgtcagaaaatgtttttacagttaatttccgcgaat

SEQ ID NO: 2654 - DNA, 1781 bp, Unknown
  gut microbiota DNA sequence
atgatataatgtacgaaagagactagattatgacgacagaataaggagaggttaacatggaaatacaattatggcgtgaaatactcagtccctacgaacaggcagtgacagaactggtggaaaagttccagcatctgagtctggagcacagggaacggggattgtattctcccatcgaacaggtcacagggcgtgtaaaaagcattaccagtattctggaaaaaatgaaacgaaagaaaattccgtttgaggaaatggaagaacaggtagaagatatcgccggcatccggatcatctgtcagtttgtggaagatatccagcgagtttcggatctgatcgccggtcgttctgacatggaaatcaaatgtatcaaagattatattgcacaccagaaagagagcggctatcgcagttaccatctggtcatttattatcacgtggagacgttgaatggaccaaagaagatccaggcagagatccagatccggacgatggcgatgaatttctgggcgacgattgaacattctttgcagtacaaatataagacaaacatcccgccgcatgtcaaagagcggcttgccaacgcagcgcaggcgatcattgcgctggacagtgagatgtcttccgtgcgaaacgagatcatgaacgcacagaactcgtctctgatgcagcggaatctggtgatggacattttacagaatattgaaaatctgtatcagaagtccaaccgcagagaggtggaaaagatacaggatgagttttaccggatctatgcatccaacgacttgcagcagctcaaacgtttccatcaacagctggatatcattgcagaagggtattgcgcccaggcagtgacgagcgagggatgggatcagaacctgtagatatcagcaaagctgcggagcaatccgtggtatcaaatgagtatcaaaatcacgattacgataaaaaggaagaacacagatgcacttacctgagaaattccagaaggagatggaaacacttctgggggatgaatatcaagcatttatagaaagttatgacagacagccggagaacgggttacgtctgaatcgaagaaaggtgacgggggaggagttcctggctcggacacctttcttgctgaaacggattccgtggatcgataacgggtatacttacggggaggagacaccggcgaaagatccgtattattacgcgggactgtattatctgcaggaaccgagcgcgatgacacctgccaaccgtctggctcccgaacccggtgattatgtgctggatctgtgtgcggcaccgggaggaaaagcgaccgaacttggcgcgagactgaacggggaaggactgcttctggcaaacgatatcagcaacagcagggcgaaagcgctgttaaagaatctggaactgatgggaatccccaatatttatgtgaccagcgagacctcggagaagctggcgaaggtgctgccggaattttttgacaagattctggtggatgcgccgtgttccggggaaggaatgttccggaaagagccgcggatgatggcggactgggaacagcagggaccggaatattacagcaaactccagcgggagatcattctggatgcggcagatatgctgcgaccgggagggaaacttctgtattccacctgtacgttcagtgagctggaaaatgagggaacgattcagtatctcctggaacagagaccggagatgaaactgatcccctgcgcgccgtatgaaggatttgccaaaggacgcagagggctggaagactgtgt

SEQ ID NO: 2655 - DNA, 877 bp, Unknown
  gut microbiota DNA sequence
atgcgggtattcaaggcaactccgtccacatacagtgtagcaatcgtatcatccacgataatctgtacatgatatttcttccccggaaccagacgaatcagacgttccagtcccatattgttcatctgcggccatggccagttcggagatttctcgaagatcacacgatccttcgggcattcaaatgtgaaagaatagaattcatcatctgcttcctgcgcccgtacgccaacggagaatccacgtgttccctcagtaaatgtaacatctgcttcgtatcgatagcagtcaccggtcttcgttactacatgctgtaatgctcttcctgattctttttccagttttacatcatccagctttttctcatcctgaaacgcattccataccgtatccgggatccggcagcctaatgtgccgtcttctctctggtacagttcatgtgctacaaaggttcctgcccagataaaatcttctttatctgcctccggtctgtaccagagatttgcactgtctgtctcgttggcacgtgtcggaacccatccgaacagaatcctctgattgttcagcatgaaggttcttcctgcataataagctcttccgtcaaaagcatcgtcatccggtgcgatccaaggtcctttcaggctttttgccatacggtacacctgtgtggatgcatgggaatattctgttgtgatcagataccaccagtctcccatcttgaaaagatccggcatctcatgcatcgtaaacagatccggcgcccagaaatccccctggaactcccagtctgcaagattatctgatgtaaaataaacggttcttcctgttgttttatgcttgtctccttccagacgtgcccccaggatcagaatatatt

SEQ ID NO: 2656 - DNA, 1275 bp, Unknown
  gut microbiota DNA sequence
tagcttaccacagtgttccacccggtgtctaccagtgcgatcacatctcccgtcgggttcaggatgtagtagtaatcttttccgtcacagttcatcgaaaacagggttccatccgcatcatagctgaaggtcatctcatacagcggtttctcctggtcttcccgcaggtgctgttccccgatgatctgtccgtcctgtacctggtacaggaccgttgtcccatccgacagatacttccgattgcgcatcccttctttgtcgtagcggtaccggattgttgtctggtcttttacgatctccgtcagttcactgctgttcttccagcccatctccatcctacggtatacggtcggattccccatggcgtcatacgcaatggtttccccgttatacgatgtcagctggtccttccagtttccttcgtaacggtagatctttgtttctgacggggtggcggacgctaaggtctccatagcggcatccggctggtattcgtatcggtttttccgtaacaggttgccatttttgtcatacgcataggtgatcgtctgcctgtctgcctcccggtcttcccggatcagctggttacgggtatcgtaagtgtactggatctttccttttccgtctgtgatctgcgtaatgttcccattcgcatcatactgataatggatctcataattgttctgcaaaccttgccaggaaaatcgttccaactggtcggattggctgccatctgccctttcccgataaccatactgaatcctctgttcaaagatctttcccagtgcctttgagacaaccctgcctaatccatcataaaatactgcttccgtgcactccccgctcgtcacaccgatcgcacggttgtcccggtcgtacccgtattccagtgccgttgcacggtaccggtttccctgatccactttctccacgttgtcattcaggtcataggtaaaccgatagtcctcgtcccggtcgttccggtaatagacaagtcttcctgacaggtcataaaaacatcgggtctcgatggtttcttctcccaggtcttcccggatatcccgtaccaccgcaaggtttccttcccggtcatacgcatactcatacagccggtattcctccccggacgggtctgtcagacggatcccggtcacccggtccatatcatcgtatgtatactggtagacatagccatttccatacgtttccgccagcaggttcccgtttttttcctcataggtctgtgatactcacccttcacacaaaagatcagat

SEQ ID NO: 2657 - DNA, 1247 bp, Unknown
  gut microbiota DNA sequence
ctcataacttgccttgtaaaaatccgtaaaatgctcatacatcagaaacgaccggtttcccgtcagcatcaaatccccatacgcacaggtaaaaaacagaaacatcaggatcaccgctgagatcacccagtccagcttattcagttcttccgcatcccagagtttcatgctcttccagctttcttttgtccgttcccaaaatccgggcttacgctttgccagtcttgctttcattttcactgtcctctttctcttcaaaattcagtctctcttcttccacgaccagcggacggtccagcacacgggtattgatgctcagcacatactcacccagcagaccgatgaaaaacagctgcattgctcccaggaagaacatgccgatgagtaacggcgccatgcctgccgtaaaccgatcccagtacagcagtttcaggataaaataaacaatccccgccaccacgctgataccgcctacgataaatccaagaaacgtagccatccggagaaccactttcgaatacgaagtgattccgatcatcgcataatcatataaactgtagaaattatttttactctttcccgcttttctcttctgctgctcatagggaatcgccgtatagtcaaaaccgagttctgcaatgattccccgcagatacggcatcggatcatgaagatcccgcaccacatccacaaatgctttatcgtacagaccgaaaccggtaaactgttcgatatggtcgatatccgtgatcttccggatcaacttataataacatccccggatccagtacatcatccggttttctttgcttgctttcttgatgccgatgacaattttggaacctttttcccactctcttacaaactttacgatcatgtccaccggatcctggaagtccgcacacatacggaccacacagtcacccgtcgcctgtttcagtccgtagaccggtgagcgcagctgcccaaagtttctggcattgaagatcgccttgatatttttattcttcgcacacagttcccgcagatacatccgcgttctgtccttggaatggttgtcgataaacaggatctcataccggtattgcggcagttctgtctccatcaccgtgacaatggcttctgccagaggttttacatttccctcttcattgtatgtgggtattaccacagagattttctttttcatttgtctctctccttcatccagcggatcatctcccggatcccgctggaaaattcatacg

SEQ ID NO: 2658 - DNA, 1567 bp, Unknown
  gut microbiota DNA sequence
gtgtgctgaaagataatctgctgagtaattatcagtatattttacagatcccggcggaggcgatggacgaagataagaagctggaaagtctggtacagatgatgtatgtccagagccagatggagacggagaacgaagatgcggagaaattttccgcgtactcgctgaatacgctcggagatcagtataagagtgaagaagtcatgctgtatggaatccagccggacagccggtatgtgcagatcccggaagaccaaatatcgaatggaaatgcatatatttcttctacctatgcagacaagtatcagctgaaacagggcgataccatcacattaaaagaaaaatacgaggacgatcagtatacctttaccgtcaatggcatctatgattatgagggcggacttgccatctatctgtcgcaggattccctgaataagacctttgacctggaaaaatcgtatttcagcggttatttttcggagacgccgatcacggatatcgatgaaaaatacatttccacggtgatcgacctggaaagtcttacgaaagtcagccggcagctggatgtttcgatgggaagcatgatggggctggtagatgcatttgcagtgttgatgtttatgattctgatctatctgttgtcaaagattatcattgaaaagaatgcacagtcaatctcgatggtcaagatcctcggctacagcaaccgggagatcagccggttatatatcgtatcgacatcgatcatggtggtactgttcttgctgttgagcctgccggtggaatactgggcaatggtatatctgttccgggcggtgatgctggagagtatcagcggatggattacgttttatatcgagccagccgtttatatcaagatgttccttctcggaatcggaacatatgcggtggtggcagcgttagaataccgcaggatctgtcgggtaccgatggatgaggcactgaaaaacgtagaataatgtacgctcggaatctttctgtgcctgattttgtgaggtgattttttgtcagttgtgcccaaatttctgaggcgtacgttgatgaaattcgggtgcggatggcgaaaaatcagccacaaaagcaagtgcagaaagattccgagagtacataataaaagaatggctgaaaagggagaaaaaagatatgaaaaataaaatcaaagacaggattctccgactgactctgggcgttggcgtggctgcggctgtgggaatgaccggatgtggaaagacagatacctcatcggacagtgcgcagactgcgaagacagaagatgccaaggaggcagcggacacacaggaagtatccaaaacttcggatgatacccaaaaaaaggataccgaagaaaaagacaagacggaaacggtctatgtaaaaagcgatgccaaaggcaatccgagagagatcaccgtacagacaaagctgaaaaataccagcgacggcgatacaattgaggattacacgaatctgacggatatcaagaacaaagaaggggacgaagcctttacacagaatgcagacggcaccatcgagtgggaaaatcacg

SEQ ID NO: 2659 - DNA, 1232 bp, Unknown
  gut microbiota DNA sequence
atgtcaaagccgatcggtgcgtatcagctgggagaagcgtatgcacagagtatgggtgtgaacatcaaatttttccgaattatgctgattctgacgtcgagtgtgctgtccgcctgtgtgaccgcattcgcgggaccgatctctttcgtcggaattgcggtaccgtatctggtaaaacgcagtctcggaacttcaagaccactggtcgtgatacctgccaccttcctcggcggcggtgtcttctgtatgatgtgtgatctgatcgcgcgtatggcatttgcaccgctggaactgaatatcagtaccgtgacttctatatttggtgcgccggtggttattttcatgatgctgcaccggaagaaaggaaactgacatgggagaatattattttcatctggatcagctgacggtgggatacaacggaaagcctctgatcgatcagattcaggtaggtatccataaaggagagattgtcacactgatcggaccgaacggatccggaaaatcaacaattttaaagagtatcacccgacagctgaagatactaggcggtaaggttttgtatgaagaaaatgatctgcacaagctttcttacaaagaactttccaccaggatggcggtagttctgacagaacgcatgcggccggagctgatgacctgtcatgatatcgtggcaaccggtcgctatccttatacaggtcgcctgggtatcttaagccgggaagacgagaataaagtggatgaggccatgcggatcgtccatgcggaagaactgggaagccgggattttaatgccatcagtgacgggcagcgtcagagagtccttcttgcaagagctatctgccaggaaccggagatcatcgtgctggatgagcctacctcttttctggatatccgtcataagctggaactgttatccattctccgctctatggcaaaagaaaagggcataactgtgatcatgtctctccatgagatcgatctggcccagaagattgcagatcagatcctttgcgtaaaaggagatcatgtctgctattacggaactccggaacagatctttgaagaacagaccatccgggaattatacggaatcgaaaatggattctatgatccaagatttggcagcattgagcttccaaaggttgagggggagccggaggtcttcgtgatcgccggatgcggaaggggaatacccatctacagaaaattacaaaaggataatatcccct

SEQ ID NO: 2660 - DNA, 261 bp, Unknown
  gut microbiota DNA sequence
gatctttttgaatggtatttctcctacttgtcattcgtcctccttattaggattagttcttaataaggattatataccactattatcctgtcgtcaataaaaatagtaataattctcattattataaaagctgccaaactgagcatcttttatctgaataactattttattttgcgttcaaatacatattctgaatctgaagataaatcagacctaaacgaatatccgagtctgtcaaatttctgaatctccaccggattt

SEQ ID NO: 2661 - DNA, 8876 bp, Unknown
  gut microbiota DNA sequence
cgaactccgtgttcgcggttcccgctcctacagcaggcactttgtagtatccggaggaatattcctcactcaatttccggaagttcggaatcggatcctcggaaaaagaaaggaaattcacttccgttggatcgatgaatgtctccagctgtaaaaacaggatattgacatccgtgttcttttccttggtcttcttgatctctccttcgctgtccacgatatcttccatcagtgccttggaatatccgttcggctcactgataccggtatcaaagatcgtaactgccagacagtacggatatccgtaatcctggtacgcataagcgatatttccaaagtacgtcgataacagccggttatcgatcgccagcttactggtcagtacaaaagctgccacaccaagaagaattaacgggatattcagccagtaacggatctttccctgaaacttccatcctttccgaaacatccagatgaagaataacaccaggatcccaagtccgatcagtactgccactaccagccccggtgacagatacttgttcaggatccgaagagcatcactgagcagtttcagatccggtccggtaaatggcgttacacggtttaacagcaaaaatccgttcacacatcccaggagaaaccagaaacatcccacgatagttctggcaaggattctgtgtttaaacagatataccacaaggcttgtggtaaaaattaaaaatgcattgtataaaaagatcagaggacttccggtcatatactgccaggcttcccagagggaatgacgggaaagcgcctcgattaccagatacagtacacagcaccccagaaactgcaggggtactgacaacaagttacagatccgaatcacctgattgcgggtaggttttttcagattgatttttttcatgttttctttctgctcctatctgctgcgtaaatacagaagcgtacctgaaatctcatcgtattcagatacgcccctaaaatcggtttgaaacacgcgctacatgttccgaaccgatatcacggcaatcgtcagtgtctcatgtgattgcatggactttgactcgttgctcgcataccttaccgcagctgtgccagtctttcttttacctgttccatcatctgtgtgtatttttccagttttcctttttcctcatcgatcttagcctgtggcgctttgctgatgaaacgttcgttgctcagcatgccgttgacacgggctaattctttttccagacgtccttcttctttttccagacgctggatctctttttcaatatctaccagttccgcaaacgggatgtagatcactgcctgcgggatcactgcggatactgcgtcctctgcgataccgctcttgtcggtctgtaccagaacttcgcttgcagatgccagtgttgcaaagaagactttacctttttcaaaggtttctcttacagatgcatcttctgccactacatatacggtagctttcttgctcggtggtacgttcatctcggtacgcacgccacggatgcttctgactgcctctttgatcatctcgacatctttttcatcctgtttgaaatcccactcggttttccattccggccaggaagcgatcatgatggattcttcttccggattcaaagtgcagtagatttcctctgtgataaacggcatgtacggatgcagcagtttcagtgcgccgccgagaaccgttttcagtgtccacaatgctgctgcttttgtggtatcctcgtcattgtacagacgcggttttaccatctcgatgtaccagtcgcagaattcttcccagataaagtcgtatactttctgtacggcaatacccagttcgaatttttccatgttgtcggtcacatcttttgccacatcgttgaacttacacaggatccatttgtctgccgctgtcagttcggacagatccatggaagccggaacttctgctttttccaggttcatcatgatgaaacgggaagcgttccatactttgtttgcgaagtttctgctggattccacacgctcccagtagaaacgcatatcgttaccaggtgcattaccggtcatcagagtaagacgcagggcgtccgcgccgtatttgtcgatgacttccagcggatcgataccgttacccagggatttactcatctttcttccctgagaatctcttaccagaccgtggatcagtacatgatggaacggtgcttttccggtctgttccagagcggagaataccatacggattacccagaagaaaatgatatcgtatccggttaccagtacgtcggtcggatagaagtattccatctcttcggtgttgtccggccagcccagtgtggagaatggccacagtgcggaggagaaccaggtatccagggtgtcttcatcctgatggaaatgattctttccacatttcgggcagatcttcggcatctcttttgccactacggtctcgccgcagtcgtcacagtagtaagccgggattctgtgtccccaccataactgacgggagatacaccagtcacggatgttttccagccagtgcaggtaagtcttgtcgaaacgttccggaacaaactgtaaatcgccgtctttcagggtgtcgatcgctgcttttgccatctcgtccatctttacaaaccactgcggtttgatcatcggctctacggttgtgccgcaacggtcatgggttcctacgctgtggttgtgcggtactacttttaccagcagtcccagatcttccagatcttttaccattgcttttcttgcttcgtagcgatccatgcctgcgtattttccacccagatcgttgatggttgcatcatcgtttaggatattgatttcttccaggttatgacgttttcctacttcaaagtcgttcgggtcatgtgccggtgtgatctttacacatccggttccgaactctttgtctacatacgcatctgcgatcaccgggatctcacggtcggtcagaggcagtttcagcatctttcctaccagatctttgtatctgtcatcttccgggtttactgctactgcggtatcgccgagcagcgtctccggacgggttgttgcgatctctacgaattttccttcttcaccgactaccgggtagttgatgtgccagaagaatccgtcctgatcctcatgctctacctctgcgtcagagatagaagtctggcataccggacaccagttgatgatacgggatcctttgtagatatatcctttgttatacaggcggataaatacttcctgtactgccttggagcatccttcgtccatggtgaaacgttctctctcccagtcagcggaagcacccagttttttcagctggttgatgatctttccgccgtactcttctttccatgcccaggcatgttttaagaattcttctcttccgatctcatttttgtcgatgccctgctcttttaatttgttgataaccttaacctctgtagcgatcgctgcatggtcggttcccggctgccacagtgcttcgtagccctgcattctcttgaaacgaatcaggatgtcctgcatggtctcatccagtgcatgacccatatgcagctgtccggttacgtttggcggcggcataacaatggtaaatggtttctttgctttgtttacttttgcatgaaaatagccgctgtccagccatttctggtataagcggtcttcgagtcctttcggatcgtaagtctttgccagttctttgctcatggtcgtctcctttgtcttttttgaagattagaaacgccctccactcagactctcatctgtgtgaagggcgaatgtctcgcgttaccaccttgcttatatggaaatacaaaatctccatacatctcattatccgataacggggatcagccgtgaaagcttactgattttctgcctgaaaaacgttcagtcttccggttccaaagctaccttcgatatcgtctgccggggacctctctcagccacgaagttccctctctttgcggggtacggtatctactcctctttgtcactacctttttctgttacctgttttcaaaacaaataaggctgacattactatagtaggctttttttcttttgtcaagttttttgttgatagcaggatcaaaagttcggaaatctgacgcaagcttgcttgcacgaagatttatgaacttgggatccgccaaagcattcgcaatccggtatcaaaagggcaaaatgctttttgccccaacatcttttaccgaatatcgtaaacgcttcgcagtttcagaccgtccgcaagctgctcttttacctggttctcccagtctgcaggatcttccacttttcttgaggctttgccaagaatctttactctcttttcccccgcactcatatcaaaatagttgtccgacaggatcagatcttcggacagattcaggatctccacgcctttcgcgtaggctttcgcgctgactacaatctcgtctccctcgatccgatatgacagctgcggatccagataatggaagtacttcggataagagaagatcacgctgccctcagagatgcaggtatcaccctcccatgcctcatagcttacatactggccgaatacatccacatccgggtattcttctttatccagccatacactggaaagtgccggcaccgttacttctcgctcctctgctttcacaacagatgcatcggcgtttcgaagtgcccattttaccagaactttcttatcttccagggtctcgttggtcacattcaggcggatagatttttcatatacaaaatgttcacggttcatattcgcttctgcagtcatccagttctgttcttcacaggataccatcaccggtgcaaagaaccgttttgcataataatgcagggctttccatcttccctcataatctaccgatgcccaggaagctaccggccagcagtcatttaactgccagtagatcgcacccatacatctgccgcgatttcttctgaaatgttctaccccgtacttgattgcttccgcctgtaacatctgggaagcatacaataacgtggtaaattcggtcggatagcggaaggtctgctgcagataattcaggatttttccgtttgcgcctgcatttctctggtgtttttccatgacataagagaaaatgttccagtctgccggatcgtcggtaaaggttttgatcgtctcgagagacgggaaggactggaaaccaaattcacttgcatagcggaaataataattccggtaatccgagaacggtttgttgccatgccatacatcccagtaatgcacatcgccacggttcggatcggacggatcatcgaagcagccgcctgaagacgggcttgccggccagtaaaacgtttccggatcatatttcttcagaatctccgggatcacacgctcatacatgaagagataatcgcgcacctcgctcggtttcgttacccactcgccctgttttacgaacatttccatctcgttgtttccgcaccacagtcccagggacgcgtgatgacgtaatctttttacattatcaataaattcttcccggatatttgcctcaaagtccggtgtcagatcataaaccgcacacgcaaacataaagtcctgccataccatcaatcccagttcatcacacagatcatagaaccagtcttccggatagtaaccgccgccccatacacgaaccgcattaaagttggctgccttacactgttcaagcagttttcttgtcgtttccggtgtcacacggccgagcaggtggtcttccgggatatagtcggcacccattgcaaagatgtcttttccgttgacctgatgcgcgaagctctcaccccactcgtccggatggatatccatcgtcatcgtgcgaagaccgatctttctggtccagctgtccaccggctgtccgtcttttgccagcgttacggtcacttcatataacggctgttcgcccacaccgtttggccaccagcgtttcggctgttcgatcaccagagcttccggagaatcttttgcaatgatctccgtaccctccggtgctttcacagttacttcataggtatagccgtctgcctcttttcccaccgggatctcttttctgagatcttctttcggatttctgctcacatccagcttcagcgttactttttcctcttcgtgttcctgacggatatacacgctgtcgattctgccctcggtcatcgtcagcagatacaccggacggaaaattcctgcatccggcagatgagcaccccaatcccatccgaacatgcagtgtgcttttcggatatgtacaaatccgtccatcgcatcttcgcttccgtgtgtcggctgtttttcatacgcttctttaatatattccaacggggaatggaaatacacacgcagtgcattttctcctgttttcaccttgcctgtcacatcgaactcccaggttctgtgcatgttataggtgttgccgatcttttcttcgttcaggtaaacatcgcagatcgtgtccagtccttcaaaacgaagccactgtttttcacctgcctgtgcttcgactccctcgaatacggtctcgtactcgtaatctttttccatcagatccagagccttgtattcattgtctttccagaacggatcttccatctgtccgtttctcaacagatccgtatagacagttcccggaacctgcgccggataccactgcgcatcgcccgcagtatgcatcttccataccgttgtaaacggctgttttttcgttgtaaaaccctccatattacgcctccatttatatttttctgtagctgttttttccagttacttttctccctcagtgtaccatgaagttccggtgctttcaattgcaaaaagttatttctacatgcaagtatgttgaacgtgcaacgagataaaatatgcttcgcgaattttgctcacgtaaaaaaaaagaagcccttgcgggcttcccttctcaaggccaaccggatgaaactgctctgctcctgcacaagatccaagaggaatctatatcacttggttgcggaggtaaatgatacagtagatccacagaaccagagttccgttcatccctgtcgtttaatcgtgcataaattcaaatagtcaaggtctcgaaacactacgctcctgtttcgaccattccataagttcgcattttttgcaagcagaagaaacttacttcacaagttccttctgctatcgcggcagtcgccaagttctcacgtaaacgtggactttggctcgttgtccgcgtaaaaaagatgtcttttccccgacagaaagttgacatctctttttttcaaacaggatgtaaaactttactcggaagctttaaccttacgacatacaagcaggtttcctgacttacagatcaacagtcggccctccttctcataccttgcggtacaatggatcctaccgggctctcctccctgattacagtgaccggatcgcacaggattctcacctgaattccctctctcaccggcaaactttgtttgcagatgcacttgatatgttactatggaatttatacaagaaatatattaacactttgttactttcctgtcaatactccgttaggaatgacttattccttttattcatggattgatagataacagtatcaaaatctcatcaaaatgcatcccgggaaagctacggccgcatcgccagcactgcccccgccggagctgtgatccctgctccctggttcggatgcaggatcgaatagcagacatcgatcagaaaaagcgcgagcaaaagaaatgcaataatttcctcgtttctgccctctttttttccaagccactgattaaatctcggtgcgatccagtacacgatggtaagtccgccggttccgaagatcagaagtccgatcagactgactcttccctgaatctgaaaggtatattcccggtaatcccaccagcgggtatgccagatcgtctccagcgcccagccggtcaggtattcgatcgttccgcacaccagcatgatcataaaaaataatttccccggccgctcaaaaaaatgccgcagtaccagcaggatcatcacaccgcccacgccatagatcggaagccacggtccgaacagcatgccacggttgataaaacggtgatcgatcaccagatgatatcccacttcccagcaccatccgataaaagaaaagaaaaagaacagaaagatcagggaaagcggcgaatagctctccgctgccgaccttttcacatcctgttgcatccactgtctgtataccgctctcattctgataccctcctttttctgtattttcactgtctttaggataccagaatacttttgatattattgaaaggaaaacaaaagaatttctgaagaaagcaggaagaattttttacatagcatcaattttcttcaaagtaaaaatattcggaagagaacacggaacctttccatgcctctccggatattcttatgcttattcttctgtttctttttctccatagaaaccacatccgtgttttccatgttctttgatctgatacagtactttatcggcatctttgaaaatgctctcgcccgggttttcccggtcggaaaatgcaacgcccacgcttaacgacactgccggaagtccgtctgtcggttccgagagttcctgattcattgcggtaatcttttcctgaatcgtatatttcagatcactggtcatctcgaccagcacaatagcgaattcatcgccaccgattctgcatacatagtctacgctacggaatgcactctttaaaagactcgatacttttttcagtatcgcatcaccggttgcatgtccataggtatcgttgacggatttgaagatatccacatccaccaggcactc

SEQ ID NO: 2662 - DNA, 893 bp, Unknown
  gut microbiota DNA sequence
tctgccagcgtgcctgatagatcttgaatttaacgcttgccggatagacattgaaaatgtcagtcggtaaacctaaaatgtgcatgataacatcttctgcggttgcagtatcaaatacaatgctgatgtaatcaatcttaacggataaatttttgtgtgtagttatagtgcattactcctttcgtacttcccgtttttttgcgaggtaaaaatcgtgttttttcctttatttatcacagtttctaggtactatgacatgtatgcgcagggcggtgttacatatacgccctttacgaacgcctaaaggcgttccctttcttcctgtgtctgccccgttcttaacgctcacgagccttgtaaggctcgtggctaaacggaacagcccagtcagaaacccgattttcagtctgatagtccatgcctattcatgctatcaaagtgaaaatatctattctatatgcttactcaagcgtgtgattgaccctagcgtgcttaatcgctctatccaacacgataataacgccattagaattacttgtcaagaagtttttgttgacttttggatatagattaagtatgatatgcttataaacgtcaaaaaaagcaacgaaaggagcggttatactaagttatggagcattatgaaaagaaaatcagtttcttaggagagaacatacaaaccataagaaaatacagaggaatgaaacaacaggaacttgcggacaaaatcggtatcaatatgcagagcctttccaagattgaacgtggtgtgaattatcctacctttgatacattagaaaagataatggacgtgctgggtgtaaccccaaatgaattactgtcgggagaatggaagtatgttaatcaagccgaaaaggaagtctgccagtttt

SEQ ID NO: 2663 - DNA, 1212 bp, Unknown
  gut microbiota DNA sequence
ataccagcctcttttgttgataccacgaacattttcacccagaccatagacctgatctttgtcttccatggtgtaagacagggtcattgcctgctcatccacggtaaaataaggcagtacgccgttttcctgttccggtttgtttaatacggcttccgtttcgattacgtttccatacacgtatctgcgaatcatagttttcttacctccataactcgttagtacattctccataacggtccaatttctttacatttgaacagttatctttctttttctttagtatactggataatgcagaaaaaaacatgctctattttaactgaaaattgccttattttgactttccgggatctgtcggccatctgtttccatagaatagttctcttttacaatcatctgcgacacagttaccgcctcatatccctcttctttcagctgtggatgcagcagcgataccatttctccggtattttctccttctgcgtggaagcggagaatctcaccgtcccggagcgtatgggtctgtaacatctgttttacctgattctctgccccgtagtctttccagtccagactgtcgatactccacgccaccgggtagcttccacaggcgtagaccgtgcggagaacttcattattatattccccgcccgggatccggaaaaatacgcacggttcctctgtgacagttccgatcgtctcccggagcgtctgaagttctttccgacacgctctcgccgtcatctgctccacgcatacttcctgttcgctcagtccctggatctcatgcccctgctggcagatctgtatcgccagacttctgttattttcgatccaggatgcagtagcaaaaaaggtcgccggaatctcctgctgtctcaaaatctgcaacagctgctctacctgttcctgcttttggctcgttccactcagttcaaaagtataggcaatctgctttttcccggtttccacagaacagatggggaattcctgcccgttgacgctggtacttgccgtgactaccttttctcctacatctacccagtaaaaaacggacagcccggtgatcagcacaagcgcaaggatcaccacgccccacattcctttcttcatattttcgcacccgttcccccggtgttctctctttactatatggatgtggaaggtgttgtatgactgccagaatttcctgtaaagtgaaaaagctgc

SEQ ID NO: 2664 - DNA, 593 bp, Unknown
  gut microbiota DNA sequence
taaattgtcttaccgctctttgctgactcatagattgcttccagtacacgggtgacaactgcagcctgtgcaggttttactacctgttcagctccgtcagcaacgatgtggtagaacagttcttgttcataatcccctgccggtttttcttctcctgagaagaatgctactccttcgccggataatgccggtttctctactacctgtttattgtggtggatgtagttgatccgcaggccgtctttcatatctgctccggcttttgttccgcacaggcttgtcttggcctcatcaacctccagtgtgttcagtgcccaggctgcttccagctcgatcactgcaccgtttttcatacggatgaatccgaaagcggaatcttctacacagaattccttcggatcccagtctccaaaggcatttccctgattggtctgatcagccagtttgtggaaggtctgtcctgttacagattctacttcatagttgtccatcatccataaggtcagatccagtgcatgggttccgatatcgatcagcggaccgccgccctgttcttcttcatttaagaatacaccccaggtaggaactgctct

SEQ ID NO: 2665 - DNA, 714 bp, Unknown
  gut microbiota DNA sequence
ggttgtctccaccgcatgggcgatcagcgcccgaatccgctcttcggtttctgcgatcgatgttccttctttccatgcccgccggatctggtcataatatgtccttacctttttcccttttaaggcatccagcagccagaaaccaaaccatctgagtttttcgtccagtatcattgttcttccttcctgttatacaagcgcttctttgatcgcatctgccatggcatccagcatcgcatctgtcattcccggatacacaccgatccagaacgtatctgtcatgatccggtctgtattttccagacttcctgccacacggtagccttttcctgtcgcacgcatctggtcaaagcacggatgtttgatcaggtttccggcaaagagcatacgggtctgtacgcctttttcctcgatcttttgtaccagctgatttctgtccacaccttcccggcaggtgatcagaaaaccaaaccagctcggttcagaattctcacatgcctccggcaggatcagtttgtcttcggttccttttaatgcttctttcagatagttaaagttatgaattctgcgttctacaaaggacgggaacttgcgcagctgggcacatcccacagctgcctgcatatccgttgctttcaggttgtatccaaaatgagagtacacatatttatgatcgtatcctaatggcagttctccatactggcggtcgaaccg

SEQ ID NO: 2666 - DNA, 620 bp, Unknown
  gut microbiota DNA sequence
gcatttgccgcagtatccaatacgatcaccggtgtggtagtaggtggacttctgatcctggcttacacaaagaccattgccaaaaaaggatccctggatcaggaataaaatcagttgctgattacgaaaaagctttctcataaagtctcagaggcttgtgaaaaagctttttcttttgtaaatagtaagacgaggtagagaaaaacgtgacaaacaaacaatcccctgttatttcattcaaaaattattcctttcagtatcgtgcccagaaacgaccgacgttaacaaatatcaatctggatatctatccgggtgagagagttctgatcgcaggtccctccggttgtgggaaaagtactctggcgggctgtattgacggactgaatccttgttccaatccgggcaaagccaccggcgaactgatcatcgatggggtggatgccacaaaaagcagtatttttgagctttccgctcatgtgggaacggttctgcaggatccggacggacagtttatcggactgactgtaggagaggatatcgcgttttccctggagaacagctgtatgccccaggatgagatgcatcagatcacgcgaaaagtagcagaactggtaaaaatc

SEQ ID NO: 2667 - DNA, 2256 bp, Unknown
  gut microbiota DNA sequence
ccggtgttatggtggatcaggtgaagatcctgttatttgatgaaccacttgccaatctggatccggcaaccggaaaacagacgatcgagctgatcgatgagatccagaaagagaccgacactacggtagtgatcatcgaacatcgtctggaagatgtattatggagagatgtggatcggatcatcctgatcagtgaaggaaggatcctggcagatctgcatccggatgagcttctggcaacggatcttcttgttgaaaatgggatccgggagccactgtatctgactgcgatgcgctatgccggaatcacgctggcaccggagaaaaaaccgtcccatgcagacacggttacactgccggaaaatgatgtaaaacaattacaacagtggttccagtcacgcggggcaggaaaacaggagacagaaagcgaacctcttctggaagtgaaaaatctgagttttggatatacaaaaggagagcgaacgcttcaagatgtaagcctgacgatccgaaaaggagagatggtcagcatcgtaggcaagaacggagccggaaaatcgacattttccaaactgatctgtggtttcgaggatccggatcagggagagattcgctttgcggggaaggatctgctgacagaaaatatccgtcacagagcaaaacatatcggctacgtgatgcagaatccaaaccagatgatttctaagaccatgatttttgacgaggtggcactgagtcttcgcaatacaggaatggacgaggctgcgatccgggagcaggtggaagagacgctgaaaatctgtggcctgtatccgttccgaaactggccgatctcagcactgagtttcggacagaaaaaacgtgtgaccatcgccagcgttctggtacagaatccggaattgatcattctggatgagccgacggcggggcaggatttttatcattatacagaaattatggaatttttgcgaaaattaaatgaagagggtgtcaccgttgtgatgatcacccatgatatgcatctgatgctggaatatacgccgagggcgcttgtatttgctgacggacggctgattgctgatgactgtgcagctgcagttttatgtaatcaggagctggttgaacgggcagcgctgaaagaaaccagtttatttacgctggcaaaccgggcaggtatcgcaccggcggaagcctttgtggaatgttttatcgaagaagatcgggaggtacgcagccatggccgctaataccgtattaaattatctgccaagagagagcgtggtacacaagctgacaggaaccacaaaactggcattttttctgttatttactttttccagcatgattacctacaatacctgggtgcttctggggcttttcatagtaagtatcgcagcatttaaactcagtaagatccgattcagagaagttcgttttatgatgattttcatgctggtctttttgctgttgaataacctgtttatcttcctgttcgacccgaatcagggaactacactgtacggcacccgccatgtgctatttcacctgttctggcgatatgatgtaacggcggaacagctgttttatatggcaaatatttcggttaaatattttgtggcactgccggtagcgatcctgtttatctccgcaaccaatcccagtgaatttgccgcgagtctgaacagcatcggtatttcctacaaagtagggtattctgtagccatcgccctgcgctacatcccggatatccagcgcgactaccacagcatcagccaggcacagcaggcacgaggcgtggaacttggaaaaaaagaacatttttttgcaagactgaaaaactccgtcaatatcttgctgccgttgatcctcaccagcctgaaccggatcgatatgatctcgaatgcgatggaactgagaggattcggaaaacacaaaaagagaacctggtatacgaaacgaccgtttgcgagaaatgactttattgtgctgggacttggggttgtgctgctgggggtgagcctgacggtgacgattctgtttgggagattttataatccgtttgtgtagagaatagaagaagcgttgtagttgttagctgttcaatagagtaacaaagtgaaagaagtatatcctgatttcgaatgaattttaatttctgaaattgggatatatttttattatatgtataaaatatgatataataatcggaaagtacaaaaagtattcgtataaaacaattcaaaacattttgaggag

SEQ ID NO: 2668 - DNA, 3389 bp, Unknown
  gut microbiota DNA sequence
gactttgatcatctgaaaaagatgggtgttgttttaaaaagagcgcattattttatcacctgcaacggaaaaatgatgtaccggattccaatagaagaggagtttatcaccaaacagctgaccagtgtggaatacaaagaaaactggcagctgatgcatcagcaggattatcatcagatgtcactgttcggggattttggtgtacaggcttaaaattgcagaaagaagatagaagatgccagaaagggaacagaaatgtattgttttacctgtaaagaagattttgagagtatgatgacctgtatctatcgggtgtgggaggcgaaaaagggaagacagaatgtcaggctggagatcgaaccggtggaacagatggaactgctgactgaatatatccatgtggagatggatccggagctggcacagaaggtgattcgatctatccggacaaaaatatctgcgcatgcatattatcagatctatctggcagccatgagcattgatcccgggcgactggatgcgatttatcggttcctgcggctggggtttgccgtcggagggcaagtgaccgagtatctgagagaagaacctgtgatgcggatctttgaactgagtcggcaggtggcaaatgaaagacactatttttatgaattcctgcgatttgcgagaatcgaaccgggtatttatgtcgcgcatatggaaccgaaaggaaatgtggcggcgctggtagcagaacattttgcggaccggatgccatcggaagactggatgatcatcgatgatgggcggtgtctgggcgtgatccatccgaaagatgagccgttttacgttacggaattccgggaagaggagatggagcggctttgccagacggaaaaacaggaagatctttacacgcagatgtggaaagaatttttttacacgattgcagtggaaaagagggagaatccggtctgccagagaaatctgtttccgttacgttacagaaaacatgtgacggagtttttataaaaaagaaaagaacgaatatgacaaaatcgcaggggtgttgtttgaaaaacagacagaaaactgttatgataagaagaaaagaagatatctgtatactgtaggcaacggaaggtaaaagtatcaggtaaaaaaaagaaaacaggatacagaatggagacagacgaatgaagatattgatattatcctgtaataccggcgagggacacaattccgccggtcgggcggtgaaagaatatctggaattacagggacatcaggtggttatggaagatatgatgcttctgaaaggagcgcggacatcgaaagcagtgagcggagcctatgtggggatcgtgaaacattgtccgttgttattcggtctgggttaccggctgggtggatgggtttcttcggataagaggaagtcaccagtatattatacatgcagtcttctggagggaacgttacaacggtatctggagcagaacaggtttgatgccattgtaactccacatctgtatccggcggagactctgacagcgatgaagaaaaaaggctggctgaagatcccggtggtggcgatcggaacggattatacctgtattcctttctgggaggagacagactgcgattattatgtgattccgcatgaagatctgattgatgagtttgcaaagcggggggttccgagagaaaaacttcttccgtgggggattccggtacggcagaactttatgaaagaatgggataagagggaagcaagaaaaatctgtcatattccacaggagagtaaaagttatctggtgatgggcggcagtatgggatttggaaagatccagatctttgtgctggaacttgcccgcaggatggaagcagatgagaacatggtggtcatctgtggaaataataaaaagctggaaacgcttttaaaacgggaactggttcatcgaaagaatgtgagagtcctcgggtatacggatcaggtggcggcttacatggcagcctgtgatgtgattttcacgaaacccgggggactcagcagcacggaagcagctgtgatggggattccgatggtacatacgaatccgattccgggatgtgagacgaaaaatgtggaattcttccagaaacatggcatgtccatcggaaaacgttcgtttgttggacaggtgcgcgcgggagaaaaacttctggagcgagaaaaactgcgcgtggagatgcaggaagcacagaaaaagaacagtagaccggaggcggcagagcgtatctgtaaacttttggaagagctgatcggtaaagcgaatgaaatgatagactagaaattatttggtagatagtattccagatgcattttggctcgtaattgtgaagaaacggaaacgttacatagttatatagaacagcagcaatgaagaggacgaaaaagaggtacttccatcgaagaacgatttgaaagcgaaagtacagaaagaaacaggggggaaacgagagatgatcacatggcaggagtggtgttatatcataggcgggtatctgtccggcagtatcctgtacagctatctgctgccaaaggcactgaaaggaattgatattacagcggaaagtccggatggaaacccgggaacggcgaatgcttttacctgtgcgggcataccgatcgggattctggtgctgtgcatggaactgctgaaaggttatcttccggtgcatctggcgttgcgggaggtgaatccggcacgatggagctttgcgctgattctggcagctccggttttcggacatgcctgcccgtttttacagccacagaaaggtggaaaagccattgcggtatcgttcggggtactgctggggctggtaccgttctggcttccggtactgtctctggcagccctgtatctgatcttttccctggtgatcgtgatcgagccgcatttttaccgttcggtttgtacctttgtactgttttccgtcggtgttttctgtcgggtggcgatgacaggtatcagtgtcggctgctgtctgatctcggctgtggtgatccggaatcattacgctagatatcggggagagcagatgagtgtgcgactggcacttcatcggtaagaaaacgacagggaatatcgacagtgatgattgtttgctgagcatattggaatgcgaagcgtgtgaatgggaacagcattgctggatgtcgaaattatgaaaacagggttgacagaagaaaaaataaatgctatttttgaagtaacttatatgactgacggaagtggagtttaccacggggagtataagggtttgaagccgaccgtctgggcagtgtagctcggattgtaggcttttttcgttttcagcataatttctgcgtagtatggagagggcgaggaaagccgggtatagtg

SEQ ID NO: 2669 - DNA, 3464 bp, Unknown
  gut microbiota DNA sequence
atatcatctttactcagtccatctgcaatctcatactggaaaagttcatcatcatgctgtccaagcgtcacagaacgtttctccagtttgccttttccatcgtcaacccagacatatgggctgtccgtatctgcatcacagatgaaagattcatccagccagatacccgccttttcctcactctgtccgtaatcggcttccacataaacatgctgtccaagcatcagcccctcagaagaatccagttctatatagaacggataggaattggactgggtggatccgtcaccgctgctgaaataatagccattattggaaccgttgcccggattttccttatctaccgcacccatcgttcctttccaggtgacagaatcatctactctggaatgtacgattacagcctgccccggcgttacagatgcgatattctgttcgtttaccttacatttaattcgaaaatctcccattgcaattatggacatgaatgcctggctgtctcctgaataagaattactgtcctgatttccgttattgatggatttgactacaccatcaatctcactggtaacctgacagttctcgatggagtcctgtaatttctgaatctccacctgtttgcttttcttttcatattcgctctgtttcagttccatctgggcactctgaatctgcattgtatagtcaagctgtgcatcatttcctgcactccttttttccttttccagcgcagcaatctcattttgtttatttccgatgttgttatcgatccgttccagctccagctttgctttttccaggtcttcctgtgatttttctgtatcataagagaatagcggatctcccttggatacttcctgtccgacttccacataaatgtcttttactgttttatcctgactctgctgaatgtccacctgtttctgtgtttctaccacaccggcaaagcgattcactgccccgttaccacttcccggattcatcagattatctacgctgtttacatatactacattttccgtacttccatccgatgattttctgccgaacaatgtccacgcaccgattccgattaccacaacggctgcaacagctgctccgataagaataattttctttttcttcatgtctgcctcctgtatttgataggttctcatggtttcagtatatcatagtacattctgctcttccttactttttctttacatttctatggacatttccgatattcttttcttaccattttctcggccccagagttgacatttttcctcgttctgttatattaaatctgttactgcggttccggtattttctgaaaatacaatgctttatagcaactattcagtagccactgtaccgcgaggtgttttggcatgaatatgccaaaatcccgagacatacaagccaaaatgctatcaccgaaggtgattttaaatgtattttggctcgtaactgtgaaggtactgaacagttacaatttatatatattaggaggttcttatgacacttaccggtattctttcttatctggccgttatcaatctgaccggctttgccgcttttggcatcgacaaatacaaagctatccatcataaatggcggatccgggaatccgcactgtttgccatcgctatccttggtggaagtgtcggttgtctcatcggtatgcatgtatttcatcacaaaaccctgcatccttctttccggatcgggattcctatgattcttattgtggaactgatcgtcggatgtgtgtgtttttataccatcagcaaccgtacaccataccggcagtatcctgtcaaagtagttcgtcacgaactctcctctctgtcccaccggaaaaaatccgacattgcaaaaacacttaatgtccatgatgttttcccgtctgctgacaataaacagtccgtgccttccgatatcacctctgtatttgctgatttctttcatgatttttcatatcatatcagagatttctcggaacaggggaattcggcttcggtcactgtttcccttaccacacctgacggcgaagcactggcaaaagaatactcccgtcaggtaatgatcaaacagattcagaactctgcaagccctgcttctgtagatttttctctagaggactgctatctgcttcttggcaatgttctgaaaaacaatgattataaaagtattacctctgactataccatcactctcacccgatccggaaaaatctggaacatcgactccccgaaaagcctgtctgctgcagtaaccggaaacttttccacttatgtggccgatgcttccctgttttccccctctgagatcatcgcgatccacctggatactctgaaagctttcgacaccgaacaattaaaccgttatctggcactggactccctcttcaattccgaagatacttcgagccgttccgttgtcaaagccatcgccggccagcttctgaattgcctggactactccatcacatcggagcttctgtctgctgacggtatggatgcctctgtagatctgaatctgaccagttgcgatttttcttctgttgtatactcctatcaggaacaatacaccgcctacctggcgtcctcccaggctctggaagacggaaccgaaggccgccagacccacgccaccgctctcctgacagactgtatcgccaccagcactcaaaccaccaccacccctgtaactatccacctgaacaacgacggcaaaaactggcgcatcaccaaaagcgacgaaatcacaaccgccctccttggaaacctggaagaagccctcaccactattctcacgcagccggaaagctgacacctgacatttcccacagaagctaccactggcaactttctttagatccaaattcacaaaaggcagatgcaaaaatctcattctctttcgcatctgccttattttatctttttccatattttcccttttcaacaccattccttctctccggcgatttgcaccctgctacgcctgccaacacaaacatatccactatccagttttttgccaaaacacagcggcaggctccggggttcctttgtcgcaacactttgtgggcgcttagggcaagctttaagatccgacacttacgcaggctttcgcgagggtcagctgaccctcgtgaacatagccgaagttagtggctagcttaaagttgccctgcccacgttgcgacaaaggaaccccggagtctgccgcgtccctctgccaaaatctggcaagaaactctatttaattattcctcactgcgaatcgcaatccccagctcctccagctgtttctcatccaccaggttcggtgcctctgtcatcagacaggacgcatccttcaccttcgggaatgcaattacatcacggatactctcctgttttgccatcagcataaccagacgatccagaccataagccagaccggcatgaggcggaacaccatacttgaatgct

SEQ ID NO: 2670 - DNA, 1234 bp, Unknown
  gut microbiota DNA sequence
ttttcatgccagttttttctccatccactgacggaaccgctccgttttcttccagcgcaccacacacgcataacaaatttctgcaagtgcaattcctgccgccacatccaggattccgtgctgtttggtaaataaggtggaggcacagatcgccaccgcccagatccatgtgatcacacgatgccatcccggtacgtttcggatattccgaatcaccaccacacaaaaccagctgtccatgcagtgaatcgacggaaacagattgaccgccgcatccatctgatacagcccgacaagcgcctggctccagaaatctgttcccacgatctccgggcgaagattcgtggtcggaaaacacagataaaagatcccgcataccgtctttgccagaagttccgcacataaaaacagacaggcttttttcttttcaaagtaacccatcaccagaaagttcacggtgcaaaacaggaaaaatgagaggtagattcccacaaaccagggaatcacgggaatctgctgatccagagaagtctcaatattccacgcttttgtatgggttcccacccattgtcccccgcagtaaaccagggaattatacaccaaatcaaataccagcatcagcagatatatccagggaatccactcaccggttcttatttttttccatattatcatattcttttcctttcgtcaggactttattataacattttacgacaccttcacaactgattttcgcaaatcttacactttcgtaagtaaatcttaatatatagccatccgccggctttctcatataataaactataaacacacggaggattattctatgccggctttactggaactggatcatgtcggactttcgtatcacacacttgccggagagatcccggcactctcacaaatcagtttttcgattcaggaaggcgagtttgtctccctggtgggtcccagcggatgcgggaaaagtaccgttctgaatctgatcgccggacttctgacaccggaacagggacagatcaccttgcagggacttccacgggaacattccgttctctctatcggatatatgctgcagaaagatcaccttttcgaatggctgaccatctatgaaaatgtcctgctcggtcttgagattcagaagaagaaaagcaaaaaagcggtcgcacatgtggaccgtctcttacaggagtacggtctctggaacttccgttcgtctcatccttcgcag

SEQ ID NO: 2671 - DNA, 17253 bp, Unknown
  gut microbiota DNA sequence
gcggcagcgcgctgccctgatccgcaccctcgcactggaaccttcgcttctgcttctcgatgaacccttcagtgcactcgactatcagaccagactttccgtcagcgacgatatctggaaaatcctgcaaaaagaagggaacacagcacttttggtcacccacgatatctccgaggcgatcagcatgtctgaccgggtgatcatcctctcaaaagcccctgcttgcgtccggtgcgagatccccattctcaccacccttgccgaccgcgccccgatgcagatgcgaaatgcgcccgaattcaaacagtattttcaacagatctggaaggagttaaaccatgatgcctgattcatccgcgcaacgttcctttttacagaagcataaaaaaagacagcagtttatccgtctgatgcggatcgctgtctttctggtttttctgatcgtctgggagatcagtgcacggcttggactaattgattcttttatcttcggaagtcccagccaggtctgtcttgccttccgggcgctgcttctgaccaatcatctgctctcccatatcgggatcaccgtgttcgagacacttgccagtttctttcttgtcgtaggtttcagtctctttttctccgtcctcctctggctctgtccacggcttgctgcgatcctggagccttaccttgtggttttgaacagccttccgaagtcggcactggctcctctgctgatcgtatggctcggtgcaaattataagacgatcatccttgccgggatctctgtggcgatcttcggctccatcctgaatctctataccagttttacggaaatcgatcccgattcactgaaactcattcgcacgctcggcggaaaacgcaaagacgaattactgcgtgtggcactgccctcttcggttccttatcttctgagtgttatgaaggtcaatatcggtctctgtctggtcggtgtggtgatcggtgaattcatcggagcaaaacagggactgggatttcttatcatctacagcagccagatcttcaaactcgactggatgatcctgtcgatcatcttactgtgtatcatcgccatgcttctctatcaggcagtcagtctggcggaaaaacgggtggtacacgccggcggggcaaatcgttcctgataaaaagcaagggcaggtaaaccgattttgtggtttatctgccctttttgcttctctttttgtctgcttatttattctctgtgttttctttttttccggttatccgccagcgcaaacagcatgatcacggacgcaactgctgccatgaaatacattacattcttttgcagatctgccgtctttgccgctgtggttccgtttgtcgtccctgtcagattcgactttgttccctgaccgttgcccgttgatccatccgttttggttccggaattgccgtttccggaagttccgttatttttggtatcggtcggtttcgtctcattctgatcgccgcctccggtattttcatcatcttttttgtcatcctctgtgctctcttccgtctccacgacaatctgctgatcctcatagacttccggaagtgtcagcatcccatctttcagctgatccgtcacatcctctccgtttaccagcactgctgtgatcttccatccttttttcggccggatctgaaactgcgggctggaaaagcgctccaccgcgtaagtcaccgtctcctgtgtttcctcatcgtcaccctcctcatgctgatagctcacctgtgcatgttcggatcgtatcgtgaccatgtgggtatccggtactgtcgtgttgatggtgctttgctgcgtaacggacgaagtacctgtctgcgcagcctctgccgcaacgggtatggagaggcacaggcaaatccccatcagaataattgctgcctttttcatctgtccatcctcctgctctaatctgtcgcatccacataggatatctgaaaagtaaccgtatccgcataggagcctgactgtgcctttttccaggattctctgtcgatcgtgataccaagcaccgtctcttcccctgccgtggtatagcgggcttttgtaaatgctgttgtgtccgccagaatctcataggggatctccccttcttttccactctgatttttcagttttttgtccgagatcagctccacctggatgcattttccttcttcgatctgtgcttcttcgacacggattttcccgtagtttaccgattcttcgttaaatggaatcgtggtgtttgccggaaccagcaccatataggacggatccacatgatacgttacggtcgtggttcctgctgatacgctctgtgcgatccctaagacaagcagcaagccacctgcaactgctctttttttcttcatgtttctccccccttactgtactttcaatacggtttccacattggcaccgttcatcgcccgtccgtcatcgagtgccgcggtactgatcttcagtatcgcaggatattccccggcggacagttctttggacagtgtgatctgtgtgatcgcttttcccggttctaccattttggactgatagattgtctcatcggtatctttcagtaccagtgtaaaggtaaaataacacggatttccttccggattcatcagatttaccgttacatctttcgtatctgccggaatggtgatcgacggatatcccgggatacggatgccctccggcggatcactctcctttgcctcctgcgtggaagcgtcaggatccagatccggcacaaaggccgaatccggggattcctgtgtttcctgtttgttgtttctcgtaagatacagaccggctccgatcagcagaacgcatgcgcatacggcgattccgattcctatctttcttctgttgttattcaatcttcttcccccttacgcattattccagattcacttctactttcagattgctcatgtagtattcatctgcgttgtttccatgtgcatcaaataccaacatgaaataatttaaatccactccatttttacgggtaatttcaaatgtatgcgataccgtttctccatcacattttccaatatcatttgcccgcgtttcttcgttgtcataatatgtgccatcctgtaactgataacttaatctcagatctgcccatccatcttcttcttcatcaatcttatagctgacttttatcttcatcttctgatacaggcgtgctgcatccatggaaatatccggcagatacaaattataccaggatggataaagtccataatcaccggttgttacaacctttctgtccccttgaataaagaaagtaaaaatagtcagttcatgttcatccgtgataaagtatttgtgttccgtctgtcccgtaaaaacagctgaagttatcggtttgtataccgcatataaagtaagatccttttcatcctcaaatacagccgttttaacattcggtgcatagctgatcacatttgtcgaacccgcggaccggctccagccttcgaaggtccatccgagtctgtttacggtcgggaacgtatatgtttctttatatttgcatgttactttctcccgtttattaccggtctgatagtcaaacgtaatcgtatattcgcacggtttccaaatcgggtacaggttgaccgttccattattggtcgcacaaagtctgctgactttgtctcccggctgatatactttttgctcacttttctttccaccggttctccatccgacaaacttataacctccgcacacatatccgtttttcggtatcgtggtttcctgtgtgtaacgcagcgggatatttttcatctctccgtctgttacctcaccggttacattgaaaacgatcgtataggaattttctttccagtttgccgtataggttctgtctttcaacgggcgggcggtaatcgtaacctgtgtatctttttctttgatatcggttcctgaccatccttcaaacgtatagccttcccgttttggctgtaccagatccatcggtttgctgttgatggtgaatgttgtcggattggtctttccggtcggaaggcttcctcctgccagattatagctgatggtatatgctatttctttccatactgccttaaagaccagttttccgtttttcacattttcatcggatacggtatccggtacgtttttatcccagcttacgaacgtatatccttctctggtcggttcctcctgagccgggatcgcatccccataagaaagtgtatattccttgagtaccgttccttcactcacaaactgtaccagatagctgtttttcctccactgtgcctgataggttacatcctcattcgggatcttctccggaagttccggtgtccagcctgtgaaggtgtatccttttcgaaccggctgtttcacattgagtgtggcaccgacacgaccttccacagtctgtgtcttctctccgttttccggttcaaaggtcagtttgtgtacttttcgtttgtaatagtaggttaccactgtctgcttttccgcagaaatggttacggtctgcggttccggtaattcatattcatcgccataggttgtattgaccggcggcgttaccgtttcatccgtcttgcccttcgggttctgtgttgccacccactggtaaccgtctccttctgctttctgcagataatgttttactgtgtaggttcttgtatttgcttcccattttgcatacagcgtcatatcttcattcggcatatttccggtatacgcattctgtaatgtgctgtctgtacaccagcccatgaaagtataacctttccgcatggatggtgccggaatcgttgctccctgtttcatctgcagctgttttggttccgttccgtcattattttccagctgtaaggtatgtacttcacgttcatacagatactcgatcaccagtacctttccgccttcgatctgtccggtctgtggctgtggagatacgtatccttcgaacttccgtacttccggtgtaatcacatcttccgtcctgcctaacagagattccatggatgcaaccgtatagccgtcatcatttgcgttctgcaggctgtatttcacccagtaatacgttgctctcggttcccattttgcgtaaatcgtactgttttgggccggaactgttccgtcaaatactttcgtaagacctgcatcctgataccagccgtcgaaggaatagcctacccgttccggcatctcttccacccgggttccgtaaagatatgtcttttcggtcgccggatctccgttatttgtcaccatggttacctgataggaattacgccggtagcggtaggtgatggtatccggatcatcggaaacagtcagcgtacagctctgtttttccggtgcggtaaatccagcatacgcctttacttccggttccaccgaatctccggctgttccggtaaaggtttctgtctctgccgtctcccaggtatccgatccgtctgcactctgtaactgatgaaccacctgataggtcttctttccaggctcccacttcgcatacagcgtcattgcatgcatcggcatggtttttccttcaaaggaaaccgtcagggctgcgtcttcataccagccggcaaatgcatgtccggagtatttcggaacctccgaaatggctgctccatacatgacatctgctgtcccatcggcttccccgttgtttttcacataagtaaccgggtagctgtttctgtgatagtagtactgcttgcaagccccaccatcaccggtcacccataagttctgcgcctgaggagactggaatcccggataagatttcacttccggtgtcacctcggtatccgtcagggctgtctttgtctcttcttccaccaggatatacgaactcggatcgaatggattctgctggtaatgttccacgcggtactcactcggaaccggtgtccattttccatagattttaaagccatcgctccaatcatccggttcctctgtgttcacatccactgccggcatgataccgtcaaaaggattctgatggtttccgtctgtataccagccttcgaaagtatatcctgcccgatcgttctgtctgtacaccacttcctcgatctcaccgatcggtgtgccatatggtacatcctgaatcggggcaaattcttttccgccgggatttccagtcacttccagaagaagcaggccggtatttcttgtgtaataataattcaccacaagacttccgtcaccaaggacttccaccgtctgtttttccggtgcactgaatccggtatacgatttcacttccggcgttacgctgtcgcctgcatgtgcagcaaaggattcttcctctgtcagttcatagtttttcgcatcaaattcccgtccataaggaatctcttcatatccggtaatgctccagagtttttcctggtagtgtcttaccgtataattgaccgtctgctgttcccattttgcataaaccgtaagatcgtgatccggcatcgtctcgccaaaggactgctgatactcttcatccagataccagccctcaaaggtatagccttctctcaccggtaccggaacgccgattctctctcccggtcttgctgtcagagtcgtttcgtctaacgttccacctttcgcatcatacgtcagtgtataagtgttcagatcataataaaccttcagcaccagacttccgtctgcttttacttccccgctggcaagctcgcctttccggtggtagatcacggaactgtaatcaccttccggcgcggtgaccgtctcaccggtggttccggtcatggttttgatctcacttaaggtatatccgccttcttccggttcttccacgtagtacctcactgcgtacgggataccgtcggaagctttccatgttgcggtataggtcatatctcctgccggcacactctccggtacttccggggaccagccctggaattcatatcccggccggtacactgccggagccgtcaggaaggttccatagcgatagtcatcacttgcgaccgtctctccgttttcttccatcaggaaggtaagatggtactctttccgtggataataatatttgaccacggttgttccgtctgcccgtaccgtctcggtcttttccttcggtttttcgtatccttcgtgttctacaggtttcggtgtcacttccgtatcggtcagtccgctgtaactgatcggatcctgtgcctcatagacaccgttggttccttccagatattcaaccacctgatagcccacatcttctgcttcccatttcgcataaaccattcgctctttgttcggcatctttgcagggatcgtatatggtgttgtcagttcttcatcttcgtaccatcccgcaaaccggtaacccgttctcaccggatcttccggtttttcgatatcggaattgtatttgcccatgatggtatccacataggagccgccttggctgtcaaaggcaatatagtagccatcccgcaggttatcccagtgtaaccggatctttatggtcagtggctgtgtattgaaggttccttcctgatttttccaggtaatgatcatctcgccgtcctgttccggttctgttcccggatccacggagatcacattggtgtcccggtcataggagaatgccggattggtcatgacgatgttaaagtattttgtgctgtcatcgtaaatcttctcccggtaatttccgtcatcatccagaccttctttcatgtccatgtactgcatccggaaatattcatccgacagctgtaccgctttcacatcccgcttcatcttgatgtctttgacatccgcctgtgtataggcaaagtccagaacattttccagatgtcccaccgtgtacagcggccattcattttcatacaaggtcggattgtaggtaaaggagttcgccagcgcctgtgccaggaatttgatctccagatagatgccaagctccagatacatcgctcccatggctcttgtcgttctgccgttcgatgcggtgtacttcagttcgtagtagagatagccccacagctgtgcatagccgcctacctctgccgtgataccgacacttgccagtcttgtggaaaggagtcccaccgctaccgtcagccgcacaccggctttcagtcccagcgtccccatcgcataggcagtcagttcatactgttcttcacataagtcaatcatatcgctggttgctgtccgatccatcactttcagagagaatacgtatcgttttgcgttcttataccagtaggacattccgatagaaatgttcatattggcataaaccacaaattccagtttcacttctatatcaataatcgccagcacacggaaatgattatctaccagcaggcgattatagatttccacccagtcgccttcatctgccagaagttccgagtaccgctgtgccaggctcttggaaacagagatttcttctccctcttcctcatcgcccaggcttccggagaatttcgtcttgtccgtgatatactcttctccgttttccatcatgctcttcagctctccggcgatcttattgacaccttttcgcagtttggagcctttgttggaacctccggagctgccctcgccctccacggtcttaaagttcacatccagagcaatgccggtgtactcatacagatccagcgacgctgtcaccttataatctgcgatatacgggaaaatcttccatactttccagaccgcttttccgtctacattaatatccacccggacttcctgctcgaaggtggaagttacggtgatctggatatttgcattggcattcagctggatattgaccagcaccggaatctccagtgccagatgcacgccgctgacatctccgtcaaaatgtttcagtgttgtaccgagattggctctgaccgttcccaggctgactgtcacgatcggtttgccggttcccgttcctcccggttttctcgcataagtttttggaatcaggctgtcactttccggcagactctgtggtgcgatatccccgatcagagtattttcttcttctgtttcgtcactctgattttcgtctgtatattccacagaaacatctgcaccaagttcttcctccagagaggcttccagttcttcaaaggaatcggtagcgatcgccgcagcaccgatccggtccgccacatcctgtgcgaatccgctctccatcgcctgaacctgaatctgttcttccaggttctcccggtctgtttcttctaacagatcgtctccttccacctggtccttctgatacacatccatagccgcctgcatctcttcgagagaaatggtctgatatgccaggatataattggaaccgctctgttctacttttgtgatctctccgtactccgctgttccactgttcagatccgtatacagcgccaggtaatcccccggatccaccgttgtgctttcatccagattcagtgcctgactcatctcgtcatctccgaaagtcagttcactgactgccacggtaaccgaatggttgtccggatcgccatcctgatctttacttttttccagtggaaatacgtccggcgtaaataaaacatcttccgcctttgctccccggtattcgtactgattgccgttgcatccggtaatctcaaagtaagagacatcactgttgtcacctgctgccagatccatggacgggatcacatcgccggaatagacaccgacgatatcccccgtctgtaacgaatcctttgtataggtaaaggaaccggtcgtatcgcttccctctccctgaatctcaccgtctatgcccaccgtcataactgccacggaaacggagtccgccgcttttccgttgacggtcaggttactcagttcccgtgtatggatataccggatctcccggttcagttccacattctttgtttcttcccgataaaccgtaaaatcatattcccggatcgttttgtcaaatccggtaaaatacagctgatcatttttcagcgtcagtttgtaggaagcacccggctgccagcctttcggattgctaacggtacaggtattgtcctctcccctggtaactgccagcgtgatctcttccgatggatcgctgacatttttaatcttacatgccgcaagaatctctgcatcatccagtgcatccccggtattggtgatgccgatggcaaaatccgttgccacatcataggcacgggcgtaggtatccatggtgacggactccatcggctgcatatcggtatacgctgcatataacgtaagatccccgagaagtctgtcttcactgtccacataatccgtacattcccggtcgtaacaccagccgacaaaggtactggattttcggactgccagcggcagatcattcagcgtggttcccgccggaagtttctgctgggtgatctccatgctttcccccggcttatccggattatccctgtaaaccatgcctccgtccgttacatactggatcgtatattctgtttccctgaatgaaatatcaaagttcagctgatcactgtaatcaccggtatagttggctttttggatcagttccgcagcaaacgttctgttggtctgcttcgtatccgcacttaagctggcgataaccgcatcattttccacgatcttattggtatccttatcacgaagctcatagctcacctcatggttgtcggacttcagcttccagtcatttttcgaatgtaccgccacactgagctgatcgttctcataaaaacctccggactttgccttcagggtaaaagaatcctgccccacagatacttcactgggaatatccacctgataataccgttcgatccatctggcatacagaactacattcccctcataatcttccgtatccaaaccggtaaccgctttccctgtcagttccgggttgtcgtaccatccaccgaattcataccccggttttctgatgtcttccgctcccggcagctcagcagtcggatattccgaaggagcctgatagttctcctgaaaagttcccccgtttttcttatagtcaattcccctctcctgactctcctccgatgagaccgccggctcctgtccggcagaaggatcagcgaatgtcgacaccggaacggatgtcgtaagtactgccacactcagtaacagactgatcagacgttttttcatatgtacacttcctctccttttagcattttcctcactgccatattcgcgcttaatttgtatctgataacacttttcgcatctgacagtttcacattttctatattttagcaaaatcagaagtgccataacatgcccgttcaattgaaaaaaagtgcctgttttttctatatagtttcaaaaacagacacttctttttttcacttattgatttacaaattcctttattttctctcttttgtcgatatgtaacttttccagtatcccggatacataatgttttaccgtattcaccgaaagtcccagatgttctcctatctcctgatttgtccagtccctgcaggcaagcatcgcgatggaatattccagcggtgtcagaagatccgtcactgctttctgcatctgtgggttatggattttcatccagccgcggctgaaagcgattaccccgtccaccagtttcttatagacttccggctcactttttcttatgctggcttccaataccccctgcagcaatccgtgatattcaataaacggttccaggaatttgtcttttctcgccatctcccagccttcggataccgattgccttgcgccctcctgatctttctggttgatctggcacatggcagacacacaatgcaggtaaatcatcgggatcggatagatcttttccgtcattgccatcgccgtctgccccatgccctgtgctctggcatactctcctttcagataagcggcatgccccagcatactgattgcaaacaaccgctgcccgaccggaaggtacgaaagataacgatccagtggcggcgttccctcttccggtggaatatgaatcagaacactggtcacataaacagcaaacaggcaggacgcaatcatgtcgggatcttcttttttcagatgttctttcagaatctgtgacacatcttcccttgccatctgcgcttcctttgcatttccaagggtaaagttcgcaaaagtagaaagcatatcggcagaaagccgcagcatcggatcctcactggtctggtatttttccacacattgaatacaggattctgcctgtgccctgaaaaagcagagttccccgcgggcaatctcccgcagatccggatcttcaaactgttctacggtctcctctgcctttcccggtgagaatgcacttcccatcagcggcagtaccgtgcgtttctcccttttcccggaaactccaagtctggttccatccggcaggacaaaaccctggtcaaattccacacccagtactttcgctgcctcctgccattcctgcgcggtcagggtatcccgttgtaactttttataaaaattctgcctggactgccccaatgcagccgccagctttgccacactcatgccctgttctttgcatatctgttttacgagttcttctgttgtcattcgaatttcgcctcctgtggctgtctcttttgtcaatcgtttggttaccatttgcttttatattatgcatatgttttttcaaaaatcaagtcatatatactacaattacagattgctcctgaaaacagatacgcccgctcagacttttcaggtttctgttgctacctgcctgtctgaacgggcgtattcctattcctatttcagtctttattcttttcctgtttttatcagtcgtcgttccgtcttgagatcaggatcagtcgaaccagctgcagaatcgccgatgcaagcgctgccacataggtgagtgctgccgctgtcagaactttcttcgcgccctgtaattcctgatcgccgaagagctgttttgcttcgaggatccggatcgcgcgatgggaggcatcgaattccaccggaagcgtgatcagctgaaaggctaccacaaatacaaataacagaataccgacttccagtaaccctgaccatccaaggatcagtcccagcacgataatcggccaggaaagccgggagccgatgttggctaatggtacggagaaggaacggagtttcaacggcgcatatccttcctgatgctggatcgcatgcccgcactcatgagctgccacaccaatcgccgctacggatgtcgatccgtataccgaatcggacagtcgaaggactttttcattcggagaataatgatcggtcagatcgccgcggatccgctcgatccttacatcgtagattccggcatcgtgaaggatcatctgcgcgatgtcctgcgatgggatatttctgctgttccatactctgctgtatgtccggaatgtattctttacattccaggaagcaatcatactgatcagcgcaccgatcagcaccaatatataggttgcatcataaaaataatatggcatagtattccctctttcttttcacggaggttccgttttttgttctcttagtagattatgattatagcataatctttcccgtcagacagcattttcacactgttttcataaaattcacgtttttttcagattttcttacagacgcggcaggaaaaatcctttcggttcttcctcctcttccttattttccgcgatcagattgcggatgctctgcattcttttatccagtgccgcactctgttccgcacagtcgtacagttcgtcctgcagatacttcatctgctctgccggaatgttctttttataacgcatcttatgttccagacttgcccagaaatccatcgcgatcgtgcggaactgcacttccactgttaccggttttttctcattttgcagaaagatcggtacctgcacgatcaggtgcaggctgcggtagccgcttggcttcggattctggatatagtctttacgctctaataaggtgatatcgtcctgtcgcaaaaagctgtctgcgacttcatagatatctgccgggaaggagcagatcacccgcacaccggcgatatccgtgatattcttctcgatggattcaagtgtcatcgggatatcttttctgcggatcttctttaacagactgtcataagatttgatcctgcttttgatcccttcgatcggatttttatcatattccagggaatattcctcatttaatactttaaatttcgtctcaatctccatgatcgcacactgataatacgacatcaaaaggtcaaatggtttccggtttctctgcatcatgtccaaaaattcatccgacagcagactttgtttgacaaatttatcgcgcttttcttcgatcagagtccggctctgtttttttatttcatttaacacttctctgtttctcatcatttctttgatccctccatatagtaatatccgggaattctgctccctggacgttctttcgatcataaacagaacaaattttgttctggctctcttacgctcattatatcatgaacttcgttcatgatcaccattcgccgctcccgatgaataagctgcgcttattcccgctcgctagagcgtgtttgaaaaaggctttctgcaagatgtgcgtcacagtttgtgggagatttttcctgaatgagggcggcgtagcgggctacgtcaaccgaacgaaggtaaaatatgccgcaaagtggggcgtgcagattgcaggaatgatttttcaaacacgctctaacgctcattatatcatgatttacttacaggtgctacgggcaaaacactgtattctgtccgttttatgtaatgtgtggctatcatatgtaaaagcaaaaatccgccagaatctgctcctctcttttttcaaagattgcctgcacatcctagcggatttcgttacgttatctttctgtcatatgtttcctaaacagttgtaactttattccatattcactttacatattttttattttaccgtcatccactcgcccagtccgtcgaactgtttttcatagcttacggcatcctcatactggttggactgcaggatgatatttacggtgttgtagatacatctcttcagttcgcggatatccagcgtgccttctttcagctctttgcggatattttcatgatcttcttccattccaggcataaccatatcgtttccggctctcatgcagcctgccgcggtacactcgccctggatctgtacattggtggttgtccagtctgtcatgattgctccggcaaatccccattcatctcttgctgcttttgtacaggtgtcatagcagtttgcagcgtgtacaccgttgatcaggttgtaggaagtcatgatggacatcggctgtgcatccttaactgcgatctcaaatcctttcagatagatttcacgcagtgtgcgttcagacaggacagaatcagaacccatacggttgtcttcctggttgttgcatgcataatgtttgatcgtagttccgcatccaggtactttctgtacacccagcgtcatggatgcagccatcatacctgccagaagcggatcctcagaatagtactcgaagtttcttccacacagcggatttctatggatattcataccaggtgccagccacagggtcacaccgaacagttccatctcatgaccgatcatttcaccaagttcctgaaccatctccagattccaggtctgtgccagcagagttcctaccggaatcgcagtacagtactgataataagaagctcctctctttacctgctcttctgcaaagaatccgccttccagtgcagccaggaaatccgtcggtacgatccgaccgtcatccacctgatattcttttttcagacgcagtcctgcaggaccgtcagccagtgcgatacttgccacattccacggttcttttgctgctaccagcggtgtctcggctgcggaacccggtacggagatacctgcggaaccaagtgcattgctctggtcttttcccggatctccggtagccatctgtaccagctgatcttctgacatttgctctacgatctctccggcttttcccggcagtacatccggaatctgctgataagccactttttcggtcggaatatctgcggctttcactgcaaccggtgcgattccttttgctttcagttcctcatgccatgccagttctcttgcctgtacttttctggcaaatggcatgatctcgtttaattcttcttttaacgggcagatattttcacactgtaccatcactgcttcctgatccagttccagagcaccgctgagtacggaagtatttaactcatttcccacccatataccgtatttgcccggttccaggatccatgctgcctgatcttcgctgtaggaagccagctgatacagcgggaaagtgatcctcatctgctgttcttctcccggcgccagcagtttcgtcttgccaaatcctgccagacggcggaactctttcaccagttctccctgtgggcaggaggcgtagatctgtacaacctcttttcctgcataagtatcaccggtatttttcacggtaacttccacggtaacttttggatccatggttcccagggcactgacactgacggctcctgctgcgattgcaaaatcagtataggataaaccataaccaaatccataacgaaccggaacctggaaggtatcaaagtaacggtatcccacaaagattccttcttcataatactctttcatcaaattgccgctcttgtaactgaatacttcagcacccggataatcgttgtaggtttttgcccaggtatcgctcatctttccggatggtgttacttctccggtaaatacatcggcaaatgcattgccgccttcctggcctgcctgtacatactgtacgatcgcacggatatttgcaaattcatcggcaaatgcaagatccatcagaccaccggtattgatcaccagcacgacatctttatagctctcacatacttgtgccagcagtgttttttcttctgtagagataaagtaatctccttctttgtcaaaacggtctttgttttctcccgcaatacgggcaatgacaaatactgcggtgtctgcgccgtcagtttttgctgtctctacatcgatgccatctccacacggcataaaaaacggagttgcggagtatgcatcaaagaatgcgttcgggctgtcaatcgtctctgtttttttcagaatctctgctttccagtcttctctcgcct

SEQ ID NO: 2672 - DNA, 835 bp, Unknown
  gut microbiota DNA sequence
cactgaattccgttctgcatgacggcatgatcgatctgaatgatgtgggactctcggaagaagagatccgtaacatcagccagatctatatcgtggcatgcggatccgcctatcatgtaggcatggcagcccagtatgtgctcgaagaccttgcaagaatcccggttcgtgtggaactggcgtccgaattccgctaccggaaaccgctgttagataaaaatggtcttgccatcatcatcagtcagtccggtgagactgcagacagtcttgccgcactgcgggaggcaaaagcaaagggtgtccgcaccttgggaatcgtcaatgttatcggatcctccatcgccagagaagcggataatgtcttctacactctggcaggtccggaaatctctgtggcgaccacaaaagcctacagcacccagctgatcgcttcctatctgctggcgatccagtttgcaaaagtaagggaagagatcacacaggaacagtatgacggtatgatcgcagaattacagacacttcctgagaagatccagaagatcatcgatgacaaagaacgtctccagtggtttgcatccaaacaggtcaacgcgaaagacattttctttatcggtcgaggcatcgactatgcgatcagcatggaaggcagcctgaaaatgaaagaaatcagctatattcactccgaggcatacgccgcaggagaactgaaacacggaacgatctctctgatcgaagacggtacgctggtgatcggatgcctgacgcagccgaacctgtatgaaaaaaccgtcagcaatatggtggaatgtaagagccgtggtgcttatctgatggg

SEQ ID NO: 2673 - DNA, 986 bp, Unknown
  gut microbiota DNA sequence
caacaacggaaccgctccggataccaacacggatatgaacaacaacggaaccgacggcaacagcaatatgaacggcgccacttccggggaaggtacggtagatgagaatggaaatatcatcgaagacctcggcgaggatgtcggtgagggaatcaaagatgtgggagacggtatcggagaaggagtggaggatctgaccggcggcggaagcagggatgcaaatcagcagaatgcacggtaaatttccggtaatagaagaatcgaatcctatgggtggctgctgttcgcacggtatactctggcgataaggagaacgtgacgaacagcgcctctctttttctgagactgtgtttacaatatcttacaaggtgtgttgccggacacggagtgcgcagtaattttgaaaatgtatggcggggtaattattaagagaatagttgccgtatatttggaaaaatgatatgatgtagaaaatttaccacgttacaacgtgacagcatacagaaagaacagaagaagagagggaaacactatgagatttcgtccatgtatcgatattcacaacggaaaagtaaaacagatcgtaggtggcagcctgcgggatcagggagatcaggctcaggaaaactttgtggctgagcaggatgctcccttttttgcgcgcctctatcagtcccgtgggatccgcggcggtcatattatcctgttaaatcctgcaacttcgccttattatgaagcgacgagacagcaggcaatagaagcgctgaaagtctatccgggcgggatgcagatcggcggcgggatccgggaagacaatgcggagagttttctggatgccggtgccagtcatgtgatcgtcacctcgtatgtgtttaaggacgggcagatcaactgggagaatctggagaaactggagcgtgccgtaggaaaggaacacctggttctggatctgagctgccggaaaaaagacggacagtattatatcg

SEQ ID NO: 2674 - DNA, 1010 bp, Unknown
  gut microbiota DNA sequence
agctctggaaaaagcaggaaacaaaaacctggtaatcgatgcaacaggcgcttccatcaaagaagcttatgcaaacgctgtacagattcgtcgcgcagcactgaaagaccaggacagaactttcggttacccgacaatcgtaaatacatccaaactggcagtaaaagacaaatacatgcaggaagcactggtttctctgttcaccatgaaatacggttctatcgtagttgttgatgaactgggatatgcagaagctctgccgctgttcggtctgcgtcagaacgtatttaccgatcctcagaaaccaatgaaagttgaaccgggtctgtatccactgaatggtgcagatgagaattctctgtgtctgacaactgtagactttgctcttacatatttcatcgtatccggcgagctggaaagatcaggcgtacctgtaaacctgatcatcaacgatgcaggtggactttccgtactgacatcctgggcagcaggtaagttctccggtacatctatctctactttcatcaaagaaaacattgaaagtaaagtatcatgcagaaaacttgttattccgggtaaagttgccgttctgaaaggtgacctggaagcaaaacttcctggatgggagattatcgtagctcctctggaagcagtacagctggttaaattcctgaaagatatgaaagaagcaggagaaatctaagatttcgggaataccggaaagtgaagaaagaccggaatcctccctgtggggattccggcaaataaatataattaaaggagacacacactatggcaaaatttgtaacaattggtgagagactttccaccacagctccggcagtaaacaaagcatttatggaaagagatcctgaaccgatcctgaaaagagcaaaacagcagctggatgctggtgctgtatatctggatgtaaacatcggacctgctgatggatacggcgaagatctgatgaaatgggcagtacagttactgcagagcgaattcgataa

SEQ ID NO: 2675 - DNA, 9089 bp, Unknown
  gut microbiota DNA sequence
cgttccgctggcactggatacttctaacaaagcagctatcgaagctggtatctctgtatacaaccgttctaaaggaaaaccaatcgtaaactctgcagatgcagctggaagaatcgagaacatcgacctggcagcagcaaatgatgccattgttatcgctctgtgtaacggtgaaggaatcgctgcagacaacgacgaacgtatgggttatctgacaatgcttctggaaagaggtctggaacatggtatggcagaaacagatatgtggttcgatcctctgttcctggtagtaaaaggaatgcaggacaaacagatggaagtcctggaattcatcaaaatgatctccgacatgggactgaactccacaggtggtctgtccaataactccaacggtatgccgaagaatatccgtccgatcatggactctgcactggttgctatggctatgatgaatggtctgacatccgcaatcgttaaccctaacgatctgcgtctgatggaaaccatcaaatcctgtgacgtattcaaaggaaatactctgtacgcagattcttatctggaactgtaagatgcgcacagcggcgtacaaagtagatgtcgcaagcgaccgccactggcgcgagaatgtgtcttgacacattctattacagaaaaatatttataatactgctgacaatgaggccgtcgccactagccttttctggctgaggtgacagcctcctttcacaaattcgaaaaaaagagaggcttaaatcatgtttaaagtaacttttcgttttgaaaacggtgaagccgtagagggttttgcagcagccgaggagaatcttctggaggttgcgagaaaaacgaatgtagcaattgatgccccttgttccggtaacggttcctgcggaaaatgccgcgtaaaactgttaaaaggaactctgaattcgccaagaaccagacatattacagaggaagaatatgcagagggatggagattgtcctgtgcgagtaaagtggaaggcgatatcgaagtagaagtaccggatattgcatctgcctaccgcagcagaatgaaggttgcggatttaagttccccggaagaagtagctatttttgacaatgccaaagcagatgtagaggcggcgggaatcgttctgaaaaatgatatggaagtggtagatgttactatggatgccccgtctctggaagataccatgccggacaatgaacgtctgatgcgtgcactgaaaaaacagatgcaggtagaacatgtgattcttccatatacggtaatctgcaagatggcagatgtgctgcgggaaaccaatttttctgttcggtgtgtcattggaagaacaggaagcaaaggcaatattttcgtctatgatattttcccgaaagatgcaaaagtgatcatcggtggtcttgctatcgatatcggtactacaaccgtatccgcattgctgattgatatggtaaccggagatattcttggaaaagcatcctcaggaaacggtcagatccgttatggagcggatgttatcaaccgtatcattgaatctgcaaaacctggcggaagacgccgtctgcagaaagcagttattgatgagacgatcaatccgctgatccagcagatgtgtcgtgcggcaaaattcccgaataaacagatctaccgtatgtgcgttgccggaaatacaacgatgaaccatttgtttgcaggtgtaaatgcagatccggtccgtatggaaccgtatataccgacattctataaaacaaattctctgtatgcatcagatcttggtctgaccgtgaatccggatgctcatatcattatcgctccgaatatcggaagttatgtgggcggagatatcactgccggtacactggtcagcatgctgtggaataaaccggaattttctctgtttatcgaccttggaaccaatggtgagctggtatttggtaactctgattttatgatgagctgtgcatgttccgcaggtcctgcctttgagggtggtgatatcagctgtggtatgcgcgcgacagacggtgcgatcgaggcatgtaccatcgacaaagaaaccatggaaccgacctttacggtggtaggagatccgggacagaaaccaatcggtctgtgtggttccggaattatcgatgtgatcagtgaactgttctccgcgggaatcatcaatccgaaaggaaaattcgtgcgggaaggtgaaagaattcgcagagacaaatacggtatgggaagttatgttctggcattccagaaggatgcaggtgcagagaaggatgttgagatcacagaagtggatatcgataactttattcgtgccaaaggtgcgattttctcagctattcgcaccatgctgaattctctggaatttgatgtatcgatgatcgaagaagtgtatgtagccggtggtatcggaagtggtatcaatatgaagaatgcggtcaatatcggaatgttcccggatatcccgctggaaaaattccattacattggtaactcttcgctgtcaggcgcttatacgatgctcctgtccaaagaagcagagcgtatgacataccaggttgcatccaatatgacttatctggaactgagtaccgtaccgacttatatggatgaatttgttgcggcatgctttattccacatacggataccagtatgttcccgtccgtttctcagcagtaacgattgacatgcaggagagaacaaacatggaattgcagtacgacaaagacagtaaggagagaatcccttacgagcactacatggagttgcttcagaaagcagatccggaagaaatcagtgcgagaacaggaattccttacgaccaacaatcacaaacctttacccttcatctgttaggtgttgcctatcaggttcactttccggattatgtagtaagacacgatccggagagtacggtaggatattatccgctggaaaacgcgatcaatgcccggattctggtacttcgttacctggtggaaggacacgctgctccgtcgaccggaaaatatctgacttaccgggagacgccgtggggaacggtatatctgaaacagtttcagggcagatgcttgatgcgtcttgcttatgggtttggcaacaaacaggaagcgttccggtctgcaatggaaaagatcggcgcaacacctctggaacacggagatatcgcttatgagttcgaagtgatcgatggtttccgtgtacagatgattttatgggcaggagatgacgaatttcctccgtcatctcagattttattctctgacaattttcccattgcttttcaggcagaggatatggctgtagtgggcgatgtatcgatcactatgataaaagcactggcataactgaattataatttactgatttatttgtaaaaaaatgtgaaacggggaatgactttcattcccgacagtaggagaatgcaaatgagcaaggatagtagagtaaacattgcgcgtaaagtgcttcaggatgggaagttgcctgttgacgaaggaaaccgcgaaatatttccacgatgtaatgttgcgtccgctactgcattaaagatagattcagtttctgtgttatctgcctttggtgtagtatactgctatacctgagaaaggaaaatacaatgaaaaaactgaatggtagaactatcgtttttgcagctgttttagtggcaatgaatctggtgttaagccgggtgctggcgatcaatatcggtccaaccatccgaattacgataagtgcaacaccgatttatctggcaagtctctggtttggaccgctggtagggggaatctgcggtggtctgggagatctgcttgggtgcctgatccagggatatgcaccgaatccactgatcctggtatcttctgtactttccggtgtactgccggcagtgttcaaaaagtacgtgttccgggatagaataaatacctggaaaatagcagtgatgctgattgtaaacggaatcataggttcccttggatttacagtacttggtcttcatgtatattacgcaacaccatggagtgtactgtatgcaacgagaacgcttcagacgatcgcgcttacaattgcaaatacaattctggtttccctcttatatcagagtgcactgaccccgtatgtgaatcaggtctttgcgtctcagaaaaccagagaagtataaaaggaggtaaatgatatgggatacaaaacagacattgaaatcgcacaggaatgcgaaatgaaaccgatcaccgagatcgcagcgaaagcaggtatcgatgacaaatatctggagcagtatggaaaatacaaagcaaaaatcgactacaatctgttaagagagtctgatgctccggacggaaaactgatcctgatgactgccatcaacccgacaccggcaggtgaaggaaaaacaacaacaaccgtaggtctggcagatgccctgcagaaaatgggcaagaaagttatggtagctttaagagaaccatccttaggaccggtcttcggtgtaaaaggtggagcagccggcggcggatacgcacaggtagttccgatggaagatattaacctgcactttaccggtgacttccatgccatcggcgcagctaacaacctgctggcagccatgatcgacaaccacatcttccagggaaatgctctgaacattgacccgagaaagatcacctggaaacgttgtgtagatatgaacgaccgtcagcttcgtaatgtcgtagacggactcggcggaaagaccaatggtatgccgagagaagacggttacgatatcaccgtagcaagtgagattatggcagttctgtgtctggcaagcgatatcaacgacctgaaagaacgtctgggacgtatcatcattggatatacatacggtaaagtggcagaacagaaaccgataaccgcacacgatctgcatgcagaaggtgcaatgaccgccctgttaaaagatgccctgaaaccgaacctggtacagacactggaacatgtaccggcaatcgtacacggcggaccattcgccaacatcgcacacggatgtaactctgtaaccgcaaccaagatggctctgaaactggctgactatgcaatcacagaagccggattcggtgcagatctgggcgctgagaaattcctggatatcaagtgccgtatggcaggactgaaaccgtccgcagttgttatcgtagcaaccgtacgtgccctgaaatacaacggcggcgttccgaaagctgagctgaatgcagaaaacctggaagctctggaaaaaggtatgccaaacctgttaaaacacgtaagcaacatcaagaatgtatacaaactgccatgtgtagttgccatcaatgcattcccgaccgataccaaagcagaactggatctggtagaagaaaaatgtaaagaactgggcgtaaacgtagctctgtctgaagtatgggcaaaaggcggcgaaggcggtctgaaactggctgaagaagtgatccgtctggtagaggaaccaaacgacttcacatacgcttacgaactggaaggttccatcgaagacaaactgaaccagatcgtacagaaagtatacggtggaaaacgtgtcgttctgacagcaaatgctcagaaacaggcaaaacagttagaggctcttggcttcggcaactgcccgatctgtgtggctaagacacagtacagcctgaccgatgaccagaccaaactgggtgcaccgacagactttgaagtaaccgtaagaaacctgaaagtttccgcaggtgccggcttcatcgtagctctgaccggcgagatcatgaccatgcctggactgccgaaagtaccggctgctgagaagatcgatgtagatgagacaggaaaaattactggtctgttctaagaatcatcgtaactgttcagtaccttcacagttacgaatatttcctactgaatagttacgaataatccatatggctgcccggttagccgggcagctgtataaaaaataagcggaggaaagaagcaatgggattttcaactgtaccatgcaatgaatttgtagaagtattggcttccaaagcaccggttccgggtggcggcggcgcatctgctctggttggagcaatcggaaccgctctgggcaacatggtaggaagccttaccgtaggtaagaaaaaatatgcggatgtagaagaggagatgtgggagctgaagaaaaaagctgatgaacttcagaaagaactgctgcatctgatcgaacgtgatgcggaagttttcgaaccactctccaaagcatacggaatgccgagagagaccgaagaggaaaaagcagagaaagccagagttatggaaatcgtcctgaaagatgcctgctctgtaccgatggaaatcatggaaaaatgctgtgaagcgatcgagatcatcgtggaatttgcagcaaaaggctccacactggcaatcagcgatgccggtgtaggcgcagcattctgcaaagcagctttacagggtgccagcctgaacgtatacatcaataccaaatccatgaaaaacagagaatacgcagaggaactgaatgcaaaatgtgacgcaatgctggaaaaatataccaagattgcagacgaagtttttgaaagcgtattaggcagactgaaatagggaggataaacagaaatggcaaaacagttattaggaaaagaagtaaccgcagctctgaatgaaaaaatcaaagcaaacgttgcagctttaaaagaaaaaggcatcaacccgacactgggtattatccgtgtaggtgaaaacggaagtgatatctcttacgaaagaggagcaaccaaacgttgcgagactctgggtgtagagtgtgtaaaattcctgcttccggaagatgtatctcaggaagaacttttggctaccatcgataaagtaaacaaagatgacagcattcacggcgtactgttattccgtccgctgccaaaacatctggatcagtctgtgatcgaaaacgctctggatcctgcaaaagatgtggactgtatgacagacggttccatgtccggcgtatttaccggaaaacaggttggattccctccatgtactccgcaggcttgtatggagatcctggatcattacggaatcgactgcacaggtaaaaaagcagttgtgatcggccgtagcctggtagtaggaaaaccggcagcgatgatgctgatcaagaaaaatgcaactgttaccgtatgccatacaaaaactgttgacatgccgtctgtagcaaaagaagcagatatcatcatcgtagcagcaggtcgtgcaggcgttgttggcgctgactatgtaaaaccgggtcagaccatcatcgatgtaggtatcaatgtaaatgcagaaggaaaactctgcggtgacgtggattacgcagctgtagagccgatcgtagatgcaatcactccggtaccgggcggtgttggaagtgttaccacatctgttctggtaggacatgtggtagaagcagctatgagaaaatatatgtaagcgcggaatcattttatcagaacataataaaatgatatagatcttccggggacagaaacgaatatccgaatctgttcccggaagattttttatttcatatgttgtttctctgataacccttgaaaaaatccgtatttctgttaaaatatctgtagtgcgattttcacgtattacatggaaaccgtatacgatgtgagtaaacagtcgtacagaatagttctgtacagcaagaggaggaaaacatgagtaaaaaacctaccgttttaatgattttagatggttatggattaaacgacaagtgcgaagcaaacgcagtttgtgaaggaaaaacaccggttatggatcagctgatgtctcagtgcccgtttgtaaaaggtaacgcaagcggcatggcagtaggtcttccggaaggacagatgggtaactcagaagttggacatctgaatatgggtgcaggtcgtatcgtatatcaggaactgacaagaatcaccaaagagatccaggacggcgatttcttcaagaacgaagcgctgctggcagctgtaaagaatgcaaaagagaacaactctgcactgcattttatgggtttgttatctgatggtggtgtacacagccacaatacacatctgtatggtctgctggaactggcaaaaagagaaggtctggaaaaagtatatgtacactgcttcctggatggccgtgacactccgccggcatccggaaaaggttatgtagaagagctgcagactaagatgaaagaaattggtgttggcgagatcgcaaccgttgcaggacgttactatgcaatggatcgtgataaccgctgggatcgtgtagaactggcattcaaagccatgacaaaaggcgaaggcgtaaaaggaacagacgcagcagaagctgtacaggcttcctacgatgcagaaaaaaccgatgaattcgttctgccaaccgttatcgaaaaagacggcaaaccggttgcaaccgttcaggataaagattctgttgtattcttcaacttccgtcctgaccgtgcacgtgagatcacaagagcattctgcgatgatgatttcaaaggtttcgcacgtgagaaaaaactggatgtaactttcgtatgcttcaccgattacgatgaaactatcggaaacaaactggtagcattcgtaaaacaggagatcaaaaacacattcggcgagtacctggcagctcataacatgacacaggctcgtatcgctgagacagaaaaatatgcacacgttaccttcttcttcaacggtggtgtggaagagccgaacaagggcgaagacagaatcctggttaaatccccgaaggtagcaacctacgatctgaaaccggagatgagtgcatacgaagtatgtgacaaactggtagatgcgatcaaatccgacaaatatgatgtgattatcatcaacttcgctaacccggatatggttggacataccggtgtggaagcagcagcaatcaaagcagtagaagttgttgacgagtgcgtaggacgtgctgttgacgctctgaaagaagtagacggacagatgttcatttgcgcagaccacggaaactgcgaacaactggtag

SEQ ID NO: 2676 - DNA, 8521 bp, Unknown
  gut microbiota DNA sequence
agaactttcgaggaatgtgtttcactgttcagttatcaaagatcatttttcgcattgccgtttgtctcaaacagctttgccattatatcatgttgttttctgcttgtcaagaagtttttttcaactttttttgaagttatttttaactttttcgactcatcagcgccaaccttgacatcttatcacaactcactttatattgtcaagaacttttttcatttcttttttcaaccgtgtttgtcagctgcaactctgatataatagcatttatttctgttttcgtcaactaccttttgacatttttttacattttcttttatatgcttcttacattatcttttctgttccagaaaacgaactgcatctttgatgttctccaccggaatcagggtgatttctgtttcctgtcctacacttttcatgcatgctgccggaaggattactgtggtaaagcccagtttttttgcttcctgtactctctgttctgccatgcttaccgcacgcacttcgccgctcagaccaacctctccgaataccagcactttatcatcaatcacaatatctttataactcgataccaccgcaagcaggattcccaggtccaccgccggttcattcatacggattccaccggcgatattgacatatgcatcgctcgccgaaagatggagccccaggcgtttttccagtactgccatcaaaagattgactctgttataatccgtacctgccgccgttcttctcggcataccgaagttgctggcacatacaagcgcctggatttctatcaggatcggtctggtcccttccatggagcaggctactacggaaccggatgctccctccggtcttcccgccagcataaactccgaaggattttccacttccaccagcccttcttcgcgcatctcgaaaacaccgatctcattggtggagccaaaacggttctttactccacgcaggatccggtaagatgcatggcggtctccctcaaaataaagcaccgtatctaccatgtgttccaacactctcggtcctgctacatttccgtcttttgtcacatgaccgacgataaatacggaaacgccaagcccttttgctatctgaagcagcaccccggtggattctcttacctgggatacacttccgggagccgaagatacctcctcattgtacatagtctggatcgagtcgatcacaaccaccgttggtttctccttttcgatcacctggcggatcgtgtccagattggtctcgcacagtagccgtagccgatctccgaacgcaccgatcctctgtgcccgcagcttgatctgttttaaggattcctcaccggagatataaagaaccgatacctgatctgccagatttctgcacacctgcaaaagaagcgtagattttccgatacccggatcaccgcctaccagtgtcatcgagccctgcacgattccaccaccaagaactcggtccagttctttgatgccagtatggatgcggtcttcttcatccagggaaatctcggaaagtgccacgggttctgctttctttcttcctgctgcctcctgatgttttgcctggctcggactcacggtctcttccacaaacgtattccagcttttgcatccaggacactgtcccatccattttggtgattcatatccacattcctgacagaaaaatactgttttcttcgcttttgccatgctcttttctactcctgttcatcctcatatacaacataagctgccgccctaccgttttccggtaagacgacagctctttttatcacaagcttttgattgcttataatttttcaatctctacgcacacggctttatccggggataggtctgcgctgaaagataattttcctcccagattggttttcatatgaccaacgctcacatcatccagaagaactttgtattcgcaatctgcttccatctctactgtaatctgtgtattctctgttccttccacagaaaataccataccgttatttccgatcttcatatctaaaactgtggttcccggaacggattcgtatacgaacattccgtttctctccagctttgtaatctctttaaaggtttttactttatataagtcaccatcatattcataatcagaaagtttcgtcttggtgtccagttcataattaccgaaactgattcctccagctgcttctgttctgatcaattctttaatcgtagccatagtaccctcctagttttcctctgtgcgttccgtcatctctgacgttgcttttgttttgtatatattatataataaattcagaaaaacatctagtcattgactgaaaatttaataacttttttagatacagacacaataacccggtctcctctgtggatctttccttccaggatttcctccgccatcttgtcttccagtttgttctggatcgctcttttcaacggtcgggcaccgtatttgctgtcaaatccgctttctgccagatagtctttcacactgcttcgtacaatcagttcgatatccaactgttctttgcatcgattttccagttttttcaccagaatattgacgatctgccggatctcctgtttatctaacatatggaagaccaggatctcatcaatacggtttaagaattccggcttgaagatccttctcacttcttccataacgccgcgtttcatatcttcgtaatcttttttcttgtcttctccctgagaaaatccaagacgttttggttctacgatcgactgtgcaccggcattggatgtcatgatgatacaggtctgtttgaaatccacctttcttccctgtgcatcggtgatatgaccgtcatccagcacctgtaataagatgttaaatacatccggatgtgctttttcaatctcatcgaacaggatcacactgtatggatttctccggatcttttcggagagctgaccgccttcctcatatcccacatatcccggtggtgaaccgatcagtttagatacactgtgcttttccatgtattccgacatatccacacggatcatcgcctgttcggagccgaagactgtctctgccagtgctttagacagttccgtcttacctacaccggttggtccgagaaacaggaaggaaccgatcggtcttgccggatctttcaagcccacgcgcccacgtttgatcgctttggcgactgcttccaccgcttcttcctgaccgattacccgtttgtgcaattctttttccagacctgccaaacgtttggactctttctgtgcaagtttctgtaccggaatcttggtccagctggatacaatctgcgcgatattttcttcggtcacctgcatttttttatttttatagcgctgttcctgacgttttttcaatttttcgtaggatccttccagttctttctgttcttcctgtaactcccgtgctcttgaaaaatcgcctgctcgaatcgcttcttctttttccccggaaattacatgcaagttctgctccatctcttttaactgtggaggcactgcaatccctgccagctgtacccgcgaagacgcttcatccatcagatcgatggctttgtccggcagatgacgatcagcgatgtagcggatagacatcttgactgctgcctccagcgcatcatcggtaatggtaactccgtgatgtttttcataataaggacgcagtcccttcaggatctcaaccgcctgctcttcggtcggttcttctaccgtaaccggctgaaatcttcgttccagtgccgcatctttttcaatatgttttctgtactcttcaatcgtagtcgcaccgatgatctgaatctctcccctcgaaagagacggctttaaaatattggacgcgtccagtgctccttccgcaccgccagctccgatgatcgtatgcagttcatcaataaacagcaaaatccccggatgttccatcacttctgcgatcacttttttgattctttcttcaaattccccgcggtatttggatcctgccaccataccggacagatccagaacgaccagccgtctgtttttcattttttccggcaccaatccctgtgcgatccgctgggcaagtccttctactaccgctgtttttccaactcccggttcgccgatcagacacggattatttttcgtccgacggcttaagatctggatcacgcgtccgatctcttcttctcttccgaccaccggatccataactccctgccgcgccatctcggtaaggtctctgctgtactgatccagcgtcggcgtgcctgtagccgcttcattttgggatcttgcattgctattatctcttggattcgcaatttcttctcccatcgctgtcagaacttcattctgcagttttcggatatttactcccatcgtgtgcagcagacgggttcccatacagtctacttcccgcagcattgcaagcaacagatgttctgttccgattttttcactgcgaagatcatctgcctcttccacagctccctctaacattcttgctgcgcgcggggtatatcctgcccggtcagcagtcagcacgttgctctcttccggtgctaccagtttccggatcatttccatcagccgttcttcactgattcccatatcacgcagaaccataccggctgttccctcttcttcgtgtaaaagacctgccagcaaatgttccgttccgatataactatgtttgcatctgcgcgctgtcttttccgcatattttaccgctgtctttgcctgattcgtatattgtgtactcatgcagcgttctatcctccatttttcgtgtcctttttgcccgcagattattccaacgggtcttcgggggattgctcccacatatcatagatttcatccagcagctgatgtgcttcctgtctggatatattatggcatcttccctttgccagaatgatatacagattccgacgcatctcttccagtgccagcaatttattcgaatcgatgcagatcaccgcaccttttctccggtctatggatacgatgccctcttttctgagaaccgcgtatgctttatttactgtatgcatattgatcccgatacattctgccatctgtcttaccgacggaagcgtatctccgtcctgcagtctggatgtcgcgattcccagtatgatctggttgcgaagctgcatataaatcgcttcttcactgttaaagtctatctccagcaattctatctgcatctgttcaccctgctttctcttttctgtgtgttattcatcatataacagatcccacggtttgtaaagcagacccttactgatattcccggatcagacagtattgtttcaggttgaagttcttttttaagattccatatactttaaactggaactttttataaaattccagatttttttcgttatgtgtttccagtgaaatcatcattccgtgttcctgggcatagcggattgcttcatccatcagcatcgctgccattccgtgatgctgcatctcaggatgaacagccaggtaaataatatgcagccgctttgtctggtgaagctgctgtgtccagctcgaattcagatagtcaccgcctttgataaaattataaaatgtatgaaaagacggatcctccttgatcagatagatgtcattttgcagggttgccttcgcttctgtcagcaggaaatgaaacagattgtaggactctgtctcatcggataccaccagtacactgttgagttcttcgctgtccgcaaaaatctcacacgtttcatagaattcatccatatcgcagtgaaacagctccggcatcagacgttttctcacatccggatccgggatcagtgtctcgtacagtggatcgtgtgcaaaacaaatgtttaaaagttcctctaacttaggtaaatcttctttttttacccgatataacttatcgctttccatatttttcagcgggtttccccgtcacctttcttattgttcctgtatcggatgcacaaaatgttctttcacggtttgataaatctcttccattgtctgttctgccattttgtactgtttatcgattacttttgcaagtgctgctgcctcttcccgacagtctttttctcctgcttcttcttttttcagcagctgttttaccagatcgtacagattttcatgctgcatcagacgtctgtatccccatttcagccgttctttcggctgatggtacacataatcggtaaaatgtctgtagacttctttatcaaacataaaagcataggcattgttatccacatcatacagttttctgagtgccaccgaaagttctccctcttcgagattctttttggctccctctaaaaggtgaatatttctcagtaaaatctcatatggatagaatacatttccgtaccagtcaatgcggacaaatgcatcctgttctgttttgaagcgtttcagaagttctgtctctgtctgtcgcaggctctgatacagtatttcccgttgttccggatcttcgcacgctttatatgcactgtttttctgcatgatccaccggtaattttcttcctgctgtttttctgctccggtcagtaatttgctgattgtttcgtatttttcttccagacagctgttttcacaggattttaccagttccagaccttcctgtgcgcgtttcataacaccggtaaaggaaagtggtactacggctgtcgcgtcgattgccagaatcagcagtgcatacagttcatgatggaactggtagacctgcggatcgtagtattcgtcgttgtcaaactgtgagtgatagtgtgtctccataaaacttccgccggtaaaatcatttaccatggacgggattcctgcgattgccatcgaaaagtcatcggaccaggtttcgatcggagataccacggatgcatcctccggatacgctctcgtaagaaccgggaggtcttccagaaattgttccaaaaatggctgatattcataacagcttcggatccgcgccccggctccgtgtgccagcgccggaagttcaaagttcaggtcggcgattacttttcccacccattccggatgtgcggtaaagacctgttcgtaggcacctgtcgaccagtcaaaatccgaatcgatcacgccccattcttctgctgccatcgcgcagatcaggatcgtattttccggctgaatcttcgcatcgatcaatgctttcgcgatcccgaacatcattgccaccgccgtattatcatcctgaaatccgtcaaaatacgaatcgtaatgagcagaaagcacgatcatacggtctttgcgttttcccggaatcttaccagtgatattataggttttgcactccggcatcacccggctgtccgcttcgagtgtcacccatagttcccggctctgctggttatccagctgttctttcagccactgggcgtctcttctggatatggaaaatgcaggagcatctgcaggtcctgcgatatcctgtgcatttaacgcgtcttcatcaatctcgccgtaaccgccctgctgcaccgcgatcagtgcttttgcgcctttcagatgtgcctgatataccggaaaattgatccaccattcgtcacgctgattaatgtcaactaataccagtttattttttacgtcgatgtctttatagtctaactctgttccttttccaacatagaccagtggatattcttccgctccatcggtcacacagttggtctggtaggctcccagctggatctcacgtttctttccgttttcatccagcacatacagaaccgctttgcgaaattcccacccatccacggtaatctcgtctttggttacctcggacaggccaatctcttccatctctttttttaacatctcgccggtcagaaactctgcttttgatcctgccgaccgatatcccagcaccggattacaccgatacatctccatacgttttgccagttcataggaatatggaatatccagatgtgttaatactttctctttctcgttcattgataccctcctgccaaacggtgcctgacatttgctgtcgggatcgtatgtttatgtcggctttattataccgcgcgcacctctgactgtctattttaatttttttgcataatttttcaaaaaagtgttgacttttctgttttacggggatataatatcacttgtctttcagataaagaaagcgcgcgggagtgctggaattggcagacaggcaagactaaggatcttgtgggtgtatgctcgtgtgggttcaagtcccatctcccgcatacagagaaaagggcagaaagctttgattttattcaggttttctgctttttttattgtctgaatgatacaatttttgtctcacgctgtctcacgttttttggtggtggggctactatatcttgtggtggctgtagagcggataaaaccagttggtctttttcttcgttgttgattcgggtgaaaatgtaatgttttaatgttactgttcactggtaatatcccgcgaggtgttttttgtgagcgaaggtcacagaaaacccgagacatatcgcgcgaat

SEQ ID NO: 2677 - DNA, 614 bp, Unknown
  gut microbiota DNA sequence
atttaacagaataaggagatttaggtggatataggataaaagaaaaccggattacacagctgtgatttgtaaaattacatcatcttgaagcaagaaaaaagcagtgatataatcccgtctttgacagttaaaaaaataaaaactgctgtaagtccaacgtttatcggctttacagcagtttggatgcgatttttaaaatatagtaatgttttcattacagataaaaaattgaaaaacactgtaaaattaagggattccaatacttatcgaagaatagataagtgcttataaagagaatactattttattcacgaaaggtcaattattatagacattactataatttaaaacaaattatttgacaaagaacaagtagagtttatgcgggtttaacggactttttgatagatgcaactgtcaaactcccgggagtgaacagtaacaattgccggaaagattccggatgtaatggtttttgttgtgttgacagggtatttgagatggcgtatactgagtttagtgatcgttctgtggaaacttgcgaagcctgcaggcgcggggggagggtatgagagtctctccctctttttgttttatgaaatgctagagcgtgt

SEQ ID NO: 2678 - DNA, 1369 bp, Unknown
  gut microbiota DNA sequence
agcggaggaatggctacaaaacaaaaggaggaaaaaaatgagcgaatttaagatgactaccatcgaagagatggaagcggccaccaatcgactgttggaaacaggagcaaaggtaggagctgacgcatggcagttccgtgtaaaaaaccagactccacactgtaaatttggtgaacagggtgtctgttgtagaatctgtgcaatgggaccttgccgtattaccccgaaggctccgaaaggaatctgcggatgtgatgctcacggtatcgtaggacgtaacttcctgaaatttacagcagctggagcagctactcactctgaccatggtcgtgagatctgccacactctgtactgtacagcagaagacggaaactacaaagtaaaagatcctgagaaactgcttcgtatcgcaaaagaatggggcgttgagacagaaggaaaagatatctatgatctggctcatgagatggctgagatcggtctgatggaatatggtaaaccattcggataccagagattcctggacagaatgccggaaggacagaaagaaaaactgatcgagaacgagattgcaccgcgtgcgatcgaccgtgaagtttccacttccttacatatggctcatatgggatgctcttctctgccggaagcattggtaaaacagtctctgcgtgccggtatggcagatggatggggcggttccatgatgggaacagagttctctgatgtcctgttcggaactccgaagccaatcgatacagaagcaaacctgggtgttatggttgctgaaaacgtaaacatcgttgtacacggacatgatccgagcctttccgagatgatctgcgaatatgctgacagcccggaaatgatcgcatacgcaaaagaaatgggagcaaaaggaatcaccgtatccggtgtatgctgtacttccaacgaagtagctatgcgtcgtggtgttccgatggcaggtaacttcctgcagcaggaaaacgtggttctgacaggtgcctgcgaagcgatcgttgtagacgttcagtgtatcttcccggcgttaggacctctgagcaaatgtttccatacaaaattcgtgacaacttctccgatcgctcagatgccagattctgaatttatccgtttcaacgctgagacagcaggagaaaatgcaaaagcaatcgtaaagatggcaattgaaaacttcaagaacagaaaaccggaactggtacatatcccggatatgaaagcaaaagcaaccgttggttattctgtagaagcaatcgtaaaaactctggatggagttaccaacagccaggttgacgaaaccggaacaacaaaaccacttctggaatgtattacttccggtgttatccgtggt

SEQ ID NO: 2679 - DNA, 677 bp, Unknown
  gut microbiota DNA sequence
aggtgcaaaaaattggtgaggacggcggctggataaagattcgctaccagggacaggaagcctgggtatacgaggattatatgtcggagaaaaacagccggaaagaggaaacaaaaacagaaacatcgaaacagacagatcgttctgccgatgagaaatcagaaacgtatcatttcggaaatgctggaaaagaccagacagattaacgaaaccagatggtgacaaaagattaaggaaaaagtgtgagggatagacccctcataaggattcacaggaggacatgccctgtggcatggaaaaacaatggcgaaaaagagaatgacaaaaaaagaaagaatgcggcaaagaagacggaaacagagactgatgtttggcggtggattgctgcttgtggcggttgtatttaccgcgatcctgcttctgctcagttccaaaggatgcggaccatcaaaagcagaggacggtgaggtggaagcagtgccgtccgcggaggctacagaggagccgacagctgaaccgacaccgacggcagaaccggtaccatcggtcgatattagcgatatcaacagccagaccgggattctggtgagactttctgacggtgaagtagtggcagaaaaagacgcagatgcaaagatttatcctgcatccatgacaaagatcatgacagcgatcgt

SEQ ID NO: 2680 - DNA, 341 bp, Unknown
  gut microbiota DNA sequence
ccgccgtgtcttactgcatcccagtcgatggtcgcatcttttccatgtacatggacgatctttttgcaccattttctcagctctgtcacagggtcgatcagctgtaccatctggtgggtcggctcccattccagaccgaagttgtcattctttacttcctcaaacatcacttcccaggctttcgggttgaaaccgatgttgcaggtggcatgttcccaggttccatccatcaggcagttttcgatgcccagtttcacacctttttcttctgcaaggtctgccagttcacggaacacttttccgaactcttcgtatgcggattctaccggttttccttccca

SEQ ID NO: 2681 - DNA, 393 bp, Unknown
  gut microbiota DNA sequence
aagatggatgaggagccactggtgatcatggcagatggccgccggatgtggcgtgttgtggagaatctttataataatattgccaagtatgccatgccgaatacgagagtgtatgtggaggcgaaaagggtcggctgcagagtcgtgctggagatcaagaatatctcggaaaactcgttgaatatcaaggcggaggaactgacggagcgttttatccgcggagatgtgtcgagaagcacggaaggaagcggactgggattgtcgattgccaagaaccttgtgggattgcaggggggaacctttgatatttacctggatggggatttgtttaaggttgtgattacgtttgaggcggtggataaagagagttagataagggttgtataaggagcc

SEQ ID NO: 2682 - DNA, 947 bp, Unknown
  gut microbiota DNA sequence
taccggatacgggatttgtaaaaggactggtggaactggatgcgtacggatatatcaaagccggcgaagacggaagaaccagcgtgccgggcatctacgcagcaggggacatccgaaccaaggaactgcgccagatcattacggcggcagcagacggcgctaactgcgtgaattcggcacagcaggatctgtatgataccaggggcaaaagggcagaaggttgacgcaagtttgcttgcagaaagattttgagtttgtccgacatctttggacaggggatgaaacaatagaaacagaagaggaatgttgaaagcatatagtacagagaaatagaaaaagtatctctttgcactgtatgctttttactacagtaataacaaatctgtagagcgacaaggcttgtgagctgtgtattgtgatgtggataacagaaaaattgacgaaagccgggggaaagatatgacgaaccgaagtgtcgttacaagaaagacacagatccgccctgtaaaaacgcaaaacggacaggtgccacataggaaaaatgccggtgagaaaccggcgaaaacagcgataaaaagaggcttttgttaaaaagtaccaagttgtgtctgaaattcacacaattgcggtggatagtgaaaaagttatactccagttatccacacaggaaaatgctggaaatgccgtaaaatcaagttatacacaaagttatccactttatccacattttttcgtgtggacaaccgtgatttacataacgaaaaaagaaacaaatgttttgtgaataagtgataaatcgctgtttcgacaaaaagagtgtggaaaacctattgacttttttgtagtcaaatagtggagaaaattgtagtgaattttcaaacaatttaaagaaaacacgattttgtgtgaaagaggaaatttaacactttttatcttgcaatagaagt

SEQ ID NO: 2683 - DNA, 3056 bp, Unknown
  gut microbiota DNA sequence
agctcaaaacgcccctgcccacgtctgctgttcctggctttccccgagcggcggcgtccgtcaaacgaccacaaaaaaaagaagcacccccacttctcgcaggaatgcccctcccttttatacaaactggttccgatccacctcatacacatactcaatggatttcatcttctccaccagttcttccttctcgatgcccttatcctcacaaagagcatccagactggaataaaaatctctcagctgcgtatttacataactgagtaacatcaccggatctttcggtatcatctcaaaactcctttatacagactgtacagaagctgtcaactcaccatccgtcacatccaggacgatcgtatcatcctgaccgacttttccaccgaggatcatctttgcagccagtgtttccacatatttctgcagataacgtttcagcggacgcgcaccgtataccggatcataaccgccctcgatgacgtaacttttcgccgcatcagtcagacggatatggatttcctgatctgccagacggttgttcagctctgccattaacaggtctacgataccaccgatgttgtctttggtcaatggtttaaacataatgatttcatccagacggttcaaaaactccggacggaaatgtccacgcaggtcattctgtaccatctcagccgcttccggtttgatgctgccatcctcttcgataccatccagcagataggacgaaccgatgttagatgtcatgatcaggatcgtattcttgaagtctacagtacgaccctgagaatcggtgatccggccatcatccagtacctgtaacagtacgttaaatacatccggatgcgctttctcaatctcatcgaacagaactaccgagtacggttttcttctgactgcctcggtcagctgaccaccttcctcgtagcctacatatcccggaggcgctccgatcagacgggatacggagtatttctccatatactcactcatatcgattcgcaccatgttgttttcatcatcaaacagtgtctgcgccagtgttttggcaagctcggtcttaccgacaccggtaggtccaaggaacaggaaggatccgatcggcttcgtaggatctttgatacccgctttggaacgaatgatcgcatcggtcactttcgttaccgcttcgtcctgtccgatcacacgtttgtgaaggacatcttccagccccaggatctttgtcttttctccttccgtcagttttgccaccggaataccggtccatctggaaatgattcttgcaatctcttcatcggtaacactctcatgtaccagggagagatcctcatttttcactttctcttcctcgatctccagctgtttttgcagtttcggcagttcgccgtactgtaattccgcagccttgttcagatcgtactgctgctgtgccacctggatctggcggttcagatcttcgatctgttcacgcagtgtggaaagtttctctacggaatgtttctcattttcccactgtgctttctgtacggaaaatgcatctttgtattctgccagttctttttgcagatctgccagacgttcctgactgagtttgtcggtctcttttttcagcgccgcttcctcaatctccatctgcatgattttacgctgctgttcatccagttctgccggaagagaatccagctcggtcttgatcagtgcgcaggcttcatccaccaggtcgatagctttatccggcaggaaacggtcggagatataacggttcgaaagtgttgccgctgccaccagggcaccatccgtaatttttactccatgatatacctcataccgttctttcagtccacgaaggatggaaatggtatcttccacggacggttcatccaccagtaccggctggaaacgacgttccagagcggcatctttttcgatatactgacggtactcatccagtgtggtagcaccgatacagtgcagttctccacgggcaagcatcggttttaacatgttgccggcatccatcgcaccgtcggtttttccggctccgacgatcagatgcagttcatcgataaacagaatgatctttccttcgctctttctgacttcttccagaacggctttcagacgttcctcgaattcaccacgatattttgcaccggctaccagtgcacccatatccagggcgaagatcgttttgtctttcagtccttccggtacatcgccgcggacgattcgctgtgccagtccttctacagctgccgttttacctacaccgggttcaccgatcagtaccgggttgttttttgtttttctcgaaagaatacggatcacatttcgaatctcgttgtcacgaccgatgaccggatccagtttctgatttctcgcacgctctaccagatcctgaccgtattttgccagggtatcgtaggttgcttccgggttatcggaggtaactctctggtttcctcttacggtgctcaatgcctgtaagaagcgttctcttgtaattccatattcctggaacagttttttcatgcttggactcggataacggagcattgccagaaacagatgttccacggaaacatattcgtctcccatggctttagcttcgtcctcaccgcttaccagtaccttattcaggtattgtccgatatattgctgtccgccggagactttgactctggcgttcagggcattttccacgttattcagaaaatgttctttgttaatctccatcttttcgatcatctttaagatcagactgtcttcctgatgaagcagattatacagtaaatgctcctgctcgatctcctggttgccgaagtcatatgcggtcttttccaggttttgaacagcctgcaatgatttttgcgtgaatttgctgatattcataagcgcccctccttttggaacacattgttttctttgttctagttgcaatataacacatattttagcactcgtcaagagtgagtgctaataatttttaatttttttccagccagacgcgaaagaggcggaaccggttaggtgtttacttttaaattatattagta

SEQ ID NO: 2684 - DNA, 956 bp, Unknown
  gut microbiota DNA sequence
tcacgcagtatacagttatttacgaaatgatgtgctagttgctaaattttgtccttatgttgctaaaatcttttaaaacagactgtataatacgtcttccattatttatatacaaaaaagggataccgtatgttcaggtacggtatccccagctttgacggatctgtggtaatatttcgctcatggaccagtgttttttggtgttggcggggctgtttgggtcgttgacggtaattgcaccgttttcatcgataccggtcagaacgataaagtgacctgtgtaggtaaaatcacccggatacatggaacagatcagagggatgcctgaccgcagggcggcaaggatgttttcttgtgttaccgggatgttttctgctgtgaggcccaggttgttggcaccttcggtcatcagcgaccaggaggttccttcacccggaacgtaatagccttctttttctgaaaactgagctacggtcaggggattccatgtttcggagccggtcagaccacaggtgatcatggacaggcaggttggaccacagccggtgacggcaaggaaatcgctgccgtaggtttcatacccccagcgttcatcccactgcaaaaaatacggtatctcactgttttctctggcagcttccacttcggatgaaatatctatcgtctgatagtgtcttcgcttcggataattttttacaaaatctgtcgcctccggatatttttcttccatgttaagaagactctccggaatctgctcgtgctgccggatccaggttttccctgccagcacaacgatgcagaatgtggccagcaaaccgacggtccagactatttttttctgtgtcatctgaaatttatgaccgctttgattatgtattttttgctgtttccgatggtttgcctgtgatgccgctgtcgctgcaacgaatgcttcctgttttatcctgtaatttttt

SEQ ID NO: 2685 - DNA, 1633 bp, Unknown
  gut microbiota DNA sequence
ctcatcatacagttcacttgccgccgcatcaatggcaaataccacatcgcttcccggtgtgtatcctgcgtcttcaatcgcttctgtcagaaattccagcacctgttccgcgctttccagatccggcgcgaaaccgccctcatcaccgaccgcggtagacagccccttgtgttttaaaaggatcttcaagcgctgatagatctccgctcccatgcgtactgcctcccgaaagctttccgctcccaccggcatgatcatgaactcctgaagatctaccgtattgtccgcgtggcgccctccgttcagaatgttcatcatcggaaccggcatccgcaccgcatgcacgcccccgagatactgatacaatggcagacgcagcgctttcgccgcagcacgggctactgcaagggacacgccaagtgtcgcatttgctcccaggctgcttttattgtcggttccgtcttcctggatcagcagttggtcaatataggactgattcagcgcattttctcctacaatctgttctgccagacggacattgacatttcgtaccgcctgttccacaccaagaccaccgaagcgttcttctccgtcccgcagttccacagcctcatatttgccggtagatgctcccgacggcacaatggctcttcctgtatatccatccactcccatgattccttctcctaccgtcacttccacttccaccgtaggattggatctggaatcgaggacttctcttgcgtagattcttcgaatcggtagatatcgatacatcacatattcctcctgtttctgtcatctgctgctctttttcagtatgtccgaagcagagaaaaatatgtgtgtttcatttcttatttatgcaaaaaatatattctattgtcatttcataacacttatgttatacttttccatattaattattggaaattgatttccggcaggagtggttctgtgaataccttacataagtcgaaaagaaatatcgcattagtgatcatgtttttcatgcttggaatgtgttttgctccatatcagacacattcttctttgtatgcttccatttcagccgattctgccactttctattccggatcggataccatatctgccaataatacgactccctgcaccagggaaatgctacaggagcgcgtttatactctctgtgaacagtacctttcgcgcaataccaatgcacgaaacagtataaacaggcttgcatatactccaggtctttattttgttccccgcctttcacaaaattattattttatttctttcattattctgttctgtcccgtattaccgggcaaaaaaatcatcagttatcttcataaatcggacggtaaaaaacgactctgattctcattttctgtatcccattattattactgtaatgggctgtttttgatgcaaaaaaacgagtgtatttcaggctctgcctgatgaacggcagacagcctgaggaaatggagaacgaaatgggtcagaatatttttgtaggaattttatgtgtattagctctgggtgcctgtgtatgggcatggtggatcagtcgtggagactcttccgaaaataacaatcattccaacgaaagtgaggacagaaaaaatgagaaaaactaaat

SEQ ID NO: 2686 - DNA, 1327 bp, Unknown
  gut microbiota DNA sequence
gattataaaaaagagacagagcaatatattgaatataataaatattcaggtaacatatcgattggacttccaccggatcttagaatagatgtattaccttttggtggattttatgatgaaaatgagcaaaaagaaagtgttgaaaatattgttgagattgtatcacataaacaaactattcttgaaagagaggaataaaaagatgatgagacagtataagtatatgggaattaattggaaagtaaatgcggaaaaagatatttttgggaaaatggattgtttattgggagattattataaggaatcatatgctccaaaggtagatttcgaagtaacgttagtagagaaaataagtagtgatttgacagaaatattggaatatggagtacccattacaattcataatagcaaaaaaccatcagtgcatgaagaagggttagtgtatttgaatggatatattcgaatgatatataataaagcaactaaaagtgtgtatcggttaaactatctttcgaaaaaaattaatatttttaataaagataaaagttcgttagtaaaagatgggattcgtgtgattcgagatattgtaaaagctttagcagaagatagtggcggcgttatggttcacgcagcggcattcaagaaaaatgataaaggggttttgctgattggaggaaaggggagtggaaaaacaaccttatctttaaagtttctttatgaatatggatgttcggaggtatcccgggaccgcgttattttgaggccggaaaaacaaagcttttacatatatggatggcctaattattataatctgacgttgagaacgatgcgggatttcagtaagacaagatctatgttgccggagaaatatgaaaagttaagcgatcaagagttggatgctgtcaatgtcaaaatccaatgtactgccgatgaaattgggattgaacaaaagtgtagcgaggtaaaattaacgcatacgatatttttagtaaatgaaagacaaagatgggtagaagatatggaagaattgctggcggtaaatttttattcgccagtggatttaaattatccgaattggcatcattggactggaaataatgatgaacaacgcgaatatggagttatgatggcaaaaaaattactggaagagggaaattgccatgttgttaagtggaatacaattaatgaggcagtggataaaattggacatttagcggatatattgtagaaatcacaattcgaatataagtgtgagaagacgaatagagtaaaacatcaaagaaacatagtagctaaattcccatgcgcgcctcgcgtgctacaccat

SEQ ID NO: 2687 - DNA, 371 bp, Unknown
  gut microbiota DNA sequence
attggacgcatctaccacatggaggatcatatccgcgtattttgcttcctccagcgtgcttttaaacgcctcgatcagatgatgcggcagtttccggataaatcctacggtatctgtcagaagaatctgctgttttcccggaagatccagtgcccttgtggttggatccagcgtggcaaacaactggtcttcctcaagaacccctgcctgtgtcattgtattcagcaatgtagatttgcctgcgttggtgtatcctacgatcgcagccaccttcacctgactcttatcccgctggctgcggatcagttcgcggtgcttctgcacctgttcgagctgttcttttaactgaccgatccggctatggatcagtc

SEQ ID NO: 2688 - DNA, 657 bp, Unknown
  gut microbiota DNA sequence
attagtacttgacatctaatgactattagcatatactaaccccagtaaggaacaaaatcattgtgttcacattgaagaaaagaggttgatatgatgccgttatctatggtaaaaccaggagaaactaacacaatcaaaaaagttggcggaaaagaagaaacaagaaaattccttgagaatcttggattcgtaactggaggagaggttacggtcgtgtctgaaatcgaaggaaacctgattgtgaatgtaaaagattcacgtgtggcaatcggaaaagacatggcaaaccgcatcatggtataagcaggcggattatcaaggaaagagggagaatgttatgaaaactctgaaagagattgctgttggacagacagttacagtaaagagattgcatggtgagggccctgtaaaaagaagaatcatggacatgggtatcaccaaaggcgtaagtgtatatgtacgcaaagttgcaccgttaggtgatccggtggaagtaaccgtaagagggtatgaattatctcttcgtaaagccgatgccgaaatgattgaggttgaataatttttttgcctgtgcgttagcgaaagctaataaaagatagcgcagaccaaaaattagtaggaatgtataacaacatttcaacaaataagaaaaaggag

SEQ ID NO: 2689 - DNA, 1180 bp, Unknown
  gut microbiota DNA sequence
aaatgcgatgacttacccggataagacgatgtatccggtagcaagctgcaacgatcaggattttaaaaacctgatgcacgtctatatggacgcggtattttatccgaatatttatgaaaaagaagagattttccgtcaggaaggctggcattatcagctggatcaggtggaagatccgttaaaatacaacggtgttgtatacaacgagatgaagggagcattttcatcctccgaagaagtgctggaacgtgagattttcaacgtgctgtttccggataccccgtatggtgtagagtccggtggagatccgaaatgcatcccggatctgacttatgaaaacttcctggcattccatggcaaatactatcatccgtccaacagctatattttcctgtatggaaatatggatatggcagagcgtctggagtggatggacagagaatatctgagcaaattcgatcagattaccgtagattctcggatcgcaaaacagaaaccatttgagaaaccggtagaacataagatattttatccggtaggagagaacgattctgaagaagaaaatacgtatctgacatacagtatggtggttggagacggactggatgtgaaacgatgcaccgcttttgaggtccttgattatgtcctgctttccgcaccgggtgcaccgcttcgtcaggcactcttagatgccggaatcggcaaagatgtggacggtggctacaacgatgggatttatcagccgttctttacagtagaagtgaagagcgccgaggaaaaagacaaagaaaaattcctgcaggtgatccgcgagacactggaaaagctggtaaaagacggtatcgatcagaaagcgatcgcagcaggtatcaactatctggaattccgttttcgggaatctgattacggttcctatccgcgtggactgatgtacagcatcgatgtgtgcgaaagctggctgtatgatgacaacaaaccgttcgttcatctggaaaaactgcaggcatttgatgagttaaagaaagaagccggtgaaggattttttgaacaactgattcaggagactatgctggataacccgcacagtgcagtggtactcggcatcccgaaaaaaggactgaccacacaggaagagaagcagacagaagaaaaattagctgcttacaaagcatcgttatcc

SEQ ID NO: 2690 - DNA, 2606 bp, Unknown
  gut microbiota DNA sequence
cttatccattgtcagctgatatcccacattttgtcccaaaacgctctgattatttttaatatttcatttttctaaaaattctataaaaatacgacacatccacaaaaacgtatcttgactttcctcaccatttttcctatactgctttttgcaacccttttaccctgattttctgataaggatatttatattatgtttgaaatttttgttgattctgctgcgaatattccggcggagcttgtgaaggcatttaagattaaagtgctttcttttgtgaatctcgtaaatggtaaagaagtgacctgttttgatccgaatcttacgccggaggaggagcgtcagaaaggaaaagattattatgatatgattcgcaccggtgcggatatcaagaccgggctgatcagcagtggtgtttttgaagatgcgttccgggaggctctggaggcggataaagatgtgctttatttttctctcagtaaaaatatcagcggaaactataattccgcaagaatcgccgccgaagatctgatggaatccggtaattataccagaaagatccgtatgatcgactccctcaacgcttccctggcacagggaatcctcgcgatctatgccagtgagatgcgtgaaaaaggcatggcttttgatgaagtggctgacatcctggaaacctgcccggcaaaaatgaacggtgtcttcactgtcggtgatctcaaatacctggcaagaaccggacgcctgagtggaactgctgcagtcatcggtaatgtattgagcatcaaaccgatcctgcgcgggaacaaagacggctacatcgtccagtacaaaaaatgccgtggtcgcaaagccgccctccacgaactgatctctctcgtctgtaacaacatcgtggaaccggaaaaacagatcatcggaatcgcccacgcagacgcttacgaagactccctctacgtcatggaagaaatccagaaacgcatcaaagtccgtggttttatcaacacctcctacgacttctgcaccggcagccacgtaggccccgacaccatcgccatgttctttatgggcaacgaccgcgaattacagggcatgaaataatttcttaaattaatcatcataaatccaaaatgacagatagtattccagaacatccgttttaaaatactacctgtcattttttaatccagtcaataacttccaattgcatccaccccttctccctcagccaatacccagccagaaagcagactgcaccgtttgcggcaacactttgtgggcgtttagggcaagctttgaaatccgacgcctacgtagactttcgcgagggtccgctgaccctcgtgaatatagtcgtagttggcggctagttcaaagttgccctgcccacgttgccgcaaacggtgcagtctgctttcgggcgtccccataccggcctgacaccctccttcattcattttacaaaaacaacgagccaaactcgcagaagtatgttttgaatcatgttacagattcgtccgaatcaatttcggccgatatccatctttttccagttcctgcataatctgctgcttatgctccgtaccaaacgcttccatagtaatcttaagctccacagctgcatttctgtttgtactatagaactggttatgatccagttttataatattaccctgctgctccgcaatcttctgagaaaccttcgtcagttcacccggacggtccggcagcagaacagaaatcgtaaagatacgatctctctggatcagccccagctgaacaacggatgccattgtgatcacatccatgttaccgccgctcagaacagaaactacttttttaccttttacattcaggtgtttcagtgctgcaaccgtaagcagaccggagttctctacgatcatcttgtgattttctaccatatccaggaaacttacgatcagttcatcatcttctactgtgatcacatcatccagattcttctgcagatacgggaatacatgctcaccgggagtttttaccgcagtaccgtctgcaatcgtattgaccgtaggaagcgtggtaacttctcccttatccagagaaacctgcagacagtttgctcctgccggttctacaccgatgactttgatgttcgggttcagcagttttgccagtgtggaaacaccggtagccagtccgccgccaccgatcggaaccaggatataatcaaccagcggaagttctttgatgatctccatagcgatcgttccctgtccggttgctactgccggatcatcgaacggatggataaacgtatatccgtgttcttctgccagctcatacgcatgcgcacatgcatcatcatatacatctccgtacagaacaacttctgcaccgtagctttttgttctttctactttaatcagcggtgttgttgtcggcataacaatgactgcctttgcaccgtatgcttttgccgcatatgccacaccctgtgcatggttacctgcggaagcggtgatcagaccttttgctctctcttcttcggtcagtgtgctgatcttgtagtacgcacctcttaacttgtacgcaccggttctctgcatattttccggtttaaaatatacttt

SEQ ID NO: 2691 - DNA, 571 bp, Unknown
  gut microbiota DNA sequence
ttcccgacgcttttcagcattggaaggaacatgtttcaaccatgcgcgatagccagaacgtgaaacgccaagtattttcaccattccggagacagaaacacggcgtttagccttgtgagctgcttctgccttctcagtaacttcgaggtaaatggcttccgtcattttcccagaatgttgatggctttttttaatacatcaagtgcatcctgcgcatcacgtagttcacgctttaaatgtgcaatttcctttgcttcatcagaagcatagttgccagaaccacggctctcaatgtctccggtatcacgcagttctttctgccagcgagacagtgtctgatgactgattcctaagtttgaagcgcaaccctgcaatcctaattctctgtgatcatgataataccggattgcatccaatttaaattgtttgtcatagtgctttgccataatgagatcctccttcagtgcggtaactacatagtaccataaaatttgtaattagggattctcattttgacttgtactatttatattctagcaccagtttaaaatcaaggcttttgaggaatgag

SEQ ID NO: 2692 - DNA, 298 bp, Unknown
  gut microbiota DNA sequence
ataaggtatcgtaagccggtgaatgttttccgcagatttccagacggtctgccagatcctgatagtaccgttcggtatccagatctaggtcttcgatatggcggtcgaagataccaagaagaggatcctgatacagcagatatttggacggattatcggtgtccagattcggctgtccgttctggaacagggagtcgagagcgtccagttccaggaagtcgttcagatatgcaccggtcacatcgtggaattcttctgtcaatgcatgttcatcaaaatcttcgtggaatcccagatg

SEQ ID NO: 2693 - DNA, 869 bp, Unknown
  gut microbiota DNA sequence
aaagtaatagttgccagagtcttactctcacggcgtacctttacatgctcttttgcctcgatcgcctgatgcagaccatcggaatatcttcttcccggcatgatacgtccggtaaattcatcaacgatcagtacctgatcatcttttacaacataatcctggtcacggaacatcaggttatgcgcacgcagtgcaaggatcacattgtgctggatctccagattctccggatctgccaggttttcgatgtggaagaacttctctaccttcttcacaccttcttctgtcaggtttactactttatctttttcattgacgataaaatcaccggtctcgacaatttcctcgcccatgatcgctgtcatcttggtcatctcaccgctggcttctccacgttccagctgtcttgccagaatatcgcagacttcatacagtttggtggactttccgctctgtccggaaatgatcagaggagtacgcgcctcatcgatcaatacggagtcgacctcatcgatgatcgcataatgcagctctctctgtaccagctgttctttataaataaccatgttgtcacgcagatagtcgaaaccatcctcgttgttggttacatatgtgatgtcacatgcatactgttcccgtctctcgtcattcttcatggagtttaagatcacaccgaccttcagacccaggaactcatggactttacccatccactcagcatctcgttttgccaggtaatcgttgacggttacgatatgcacgccttttccttccagcgcattcagataagccggacaggtagaaaccagcgtcttaccttcaccggttctcatctcagcgatacgtccctgatgcagaataataccacc

SEQ ID NO: 2694 - DNA, 1027 bp, Unknown
  gut microbiota DNA sequence
acccttgtctcagcaacccctgcattttcaatcgcaggaaatccgccgtcttcctgataggtctccccgtctatcagaatctgtccgtccttgatctgtatcgtctctcccggaagtccaatgatccgtttgatatgtgtacttgcttttttactatcatcgcctgttttatatacgatgatatctcccctcttcggcgtactgaatctgtatgccatgcgattgaccaaaagtacatctcctgcatttaacgtaggatccatagagccttcctgcataacggtgatcttcccataaccaaccgccagtacaatgccgaggataagcaccgctgcgatctccaccgcccagataacggccgatttgatctttgcagctgccacatagtctcttacatatcttgctttaaaaaatcccatattcatttgcctcagagttctcacagtaacgagtaaaatacgtttcacgaattttactcgttgtcgcggcaatcgtcaaggtctcgtgcaagcacggactttgactcgttgctcgcgcaaatgaaacaggggcaagtacatgatgtatttgcccctgctcctctacctgtgaattattttaccagttcttttaccttagctgctttaccaacacggtctcttaagtagttcagttttgcacgtcttactttaccacgtcttactacttctactctctctacgtttggagagtgcagcggccatgttttttctacgccgataccgttggagttctttcttactgtgaaagtttcacggcagcttccgccctgttttttaattacgataccttcgaagatctgaattctttcgcggtttccttctttgattttaccataaacttttacggtgtcaccaacgttgaatgccggtgcttctgctttcagctgagcagcttcgatgtttttaataatttcgttcatcttttttctccttttgttcctggatgttcttaataccttttgtaacagaggaccatctcgtttattcataccttgcacattatacac

SEQ ID NO: 2695 - DNA, 5506 bp, Unknown
  gut microbiota DNA sequence
atggaagatattatcatgatcgtgttcgttctgataacagtctgggtgatgaaaaattatgtgctgatcaatgctgtcattccttcggcatcgatggaagatacgatcatgacgggcgaccggattttcggaagccggctgtcgtatgagttcggcgagccgcagagaggggatattgcgatcttcaagtttccggatgatgagagtcagctgtatatcaagcgggtgatcggacttccgggagataaagtacagatcattgacggaaaagtctatatcaatgactctgagacaccgctggacgagccttacctgccggagacaccggaaggggattatggtccgtattatgtgccggaagacagctattttatgctgggggataaccggaactggtcgaaagactcccgattctggcagaatacctatgtgaaaaaagaaaaagttctcgcaaaagcgatcttccgttattacccgtttaacaagatcggtgtgatcgaaaaggactgatgggaggaaaatatggcaacctggaattcaagaggactcaggggttctacactggaagaactgatcaaccggagcaatgaacagtaccgtgaaaaggggctggcactgattcagaaagtgccgacaccgatcacgccggttcggatcgccaaggataccagacagatcaccctggcgtattttgaacagaaaagtacggtggattatatcggggcagtgcaggggattcctgtatgcttcgatgcgaaagagtgcaaagaaacagtctttccccttgccaatatccatgagcatcaggtgcggtttatgagagagtttgaacagcaggagggaatttctttcctgctgatttatttttcgggaagaaatgaattctattatctgacattccgggatctgtggtggttctgggagcgggcgcagaatggcggcagaaagagttttctgtacgaagaactgaatccttcttattttcttacgaaccacggcgggatcctggtaccgtatctggacgggatccagaaagatttgcaggacagggattgacaattttactgtcttcacatataatgtattagcatagtagcgcattagcagactaaagtgcataaaaagtaactgatatgataaatcaaaaagttacagaaaaaagataaagaagaggatagaaccatgagacaattatttcataccccggaaggagtccgggatgtttacggaaccgaatgtgcaaagaaactgtatcttcagagaaaaatggagaagatctttcatgcatacggttaccagagtatagagacacctacctttgagtttttcgatgtgttcggaaaacaggtgggaaccacgccgtccagagaactctacaagttttttgaccgcgatggtaataccctggtgcttcgtccggactttacaccttccatcgcgagagcggcatccatgtattatcatcaggaagatatgccgatccgtctctgctacagcggaaacacgtttgtgaaccgctccagctaccagggacgactgaaagaatccacccagatgggtgtggaacttctgggcgatgcgtcggtggacggagatggtgagatcattgccatgaccgtggaactgttaaaggcagcaggactgaaagaatttcaaatcagtattggtcaggtggatttcttcaaggcactggttgatgactccggtatgtccgaagagacgatccaggaactgcgccagctgatctccaataaaaattattttggcgtggaagaacttctggagaatcagagactgtccaaagaacaggtagaggcgctgactgcactgccacagcttttcggcggtccggaagtcctgaagaaagcagaaagcctgaccggtaacccgaaagcacttgctgcgatccgccggttacgggaactgtatcaggtggcagcctgctacggctgtgaagagtatatttcttttgaccttggtatgctcagcaaatatcagtattataccggcattattttccagggatttacctatggtaccggtgagccgctggtaaccggtggacggtacaacaaactgttggaacatttcggaagaccggctccggcgatcggtttctgtttggtgatggaacaggtgttaaatgcactgaaccgtcagaacattcaggtgccggtgatggaaggaaaacgactggttttatataatgaaagaaaccgcgaggcagcgatccagattgccggtatgcagagaacacacggcatgcagatccagtgtatgcggatggaagaaggactgaaagcggaagactacatcgtttatggcaagagtcatcagttcacggatatcgtatccccggtaggagaggatcagatccaggtaatcaatctgtttaccgatgaagtacagatgaccaatcagaaaagttttcagtaggaggaaagaccaatgagatatttaaccatcgcactgacgaaaggtcgtctggcggagaaaacactggagatgctggaagccgtaggcatcacctgtgaagagatgaaagataaaaagacaagaaagctgatctttgtcaacgaagaactgaaactgcggtttttcctggcaaagggtccggatgttccgacctatgtggaatacggggcagcagatcttggtgttgtgggacgcgacacgatcctggaagaaggaagaaaattatacgaagtgatggatcttggctttggcaaatgcagaatgtgtatctgcggaccggaatcagcgaaagaactgttagacggaaaccagcagatccgtgtggcaacgaaatacccgaatattgcaaaagattatttctataataaaaagaaccagaccgtggaaatcatcaaattaaacggttccattgaactggcaccgatcgtaggactttccgaagtgatctgcgatatcgtagagaccggttcaacactgcgggaaaacggtctgcatgttctcgaagaagtatgcccactgtccgcgagagtggttgtcaaccaggtgagcatgaagatggaaagtgaacggatctcagaacttttaggaaagttaaaacaggtcatcaaggaggcagacagatgagaatcgtaaaattaacaaaagaaaccacaaaaaatattctggaaaacatgttaaagagaagcccgagccagtacggagaatacgaaagccgggtacaggcgatcattcagaatatcaaggaaaacggagacgaagccctgttttcctatacgaaacagtttgacaaggcagacatcgatgcttccaatgtaaaagtaacagaagcagaatttgaagaggcatacaaaactgtagatccggcacttctggacgtgatccgcaaagcactggtcaatatcgagagctaccatgaactgcagaaacagaacagctggttcaagagcacgccgcagggaacgatgctgggacagaaagtgacaccgctggagaaagtcggtgtttatgtaccgggcggaaaagcggtatatccgtcttctgttctgatgaacatcatgccggcaaaagtggcaggtgtcgataagatcatcatgaccaccccatgtaatgcagaaggaaaagtcaatccggcagttcttgtcgctgcaaaagaggcaggcgcagatgaagtatacaaagcaggcggtgcacaggcgattgcagcccttgcatttggaacagaaagcatcccgaaagtagacaagatcgtaggaccgggaaatatctatgtagcgttagcaaaaaaagcagtatacggtcatgtaagcatcgattccatcgcgggaccgagcgagatcctggtactggcagacgaaacagccaacccgcgctatgtggcagcagatctgttatctcaggcagaacacgacgagctggcatctgcgatcctgatcacgacaagcgaagacttcgcaaagaaagtcagcgaagaagttgagggatttgtacaggttcttgaaagaaaagcaattattcagaaatctctggacaattttggatatatcctggtggcagaggacatgaacgaagcgattgacactgcaaatgagattgcttccgaacatctggaaatcgttactgccaatccgtttgaggtcatgacaaagatccgcaatgcaggagcgatcttcatcggagaatacagctgtgaaccgctgggtgattattttgcaggaccaaaccacattctgccgaccaacggaaccgcaaaattcttctctccgctgtctgttgatgattttgtgaagaaatccagcatcatctactattccagagaagcattgcagccgatccacaaagatatcgagcagtttgcaaaatgcgaacagctgaccgcacatgccaactcgatcgcagtgcgttttgaaggggaggaataaggtatggagatccgcagactggaagaacagggtatgacccgtaatgtactggtgcagcgcaataccaaagagacgaagatcacgatgagcctgaatctggacggaaccggaaaagccagcctgaataccggcatcggattttttgaccatatgctggatggatttgcacgtcatggattctttgatctggatcttgccgtggatggcgatctgaatgtggacagccatcacacgatcgaagataccggaattgtactgggtacggctattaaagaagcactgggcgataaagctgggattcgccgttatggaagcatgattcttcccatggacgagacactggtcctttgcggcatcgatctgtccggtcgcccgtatctgaactttgacggtacatttaccgcagaacgtcttggagatatggatacagagatggccagagagtttttctatgcggtcagctatgcagccggtatgaacctgcacatcaaggtactggacggaaccaacaaccaccatatcatggaagcaatgttcaaagcatttgcgaaagcactggatcaggcaacacaggtggatgaccggattcatggagttttgtctaccaaaggcagtctgtaaaatggctgcataaaacagaagaaagagaaatcaatgattatggaagaaagaaaaggaacactgttaaaagcagcatttgcctgggaagatctgaaactgaacagtgacggaatggtctgcgtggtggtgcaggatgataaaaataaagatgtcctgatggttgcctatatgaaccgggaagcctatgaaaagacaatcgagaccggtgtgatgacgtactggagccgcagcagaaacgaactgtgggtgaaaggactcaccagcggacatttccagtatgtacagtccctgtatctggactgtgacaacgatacgatcctggcacgggtcgatcaggtcggcgctgcctgccataccggaagccgcagctgcttttttaaggaaatggcgaagaaaaacacggaacaataagaactaaattttaaaattgcataaaatttatgtataagtttcatactattgtttatcggaaatacgcttgtgtattttat

SEQ ID NO: 2696 - DNA, 931 bp, Unknown
  gut microbiota DNA sequence
ttttaatgcatacagttttttgcggagcttctttacatgctttatttttatcgtatttccataaacgatttttatatcataaagcaactcacactcagccacaaaatcagcaagtttctgcaaaagttttgcctggttttttgttactgccttcttccagacgaaagtatacttattggcactggcttcaatttttgtaccatcaataaaaatggtctctccggaaatttctcccatatcaaacaatgcattagacatttctgcaaggatacgtttagaacagggagcaaaatggatacttctaaaccttgcaaatgttgcatgatcaggagccggggaaccttctagaagaaacataaaattgatatctcttttacaatttagttccatggaacgagaggagtaatccccgttcatgtaagagtagagcacgatcttcaaaagtgttctgggcgatacagaatttattctttcataagtagaatataggtcagtcaaatccatagcctccacaaactgacttagtaatcgaacagaatcattatccggaatgattgtttcaagatttaacggaagtttaagttgatatccgtctgaattttttgtataatctttttgtaataatttagttagtagcataacttgattttacaccaactgccggattctttcgaggtctggcagttatttttttgcacaagaaaaggagctgcgcactaattagtgcgacagcccccttaaatgaaattacataaacatttttttcaactcacagatatccttttccaaaacacctgacatttcacaaatttctttgccataccattatatataccatcaaaatattttacaattctttttcttctttattttcctgtatctctttcttccaccccagttctatcttctccatctgcttaagaattgcatc

SEQ ID NO: 2697 - DNA, 161 bp, Unknown
  gut microbiota DNA sequence
gcatcagtacctgagatggttttccctgttttggataatctctgttgtaaccggtgtagaatgcatgatattttccttctttgtcttcgcagatacttccggcaaagataaactgatcctgctcttcatccgttcctctcggaatcgccacaccgcaatcc

SEQ ID NO: 2698 - DNA, 1304 bp, Unknown
  gut microbiota DNA sequence
cgctagaatgcgtgccaaaatggtcggactgcttgaatggctggaagaaaaagataatcaacttagagaaccatacagtaaaatgcttgatgatggaatatttgaaatccggtgtactgttggaaataatataaccagggtggtgtatttcttttattatgaaagaaagataatacttacaaatggttttataaagaagacgcagaagataccatcaggacaaatcaaactggcgaaaaggcgaagagcagattttcaggaaaggatgggaagatcatgaagacattaaaagagtataaagctgaacagatgagagatacagaatttgtgaaagaatatgaaagtattcagccagagacggatgttatcagggcgattgtagaagcaagaacctctcagaaccttacacaaaaggaacttgccgaacgtacgggcatcaatcaggctgatatcagcaaactggaaaatggaaccagaaatccttccgtgaatttgctgaaaagactagcggatggtatgggaatggtactcaaaatagagtttgtgccggaacaaaaggtatgattacagaggagaaaagtatgattacgacaattttatgggatgtagatgccacgttgctggatttcctggcggcggaaaaggcggcgataaagaaactgtttcaggagtttgctctgggagagtgtacggatgagatgatcaggcggtattcgaagatcaaccggtcgtactgggagcggctggaatgtggagaacttaccaaaccagaagtgctggtcggaagattccgggagttttttgagacggaggggatccgcagcgatgtggcggaggcgtttaatgaccgctatcagttatgtctgggagataccatcgtgtttcgggatgacagttatgaaattgtgaagtccctgcagggaaaagtgaaacaatatgtggtttcaaacggcacggtcgtcgcccaggagaaaaaactgcgtctttccggactgggagaactgatggacggcatctttttatccgaagcggcaggtgtggaaaaaccaaacgtagagtttttcgaccggatgtttgaaaccatcggtccggtagaaaaagaccaggtactgatcgtgggagattctcttaccagcgatatccgcggtggcaacaacgccggaatccagacctgctggtacaacccggatcataaagagcggtatgcggatgtaaagattgattatgagatcgcggatctgcacgaagtttacgatatcatagatgccaacgagcagaggtaaatgcagtttgtttattaggag

SEQ ID NO: 2699 - DNA, 1454 bp, Unknown
  gut microbiota DNA sequence
ggtgctttccgctggtggttccggcactatattcagaggtgggaaaaatattcctgccttccggtcttctgacattttttatcgtaggaggtccgctgtttggtgttctgacttcgatggttccggttattatgttaacctgtgcgcagatccaggcggcagcagacaatgatctgttccctgcatttgtagcgaaaaagaataaaaacggtgtctcaccggtgattctttgtttcgttatgctgttttcgattgcatgtgttgccaccggttccagttttggtgtgctgatgacggtattttccttggtcaatgccctgtctgatatcgtgctttgtatggtgccgttcttcctgaagaagaaatatcctcatgcatgtaatcactctacctttaagatggcgatcggactggtgtatgcgctgtctgcctttgcttttatcgttgcggcttatctggcctatgcgatgatcagtacgcttggtatgacggtatggctgatgatcctgggtgcggttgtgctgtttgtgatctacattctgatccgtatcgcttatctgaagaaacatggtcgggatctgatcgcagaactgaaacaaccatatgagccatgggaagcccgtgagcgcgagtgcaaagcgctggatgaagtaaaatagccgttgctattcacggatacaaatgaataagaaaccggtcgggaaaggccggtgttgcgacagcgtacggatagtattccgtacgctgttgtcgtatccggggaaatccggaatatgaatagaggatgagagaggaaagtgaattcactgacaatatccggcgaagcgtgttgcgaggatggagtgagcagcaacagaagggttgtgtgaaataaattaagtatcgaatcgatgtgaaatatgttatactgagaaaaaatgtgaaaccctatgtttgtgagggcggtttacacagaaaggacagatatggaaaaagcaagaacagatgcattatattatgcgttgaaagaaaaaggctaccccgatgatttctgccgggagatcgcatataagcagatgaatacggattataccgcaacaaggatgctgggatatctgtaccgcgtatcgaacccacgcccggaagatgtggtggatgagatgctggcaatcttaagtgaccggaacgcgatcattcagaaaaaagaactggaacatgcacaggcaacgatcaaccggatctacagagaggggctgtaacagtcagaatatggacaaaagaaaaattgcagtaaatacaggatgtgtctgtcttataattctgtttatcttcggcttttatcaattgatccagtgggataatacgagcagaagagggcaggaagaagcaaaaaaacagaaggaactggacgaggcagaggcggaagagaaggcgtatgagcgggcaaaagaatatatgccatatattcttttgcc

SEQ ID NO: 2700 - DNA, 749 bp, Unknown
  gut microbiota DNA sequence
cagagcacgtattccagcgtttacaattactgggacgatgatcctgactatcagtatttttattatgaactgagttattactgtgactcgatagattctatatttgaagaagctacgcaagatggaaattatgattcttttatagaactgatggaacgggagtgcaagatcaaagatcagcggccggtggaagtggatgggttttataaaatatttgttggagatagaaaatacgccgtaaagatcaatgaaagagatccggaaggagaactgacaatttcccgggagtatggagtgtattatagactggcgcagggagaagacgggtatgagctttatacgaacagaggaaagatttatccgaaagaagacatggaagaggataatgaatcgaaaaacaatgccggttcgaacagcaattcaggcagtactaacagttccggaagttcctatgggcatgccggcggatacggttcaggcagcttttacggaaatgccagtggatccggttctggcagcacttccgggcattccagtggttccggttctctgaaaaagacagatccctacgatgtggatgattacgatgatcccgatgattttgcggaagaatgggcagaagattttggagatggggattatgatgacggatacgatgatgcttatgattactgggaagaagagtatgatgattaatcgaaacacatagtttgtgatattgtgcgtataaatataagtatataataggt

SEQ ID NO: 2701 - DNA, 3020 bp, Unknown
  gut microbiota DNA sequence
agagcgtgccgaggagatcaaaaagaaatgtgagaaccacagcctgatcatcaaaaagacagaaaagaaagagaaaaaagtatacccgccactcctgtatgatctgaccgaacttcagcgggatgcgaacaaacggtttggattttccgcaaaagagactctgaatattatgcagcgcctctatgagaatcataaagtacttacctatccaagaacagactcccggtatctgacctcggatgttgtgggaaccttatcggagcgtctggatgcctgtgcggtcggtccgtatcggaagatggcactgacagtaaaagcacagcacccggagacgaaaaaatggtcttttgtggataataaaaaagtatctgaccaccatgcgatcatccctacggaacagttcgtggatctgacgcatatgacaaatgaggagcgaaaaatctatgatctcgtggtgcgccggtttttaagcgttttctacccgccgtgcagatatgaagagacggtgatctatgcagagagcgcgggtgagcagtttgttgccagaggaaaagtcatgatcgacgagggattccgtcagacgcaggaactggatacggaggatgaagaagatacctcccgggatctcaaagatcagacgcttccgaagatcagccagggaatggaaatgaaacaggtgcgggtggatatccgggaaggaaaaaccacgccgccgccacgttttaccgaggcaacactgctttctgcgatggaaaatccggtaaaatacatggaaaacaaagaccgcgagatggtaaaaactatcggagaaaccggcggactcggaacggttgccacgagagcggatattatcgagaaattgttccacacgttcttgctggaaaagaagggcaacgagatctatattacatccaaggcaaaacagctgttggagttagtgccggaggatctgaaaaagccggaactgactgccgagtgggagatgaagctttcgaaaattgcaaaaggagagttggacgaccgtgcgtttatgagtgagatccgcggctataccaaagaactgctgcaggagatccgcacggaagagggaaccttccgccatgaaaacatgacaaataaaaaatgcccgaactgcgggaaacgcttgcttgccgtcaatggaaagaacgcgaaacttctggtgtgccaggatcgtgcctgcggataccgcgaaaccgtatcccgcacaacgaacgcgagatgtccggtctgccataagcggatggaaatgatcggaaaaggggatgacagtatgtttgtctgctcctgcggacacaaagaacgtctctccaaattccaggagcgacggaaaaaagagggcggcggtgtatccaaacgggatgtgcatgcttatatgaagaaacagcagaaagaggcaaaagaaccggtgaattccgcatttgccgatgcattgaagaatatccggctgaactaggaggaaaagatgcaaaaagaagatgttcggttacgacaggtgatcatacatattatggattctacgatggggatgccggtgctgtccgaccaggtgattgatttcggatcggactttgaggatttcctgcgggcacatatttttcggctgttagagagcgatgatatgaaaaaatgttcttttgacgaaggctctcaggtacaggcggaactggaagcgtacagcgaagaaaactttatcccggtcagtcagaaactgggagaactgctttacggtgttatgaataaaaatatcgacattccgccggcggatcttctggtggtggaatatgagatcgaacagcagcgttttctggcgctgttaaagatgaattataaaacgtattacacccacatgacggactcggatccgtggggaaacagcaattccgtcatcaaacagaaagcgatcctgccgggggaaaaccagaaactggcagaggcggcgctgatcgatctggcggataaaaacctgaagatcatcgagaaaaaatatgatgtcaacggagtaaagacaaattatttttctcagctgtttttgcagtgccacggttccttgtcaccaaaatccaaactggcgatcgtggcaaaagcagtggacgatgtgcagaaaaagttttatcacgagtccgagcagtttgaggtgcagatggagacgaaaagcatcatcaatcaggcactggaagaagatgggggcttcgcggtgccggtactgatcgataagattttcaaagaacaggaagagatgaaggaacaggtgattgaaaagctggataagtatcatctgacggagacggaagtggaaccgcagaatccggcgacaaccagaaaatacggaaaacagaacctgatcaccgataccggtattgagatccggatcccgatggaacagtatcagaacaaagataaagttgattttatcacgaatccggacggaacgatctccgtactgatcaaaaatgtaggaagtattatcagcaaataaaataataaataagagacaaagagggttatgagtatgaagaaaaaaacagtgctgctggcacttatgctggcgggagtgatgggactgtccggatgtaaagcctgggatgtagtctgtgatgtactggctgtcggaaccacaaaagtggaaaaagataacggaacgaaggtggatcttgaggggaagacaccggaggtaaaagacgatgacagtacagatctggaaacggcagacagcaaaacgacttccggaaatgacgaaaaaacgaacgacacgaaaaagaatgataccaaaaagagtgacacaaaagacagcacgacggacagtaacaagacggataaaaagagggtaacgatgccttccgagacaccgacaccggaaccgagtcatacgccgacaccgacgctgtctgtggcggaaaagaaagaggaaagcggtcacatgatcacctgcacctctccggtcaatgtgcgtgatgcggcaagcagccagagccatgtgatcggggaactcgtaaagggag

SEQ ID NO: 2702 - DNA, 859 bp, Unknown
  gut microbiota DNA sequence
ccggtacgctgcattttccaccatggagagccggatcgtcagctctttcaccttctcaaacgcatgcttcgccgcatccagagattcctttgtgctataaaacgcatacgtcggagcatccccggaagattccgattccaccaacggaatctccgtacccatgatacttctggtcttgatacgaatcgaatcctcgatcggaaccgtataagaaatcgtctgtaccgtattaataccgatctccatatttgcccgctgcaacgccgcatacgcctcacggaaggtcacatcgatctgcgactggatacccttcgcctcatcgatcaggttcatcatttcacggatcaggatatttcgtttcttatccatcaggtcgaatccctggagagaaagcgccagggaattcttggcaaggatcagatttcccttggtagggaaggtatttggatccataaaatccccccttttattccatcatagacttcgcgtcagcgacagcctgttccacaagatcaatgtcggtcggctgataatactgattcagcaccttcgtatcgatacggtcaagttcctctttcggaagcagaccgagcagtttccagccgatatccagcgtttctgtgatcgtacggttttccatcggtccctgaccgacaaattcatgttcaaaagcatttccgaaaatcagatatttcttatccaacggagagagttcatcttcaccgataacggaagcaagtgctctggcatctcctacttttgcgtagcaggagaacagctggttcgctacgtcctggtgatcttctctggtatatcccttaccgataccatccttcatcagacgggacagagacggcag

SEQ ID NO: 2703 - DNA, 1344 bp, Unknown
  gut microbiota DNA sequence
ctgtgtgaccgatccggtgccgccctgtacgataccggcacgctcgtaaagcgtagccagttcactgtagagataacccggataacctttacgggaaggaatctcgcccttggaggaagatacttctcgcatcgcctcacagaaagaggtaatatcggtcagaataaccagaatgtgcatacctttttcaaaagccagatactcagcggcagtcagtgccacctttggtgtgatcagtcgctcgacgaccgggtcatttgccaggttcaggtacatgactacgtggtcagatacaccgctttcctcgaaggtacggcggaagaactcagcgacatcgtatttgacacccatcgctgcgaacacgatggcgaatttttcatcagtgttgtcacccaaagaagcctgctgtacgatctgtgcggcaagctgatcgtgaggaagaccgtttccggagaaaatcggaagcttctgtccacggatcagggtggtcagaccatcgattgcggagataccggtacggatatagttacgcggatattcacgggtgaccggatttaacggcagaccgttgatatttgccttggtgtctgccacgatcggtcccagaccgtcgatcgggttgccgataccgtcgaaggtacgtcccaggatcttctcggaaagaccgatctccatcgggtgaccggtcagacgggtgtgggtgttgtcgagggacatattgtcggaaccctcgaaaacctggatcacggctttgtcctcgtagacctccacaattcgtcccagtttcttttcttttccgtcgatggtaaattctacaatctcttcatatgctgcatttttgacaccctccagaactaccagaggaccattgatttcacttaagccaagatattcaattgccataattccatcctccttatccgttcttttccagtactttatcgtagaaggtatctactgcttttttataatcatcaaacatttccggtttgtcgtttggcacatcgtatttgatggcgatgatcttttcgaaaatattgtcctctttcaggacagacataggcatacccatggttaccagggcttttgcttttttatacagatataaaatgatttccatcatcttatactgcttttccagcggtacgcaggtatcgtctgcatggaaggcgttctgctgtaagaagcccagacggatcacacgggcgatctcgaggatcagtttctggtcatccgggagaacgtcgctgccgatcagttttacgatttccatcaggctgctctcggtatttaaaagagccatgatttgatttctaagatcaataaagtttttatttacatggg

SEQ ID NO: 2704 - DNA, 1213 bp, Unknown
  gut microbiota DNA sequence
accggactttcaataaacacacggttcgtacaatgcccgagaatccctttcagaatttcttttttcttcacatcctcgctcggacgggtgttgttatagtcaaacatcacttctttgcagtgacgtctctgcgcttccagttccttttcctgttcgatatcgatcggatctgtatgtccatgttcataaaaagtcatcccgtttttaattcgatcctctaagtgcatctttttcctccttttaaaagctccgaatcttatcgtccgcttcgctttctgtcttatcaatcttccggatcaccacataataagaaaaatcatcactgactttaatctctacccggtcacccactttatgtccaagaatcgctttcccgatcggtgattctgtactgatcagcccgctcagagaattgccgcggatcgaagttaccagacgataggtttcctcctcatcgtcatcttccatgtacagtgtcaccgtattattcagtcccacttcatcttctttggactcttctgaaatcacaactgctgtctttaacattctctccagataccggatccggctctcattctgattcttttctttttttgccgcatagtattcaaaattttcgctgagatcgccctgggctcttgcctcttttactgcttcgatagcatcctttcgaactaccagtttccggtattcaatctctttttctattttctccacatcatgtttcgttaatcgttctcccacaatccgtctcctctttctcaactgatatttttaaccaattatgtaacttttcagtactctcaccattacgaaccgaaatgcatataaatgcctttggcgatgctgaatacttactcgatcaccttatgatccagccatttttttccatgaaaccgcagggtataaaagataccacggagtgtccagtcagagaacataccgatccagaccgcaatcggtccgaaaccaaaaacacgacaaagaaccacacataatgttaccctgcaaagccacatggtcgtacaggataatatcatggagaatttcacatcgcctgccgcccgcatggaatatgccggaataaaagccggtacccatacgattggtttgatgatggtgatccaggtcaccataaagaaacacatgctgccactctctgcgctcatacctcccagatggatgattggttttgtcagtacaaacaccagca

SEQ ID NO: 2705 - DNA, 11553 bp, Unknown
  gut microbiota DNA sequence
tgtcagtacaaacaccagcaggcagctgatgacgataactacctcagataccaggcacatcttttttgtatagtatatcgcctcatcctttcttccggcaccgatacactctcctactacattcatcagaccgataccgataccgatggctgcaataccattcagattttccagaatatttgtcatcgcctgtgctgcgattgccgcagtaccaagagtcgacaccgtagactggatcgccagcttaccaaactgaaacatcccgttttcgatacccgtcgggataccaagcgccaggatcatcttaatcttatgcctgtccgggcggatctttatgtaatcccgcacacatatctcttcttttggattcctcagaaaatacatgacaacgatcgcacagaaaattcttgaaatcagtgtggacagtgccgcaccggccacccccatatggaaaccgaaaatcagaatcgcatttcccacaatattcataatattggagatcactgagatggtcataggcagtctcgtattttcctgtgcccgaaatacggaagatcccgcattaaaaactgcaataaacggaaacgaaagggctgtatacaggaagtatacctcggaattagtcattacttccgcttccacttttccgaagatcagatgcaacagtggaatctgaaataccacacagactacagtcagtactacagcaatcgccgtgataataaaaatcagctgttttgccgcatcggtggcattttttgtatttttctgtcccatgtactgggaacagatgatggttcctcctgctgccagcgcagcaaacacctggatcaccagcacattgatcgaatccaccagcgataccgccgagatagccgccgatcccacgttgctgaccatcatcgtatctgccgttcccatcagagaattcagaatctgttccacaaccaccggcaccagcaatgcccacagttgtttgttagtaaatagatgtttcttttgttccggttctgtttccatgtttttccccactcttttcactgctcatttttttcaatcagtattattttatctttctcttatctattatgcaaccccggaattcctctcttttccggtattttttccggatcgtaagtatccagaagatttctcattccataaagaaatgtttccagatctcctgccactttcatctgtcggtcccagatagtactttccggaaaagaccagcgcagatagctccagatttcctttaatttaaacagtgccttctcttcattgatcgagattcttacatattcatccctcagctgtccggcaaatgcttcccataccgatttttccggcaaatgctttccatgcagctgcccggtcagtcccggatgtcgaagaacacctcttccgatcatcaccgctgtaatctgtggaaattctctttctatcctttccagatcctccaccgtaaaaatatcgccgttataacaaagcggtgctttccgcacctcgtacgccccggaaaatgcatccagccgtggtgttccaccataaaaatcttccctcacccgcggatgaataatcagctcttccagcggataaccgttaaaaatctccatcagcgttccaatctcttcaggatcgtaacgtcccagtctggtcttgatggaaattttcatgtccagctgttcaaaaatctcgtccaagaatttacgcagtccttctctgtcctgtaaaaacccggaacctctgccaccgcttaccactgtttttgacgggcagccgagattcagattgatctcttcgtatccgtattcccgcatacctttcgcggtgcgtataaaagcttcgctgttgttggtcaggatctgcgggatcagcaccagcccccggttattttcaggcagaatatcgttccgctctttgtaattaaagagccgtcccttttgttcttttgccgcaacaaacggggcaaaatatttatcaaatggataaaaatacctgtgatatgcattgcgaaatacatatcccgtcacttcttcgagaggagccatgtagtatttcatacttcttcctcccccagacggatccgttccatacgcgcggcggtctcctcgtccagatgatcaaacagataatttttctcagaggaacgtttttctcttgccgtctcccgtatctgttgtcggacttcgatcacatcttccagcagttcccgagccgacattctccgtcccccctggccaaggatgatgacctgttcgagctggtcggaggtggcaacggtcacgcggtattttcttccgatctcatgtactgtcttttcgatatactgatcggcggtttccgcttcctttgtatagaccacatggatattgtgatatgtttccacactgcccggatttccttttactttgtaggcatcaaataccagaatcaacgtgcactttttaaatccctgataattgcataaaatatccatcagtttttcccgggcgccgtcgatgttggctgctgccagttctttcagatcctcccaggcaaagatgatgttatagccgtccaccagcagatattctttctccccgtccggcgtctttttctgcttataatcgctggtcgatttgccgtatccctccaaaggatcccggcgactctttttccatccctttacgctccgtccagccggcgattcctctcccagtttccgaatcgggccgtaggtgcgctcaaagatctcttccagttctttctcggttgcccagtatttttcattctcttctttccagtttttcgcagtcaccgacttctccggcttcgtctcctgaccggcgggtgcattccagccactctccacatgcatatagtcttccacctgatcccagttgaccacaaacccggcaccgtgtgcacaaaagaccgatccggtcggattctcaagatcggcttccggatcgtatccgaccgtttccacaatttcttcctgattgtggcacggataatatccttttaaagtacacgaaagccttcctctgccactggtgtaagagatcacttctttctgataatcccgcatcgtgacaaccggcgcagatccggtcagcaccgtcatctcgccttctgtcttcggcggatcgaattctccgagcatcttctggatatcggtcatgcttcgtcctacctgctccgaaggcacttccaaccggaactcataatacggttccagtaactgacttttcgccttgcgaagtccctgtcttacggcacgatacgtcgcctgacggaaatccccgccctcggtatgtttgatatgtgcccgcccggtcagcagtgtgatcttcatatcggtgatcggcgcaccgatcaggacgcctttatgctcccgctcttccagatgcgtcagaatcagccgctgccagttgcgatccagcacatcctcactgcaatccgcagcaaaaataagaccgcttcctgtctctcccggctccaaaaggagatggacttccgcataatgacgcagcggttcaaaatgtcctaccccttctaccggttcaagaatcgtctctttgtagacgatatttccctcatcaaaggtcaccgccataccgaagcgctctttgatcagactttttaagatctcgatctgtacctctcccatgacctgggcatagatttctccaagcgtctcattccatacgatatgtaacagcggctcttcttcctcgagctgtcgaagctgtaacaatgcctgatgcacattgacctccgtcggaagaccgatccgataggaaagtaccggctcgagcaccggcatatcggatgcctgttcgcttcccagtccctgtcccggataggtcgcggtaagcccggtcactgcacagaccgtgcccgctttcacttccgaaaccatcgtatatttttctccggaatagatgcggatctggttgactttttcctgccagataccctctccggtctctcccggtctgccgtttgagagtaccgattttaccttcagagttccaccggtgatcttcatatgggtaagccgttctccctgattgtctctggtgattttataaatttttgctccaaacgtttccggataagaagtctcccggatccggagtttcagatcgtccagaaattcctccacaccggtcattttcagtgccgaaccaaaatagcaaggaaagagttttctctcacgaatcatctgcctgatctgctctctgctgatttcctctccctcgagatacgcttccatcacctgctcatcgcagactgccacctgttctttccattcctcatctgtttgatctgcggaaaactccacacagtttgcatctaatttttcctttacttctgcaagcagtgcttcccgatcggttcccggctgatccattttgttgataaataagaaaaccggaatctgataacgggaaagcagccgccacagtgtctcggtatgtccctgcacaccgtccgctccgctgatgaccaggatcgcatagtcgagtacctgtaacgttctctccatctccgccgaaaagtccacatgtcccggagtatccagaaacgtcattccgaactcgccgagcgtacactctgcctgtttcgaaaagatcgtgattccccggtttctctctaacgtattcgtatctaaaaatgcatcctggtgatccacacgtcccagcttccggatcgccttgcaggtatataaaatcccctcggacagtgtcgtctttcccgcatccacatgcgccaggatccccatcgtgatctgtttttccggtttattttctgatgtagctgccatcgaaaatgcccctttctgtcgttataatgatttgtaactgttcagtaccttcgcggaatactacctactgaatagtttgtcgcattttataatcataacacagaaaggggctttcgtccattcgtccatattggaaactctcgatattctattttttaacaccagcagtaaatcttctccggtctctgttccatctgcggacattctcccggaagataaccggcttctttcatataagagaccggcacatctgcactctcttttttcatgcttacttcatttccctggcggtcgagcagtttcatcttcaggctgccatcgatcagatacggtccgaccagaataccatccagatccataccgaagttgcggctctggatcatatgcagcagtccatcattcatctctccaccattttttctgatgtcatagatcaggaatccgttctctgttccctgatatttatgaaaaataatctgtctggccatatcctttactccttttcgtttttcgcctcttgatacttttattatagcagaaatttttcaaataaattttctttttctgctgtatatattcaaaatagtgctgtatactgacaataacaagcttatatagcataccacaaaggaggctgccatgccagatatttatcagaaaagcggttatctcaacagtccgttccggctgttttatcttgaagacctgcccgggcgggaatatacctaccattatcatgatttccacaaactgctgatctttctgaacggaacggtaagttaccgggtggaaggccgggagtacgatctgaaaccgggcgatcaggtgctgattcctgccggcgagatccactgtccggtggttcatcccagtaccacctataccaggctgatcgcgtatatctcgccggattatttttcatccctttccggggaatgtgatctctccggatgtttttcgcatgcactcgaagcgcatgaaaatctgatccgcattcccgattatttttccggctcgctgtatccggtcctgcaggagctgatcggaaccttttcttcggatgattttggcacccctttttatcagaagttaaaattcgcagaatatctgctgctgttaaaccgctacctgttacagcaggaaaatcagaagatttccctggttcttcccaccgccaacccgcagattttacagattcttgactatatcaatgctcacctgaccgaagatctgtccatcgatcgaatcgcggacgctgcctttctgaaccgttcctatctgatgcacctgtttcgtgacgaaaccgggtatacgattggaaaatatgtaacagaaaaacgcctctatctggcaaaccatgccatcgaacagggcgtttctgtcaccgatgcctgctatcagagcggatttcgcaactatacaaccttctatcaggcgtatcgaaacaaatatcacaaatctccgaagcaggcacgaaaataatttagtttgctgtcatctgcgcttttctctgtttttcccattttcgcatcgtgtaaatataatacggaattaacgggatcagcgcagagatccatgccgccgggtctgccagacatacaccggcaaaactggtgtgtcctgctaccagcataataattccggttcttgccaccagttcaaagattccgccgaccatcggcaccagaccatagcccagtccctgcagggcgttccgatacaggaagatgcttccaaggaacggatagcaccagaatactgtgtggaagtaggtttccgccacacccagtacctgtgtctctgatgcatcaataaataaaagtgccatatatcttccgaggaaatacaggatcagcatggcaaagacgctgtatacaaggatcatcatctgcgtacagcgcacaccctgtttgactctgtccattttccccgctccacggttctgtccaacataggtagcaatggtcgcaccaaaagcgacaaatacggtactgaaaatattctgcagttttcctgctgccgaaaaacctgccatataattttccccgtatacattgatcgccccctgcaccacaatgacaccgatcgcagtgatggaaaactgcagtgccatcggaataccgagtgccagaagttttcccatctcctgaaaagagaccgtaaagttttcttttttcagatgcagaatcgggaacttcttcacaatataaatcaggcataaaaccgctgagattgcctgtgcaattacggttgcataagcacatccttccacgcccattcccacgtagatgataaatacaatatccagcagtacattgatcaccgccgaaatgatcagaaaatagagcggtgatttggaatctccaagcgcacgcagaaatgctgccagcgcgttataggctgccgttacgatcagtccggcgtagatgattcccatataggaagttacatccggcatgatctcttccgaataattcatcagatgcaggatcgggcggttggcgatctcaaagcctatcgtcatcgacaccgcaaaagccaccatcagatagatggacattgccacatagtgacgcatccggtcgtattttttcgcaccgaaccactgtgccacgagaatcgcaaatccactgctcagtccattcagccatccggtgacaaaaaacatcagcgaaccggtacttccgatcgccgccagcgcccgcactccgaggaactgtcctgccacgatggaatcggcgatgttataaaactgctgaaagatgtttccgagaaacatgggaatcataaactgtatgatcagcttgatcggactcccggatgtcatatcccggatcgtactgtttcccccgtttttttccatttcctgtttcctttcttttgtcctcttacaatttttgttacctatggtattataatcattccacggaaaaatgcaatgattttttctgctaattcaaaagagatccccctgcacactcctccagaagatctcttttctgcttttcgcagtccgttattcattttaccagtctgtctccgggtcaaaggtgatatccgcctggtattcctctcccgctccctggtttagaaagttctccagtgcctctttaatctcttcctcttttccctgcaattcatccggaatcaccaggtcaaaaaccactttggtcttatcgtcacacgaatgcatccggaaatcatgcattgcaagacggctgtctttatctgccagccactgtctcaccagtttctgcatccggttgatctccacgtcgtctgtgatcactgggtccagatggatcaccagattcgttccgtattcttccagacatttccgttcgatctgatccaccacctcatgacatgccagcagattgtcgtctttgtcaaattccacatgaatacttgcatagcgttttcccggaccgtaatcgtgcatcatcaggtcatgacagccaagtaccatcggataagtcatgatctcctgtgtcagttcttttcgaaaatcggatttcacgccttcgccgagaagcggtgaaatcgtatctcttgcaagcccgatgccactccagaggataaagacagcgaccagaattcccatgatcccgtccactttccatccagttgcatgttccaccagtgcagcgatcagaacggctgttgttgtcagtacatcatttctgctgtccgccgcggtagccagcagagtcgtggaatcgatcttttttcccatccgggtgttaaaaatcatcattcccgctttcaccaggatcgatgcgatcaggacaatcatcgaaagcagagaaaattcaactgccaccggatgaagcaccttctccacggaactttttgccagttcaaatccgataaataagatcatcactgccaccgtaagacttgccagatactcgaatctggcgtgtccgtacgggtgttctttatccgccggtttctccgccagtttgaatccggtcagtgtcacgatggaacttgccgcatcggacaggttgtttaagccgtctgctgtaatcgacatggaacccgcaagttttccgactgccagcttacttcccgccagacagacattacacacaatccccaccagaccggacagctttccaagcgttgcacgttttgcagaatcctgtacatccttttgtttcataagttttacctccattttttaacttatgcctgcaacattttttctgttattctcccgtgtttatcaatattttctctggtgaatctctgcattctgactgataaactatcaaaacagaattcatcatcactcttctttacaataaaaaaacacccatgggacaatataagtaaactactgtcccacagatgtcacgttctcatctgctgcccttgtcgggcccggccccatggatctccatcgcctgctcagtttgtactgtagattgatatgcagtgcaaattgcgttttgagtatcttatcataccttttgggggttagcaagagctttcaaattcgaacttttgttagttctgaataaaatatatttcagtaatctgacctgtatatcttacagatcccccagcgtctctcccagtgccagtaccgcgtttcgcacacattccgggcactcgcagaggacttttccggttccagcacctttgagttccttgcagatggtagctccgcttttttcggaaaatttctgcaggatttctctggaaaatcttggtgtgccttttccttctgtcaggacacccgccgtcataactgcaccgatcaatgccccacaggtactctccagacttcccatccccgccacaaatcctgctgtcagttccatcagttctttttcgtctgtggaaatcttatcttcaaataccttgatcaccgcctgcgtgcagttgcacgctcctgtctctttatattgtgcagcctgggctgcacgttcttcaatcgtcatcttttgtgttctcctttattttatgtaaaagaaaaatctttcttatctacattataaatggtttacacttttagtcaatgcaggattgtatacatcttttccgggaactggtgccggttgttttcctgcaccgtaaatttcacattacattttccccattttgcagcctcatagagttgtttcgccatcggaagacagtcatcatcctccgaaccgcagaaaatccgaagcgcaatattcttttccctgattgcagaaaccacagtttccgcatgctcctccagaaccgggattcacgggccttgcaggatcatcagatcacagcgcacagatgtaaatgctattgcgcgtaaaagcatatcgcatccggctgagaatccaccacatgcgatgctctcatattctttcttttgcaccattttcatcgctcctgccaccggtaagtaagaacgcatgtcataactccagcgatacgttccatatcctttttcagcaatttccagtgttttttccagaatattattttctttgatcatattcgctttcctttccatctccaatttttctatatatatcattttttatgttttttcattgttctcccataaactgttatttctccattacagagttgaaaaacgggcaactcctttttatgcagccacttccagatccacacggtcagaaacagatttgcacccacaaagcagcccacatacccgcaaaagcccaacatccatccgggcaggagcataaatccaacgaacagcaataccatatatccgaaaccgccaaatactgtgagtactaccggtcctccctgtttcatgggcatgatctcgttggtccatgtcaatgtcggcattttaactccaagaaacagaccagccagtgccatgagcagcacataagagcccgaaaaaagaagaagcatcaatatctgtatcaaatgcagaggataaactgctaccgagcacataatacacaaaagcagcggtaaacctgttaaaagaagctgcatcgatgctccgctgtctgttacgtttcacccggtattctctaccgtgttttccacctgcataaaacctgcaagaatcccctctgcaatacttcctgccatcgcgcagccggttggaacagcaatcgtcagaatcccaagtcgcaacagctcttttgccccggcagatgtgaatggggtttccgctttctgttcgtttctgaaatagctttctgcgaacttcgccagcgcagcttctccggcacatacaagcaaacttccagacagcgttgcagcaatgctccgaccattatatccatatttctcatagatcagcccatgcagagtaatagcaccgattctgagcagttctccgtttccaaaacccatactgagcattcctgcgatgcatccacaacagccgatcacagcaaaaataaaagctgttttgctgaggatttctcctagtttagaaagtttctgaatcgtatggagtgatttcattgtgattctcctctcctgaattttcatttatcgttccgcttcttaaaatttatattttcaataaaataacgcagagtgaatctgactccttccatcagtttcagctctgcgtcttagcgtctggctttttcgaacgtgtgatatgaaattgttgtagattgatcagttcctcccgtttacacttcgggcaaaagagaagaaaatttttcagaacagtatcttcgcggatccatacgcgggtcttgctgtgacagctcggacacagcagccattgtccctgtttc

SEQ ID NO: 2706 - DNA, 605 bp, Unknown
  gut microbiota DNA sequence
agggcatccacattctttacagtttttctttggtaacattttaaaaatctgaatacctgataaagccatagtttttatcctcctgttctatcgcttacacttaaactaattctttgatcattttagaaatggttgctacagactgaggatgcattaaaattacggcatcagatccacaggccagatcggctgctgcggtcatgatttccatagaaattgcacgttcttctgttggtccccattccggcatatcttcctcggaagccatggattcttttacgttccatgtttcagaagatactggtgtaatgataggcatctggagcatggcatcactctgagacagtgctgctgctttgatacggtccatagtagatactacatattcataaccatatccaacggctgcagaaccaacgttcataacgatgctttccggtttgacacccagctgtgtggtaactacgttcagctgttttgccaggttgatatctactgcagattcagctcctactttctgatcgtaagcaagacctgctgctgctccaacagatttgtaatcttcttctcttgcagacaggatcagagcgtttttaccctgcagt

SEQ ID NO: 2707 - DNA, 537 bp, Unknown
  gut microbiota DNA sequence
ccaaacatcggtgtagaatgataattcactttttctacctcggaccatacctgtttccagacctccgcgtctactgtgatatgttccgcacccagtttctccaacacattctgatcccactgcggacgtccgatcctgctgagcggtacctgtcttgcgatctcttccatcgtgtcgatatccgtacaggtataatgatcctccagcccggactcggtcaccatctcacggtctttctcatactccgctctcttttccgcatcaaataaatgatgataccagttggcatcgtaatttaacaaaactccgccctttttcagtacccgcatccattctttatacgcctgtgccggatcttcgagattccaggtcagattccggctgactaccgcgtcaaaggtttcatccgcaaaatcaagatgctgagcatccatctgacgataggtgatcttcttggcaagtgctcccgcattcttttttgcttcttccagcatggcttccgtataatccaccgccatcaccgaataaccggcttcc

SEQ ID NO: 2708 - DNA, 1189 bp, Unknown
  gut microbiota DNA sequence
atattctttgtatctgccttcttcgatggcctgacgaatctcgctcatcattgtgttgtagaaatacagattatgtagcacgcagagacgcatgcccagcatctctttcgcttttaacagatgacggatatagccacggctgtaatttcggcaggccggacactgacatccttcttcgatcggacgctgatccagttcatatttggcattgaacaggtttctctttccctggttggtgtatacatgtccgtgacggccgtttcggctcgggtatacacagtcgaaaaagtccacaccacgatctactgcttccagaatgttggccggggttccgacacccatcagatacgttggcttttccagtggcagatgaggtacggtcacatccaggatatggtacatttcttcatggctttctcctacagccagtccacctaccgcataaccatccagattcatctcactgatcgcttttgcgtgatcgatacggatatcatcaaagatagctccctgattgataccgaacagcagctgatttttattgatcgtatcttccaggctgttcagtctggccatctcggttttacatcttgccagccaacgggtggttcttgccacggaatcctccacatagcttcgttctgccacgctggacgggcactcatcgaaagccatcgcaatggtggaagccaggttggactggatctgcatactctcttccggtcccatgaagatcttgtgaccatcgatgtgggaacggaaagttacgccttcttccttgatctttcttaaacctgccagggaaaatacctgaaatccgccggaatccgtaagaatcggacgatcccagttcatgaatttatggaggcctcccatctgttttacaattttatcacccggacgcacatggagatggtaggtattggacagttctacctgtgtgccgatttcttttaaatctgtagttgccactgctcctttgatggctgcggcagtacctacgttcataaataccggagtctggatggttccgtgaacggtctggaattctgcacgttttgcatttccatctctggctatgatcttatacatatttttatcacctttctcttttcttttaccggatgttccggtatatggtccatatgctcagtttttctgatcctctgattttaaaacatcattgcct

SEQ ID NO: 2709 - DNA, 1562 bp, Unknown
  gut microbiota DNA sequence
atctgccacggcaacaaacaaactatttcatgaatccttctgccgataatttgcataggccagtcgatattcccttggtgttacatgataaaattttttgaattcccggtagaactgtgtaaagttacggaatcccaccgattctgcgatatcattgatattttcatcactggaaatcagcagatcggctgcctttttcatacagatgtaagaactgtaatcatggatactcagcccggtaaagtttttgatggttttgtagagcgtatctccggaataattaaaatacgcttccaggtctgcgcgtgtgattttccggtcggaagtgagcatgtacttgcggatccggttaaataaatcctggtttctctgatgttcggaagtaagcggcgtgttgctgaactttaccgggtcaaaaagttccatcataagctgactggcatagcaggcaagctttagggaaatgttatcagatggtgcggataattcacagatcatacgctcgaaaatattatgaatatgatgctggatccattcatatccgttagccggtataaaatcagtaaaatgacgttccgactgtatatagtccaggagacgatgataagcggtattattttcagaaggaaagtaacggggaaaagccaggatctgatgcataaaagactggctgatcttgaaaaataaaactctgcatgctgttgcgtattcttctgcgtggagaacgtgagggtctaccaggcagcaacctcccgccggataataatgcctgaaatgttcaatgttctgatagatttccccatctatgagaaacataaattcataatattcatgagaatggagacggatcatagattgcaggctggtgtaatcgatcggtatcagatcgctgacttcttccagaggagaaaaagaggcataatagacaccggagatattattttcaaaaagtgtgaaaaagttgttttctttatccggagagtgacgcagctgtaagatctcgaccggtccggtcatatcgtaggcattcgccatagagaaaaaagaaggagaaggaagcgattcaaaaccggcagcagggatcgtttttgcggaatctgatgaaagaagaaacataagaaaaatcctttcgtgaaaatgatataaaatataggaaaatacaattattatagatattttatatcatttttaaaagcattacaatagtacttagtaaagaagcactgtatataaggagttacttgagaacggagtgaacagtaactataaggtgtacagcaatcagctttgtgtggtgtatgtcataaggagatatctgaaaatatttctgcaggtattataaaccgaatgaaaaaagttttaaaagctttcagaaatattatggcaggaaaggagaagcatatgataaaaagattattgaatcagggatggacggtgcaggcaggcgacggaggcggattatccgcactgtttggaggttcgggagagccgccgaaaccggtgaatcttccccatgatcatctggtggagattccgaggaatccacaggaaccaaacggtcc

SEQ ID NO: 2710 - DNA, 327 bp, Unknown
  gut microbiota DNA sequence
gtatggatatagtaatttttatctggatatcactgattttgtaaaaatcggacaggcgaatgtcatcaaagtgatcgtaaaagatggcgtgccaagcggacgctggtatacgggtggcggtatctaccgggatgttcatctgatgattgctgagccgacacatatcgctccggacggcgtatttgtaaaaacggaaagcgtagatgagcagatcgcagagatcgctgtgtgtacagaagttgtgaacgatgataaaacgatgaaaagtatcctcctgtctgcaaaacttaccgatgaagcaggaaaaacggtggcagaaggaaatat

SEQ ID NO: 2711 - DNA, 524 bp, Unknown
  gut microbiota DNA sequence
aggtgagacttcgtgagccggtttcggataacgaagttttatgtggagtatgaattatgttatgtgtcataaaaacctccgtatagaataaaaaagtgtgccgggattttgtaactgtttcgtgagcagttacaaaagattacagaaaagccatgccccggagaagtgcaccggaacatgactctctttcattacattacatagcaatcattgggttgataaatccattttcatgatgcgggtaaacaacagtttataaagtttccgcgattcttcttgccacatacacgccgctggcagatgcatgggacagggagtgggtaacaccgcttccgtcgccgatgatatagagtcctttgtacggactttccagattctcgtcgatatccacttccatattatagaacttgacttcgacaccgtacagcagggtatcgtcgtttgccgtacccggtgcgatcttatccagggcatagatcatctcgatgataccgtccaggatacgttttggcagaaccagtctc

SEQ ID NO: 2712 - DNA, 955 bp, Unknown
  gut microbiota DNA sequence
actgaaaagtatcggttttaatgcgatccgcagttctcactatccgatgagcagaaaacttcttgcagcgtgtgacaaatacggcatgtacgtgatggatgaatacgcagatgtgtggacatcttccaaagttgcgtatgactacagtatgcatatgaccgagtggtgggaacatgatgtggccaatatgatcaggaaagataaaaatcatccatgtgtgatcatgtattctatcggtaatgagattccggaagttgggaattccatcgattccggctggggcaaaaaactggcggaccggatccgtgcgctggacccgaccagatatgtgaccaattccatgaatctgctgctggcaggtatggacatgctgtcaaagatggctccgggcgcacagggacaggatcagaatacaggagaacagccatccggtgagattaactctatgatgagtaacatgggagatatgatggcgcagctgatgcagagcccgatgctggccaaaatgactgaggaagcggcttctcaggtggatatcgtaggatataattatgccctgggacgctatgagccggaaggcgtggaatatccgaaccggattctggtaggctccgagacgaattctccggatcttgacaaaaactgggaagtagtagagaaacttccatatgtgatcggcgattttgactggacagcctgggactatctgggagaaaacggtattggtggatatgtatatggagatgattgcaccaatcctatgggtgccatgtatgccccgtatccgtggaaggcagcttactgtggggatgtaaatctgcttggagacagacggccggttacctattggagagagatgatctggggaatgcgtacagcaccgtatattgctgtacagccaccgaaacattatggtgagacaaagcatggatcccagtggtgcttttccgatgca

SEQ ID NO: 2713 - DNA, 626 bp, Unknown
  gut microbiota DNA sequence
attttgtgaaatgggagatcagcgcgctgcgggatgccggtgccaaacagcctacgaccatcaatatgatgtatgatttcaagggactggattatcacaagtttgccgacattgttgattttgtttcctgggacaattatccgacctggcacaaagaagcggaagcagttacggcagcagatacggcgatgcagcatgatatcatgcgcagtatccagaaaaagccgttttatctgatggagagctgtccgtccgcaacaaactggcagccggtcagcaaactgaaaaagccgggcatgctgcacgccgcatccattcaggccgtggcgcacggatcagacagcgtcctgtatttccagatgcgccagagccgtggagcttccgaaaagtttcatggagcggtgatagaccattatggaggagatgacacccgtgtattccgggaagtgacaaaggtaggagaaaccctggcgcagatgcaggaactttccggtgccatctgcagtccgaaagtggctgtgatttatgacaccgaaaaccggtgggcactggaagatgcggcagggccacggaatcagggcctgttttacaaagaaaccgtggaaaaatcataccgcgccttccgc

SEQ ID NO: 2714 - DNA, 818 bp, Unknown
  gut microbiota DNA sequence
atctgatcctgcgatttttcagctttataggaaatgctttacccaatttttttgttgctatgttactgatgcagctattaagcattaagcttcaactgcttccggtgatttcggatggagtgaccttaaagagtgcactgatgccggctcttacactggctatttccatgtcagcaaaatatatgcggcaggttcgggcagcggtgctggaggaatggaataaggattatgtgcagggagcccgggcaagaggcgtgcgcaggcgcgtgatcttatggaaaaacgtaatgcaatcttcgatgctgacgattattacactactggctctttccattggaaatctgctggggggaactgctattatagaaagtatttttatgtgggatggagtcggtaaactggcagtagatgcgattaccatgcgtgattatccggttattcaggcttatgtggtatggatggcaattatttatgtgctggtgaatctgttcacggatcttttgtaccaccggctggatccgagaattcgtctgggggtaacaaaaggatgagagaaccaaccattagaaaacagaatatacacaggaataatttgaagattcgtctgattttttttgggatactggcactggtgctggtgatcgcatcgtatttcagtgaatatttatgcccatatgatccttatctgcaggatctgggtaatgcaaaggcagtgccgtccgctgcacatatctttggtactgaccgatatggacgggatatgctgtcccgtgtgatcgtgggaagcaagaccagtatttattccaccttattgctgg

SEQ ID NO: 2715 - DNA, 3186 bp, Unknown
  gut microbiota DNA sequence
tattacagtgcttggtacgatgatcggagtgttttgtgcctggaagggaacatgggtggatactgtgctgatgcgtatttccgatgtgttccttgctttcccggggcttgtgtttgcactggcggtagcggcagctcttggaggtggtgtccataatgcgatcatagcactgggtgccatcagctggcccaaatacgccagagtggcaagaagtgaaactctggcacaaaaagaaacggtatatctccgggcagcgaaactgtccggctgtggaacctggaaactgattttcaagcatatacttcctaatattacaggtcccattctggttacagcgatgctggatatcggaacgatgatgatggaacttgcaggtctgtcttttctggggctgggagcaaaaccgccggtggctgagtggggaagtatgatgagcgatacgagaaatctgcttactactcatccatgggtaacacttgctcctggttttgcaatctttgtatcggttatgatattcaatctgttaggtgatacagtcagagactggctggatccccgtaatgggaggtagaaaaagtggctgaagtcattcgttatgaacatgtagatatcagttataaaggaaaaagagttgtacatgatgtcagtttttctgtagaaaaaggtgaaatccttggaattgtaggagaaagtggcagcggaaaatcgacgctggtcaaagcggcgatgggtctgcttggaagggatggtcttgttagcagaggagatatctggtataaggggatggatcttcccgatctgaaaccgggggagatgagaaaactgtgcggaccggagctgggaatgatctttcagacggccggaagctctttttgtccgatccgtacggtacgggcacagctttatgaattcatgacagaacataaaaaaataaaaatggatgtattcgagaaacaggcggaggagctgcttgaaaaatttggctttgatgatcccaaaagagtaatggacagttatccctttgagctttccggcggtatgcagcagcgtgtgggtattgcggcggccatgtttttgaacccgaagatactgatggcagatgagccgacttctgcactggacgtaacagttcagaagcaggtgatagaagagatgcttatggtgagaaaaacatttggaacgtctattctgctggtaactcataacatgggagtgatccgtgcgatggcagacaaagtgctggttttacatgagggtgagatcatggaatacggagtgacagaagaagtatttgaacaacctcagtcagcgtatacaaaaaaattgctggcagcggttccaaaacttcggaggtaggaaaaatgagtgtggtactagcagcagaacatctgacaaaaacatttgtctctcagggaagagagaactatacagcagtagatgatgtgagcttttctgtagagtccggtgagaagcttggaattatcggagaaagcggaagtgggaagactaccgttgtcaatatgataaccagattactggatgcttcttccggaatgatccggctggatggagaagatatcacttcaaaaaaaggaaaagagttaaaagaagtatataagaagatgcagatggtatttcagactccaacggagagctttgatccgcgcaggaaactgggggatggaattgcagaaagtctgatcaatttcggaatgaaaaaaaaagaagcaatggtgaaggcgggacagctgctggagctatgcggactggaaaaagaatatgcagggcgctatcctcatgaagtcagtggcgggcagtgccaaagggctgcaatcgcgcgtgcgatcgctattgatccccggctgctgattctggatgaggcgacatctgcgctggatgttacgattcaggaagagatccttgaattgctggataaactgaaaactgaaagaaatatgacatatctgtttatctgccatgatattgcactggttcaacaattctgtgacagagtgcttgtcatgcatcagggaaagattgtggaagagggaacgccggatgaggtgatccggaatccgaagacagaatataccagaagacttattgaaagtgttctgtgataataacaggaaaccctggccggaatatgagaacggatagaaagaccggccggagattctgtaaaagaataataaagtgggaaacagaaagagaggaacagaaagaatgaatgcaaaaaaactgatcggtactgcgttaagtgttgttttatgtgcaagtatgctcgcaggatgcggaaaccaaaaaaacgaaacagagacaacaactgagaaagggaaaaagaccctggtaatcggtgacacaacctttaacagttccaatgaagaaaacaatgtgaatccacacgattcttattccggttgggcctgcatccggtatgggattggtgagacactggtaaaatattcggataccatggaaatcgagccatggctggcaaaagaatgggaaaatgtggatgagctgacatggaagatcacactgcaggataatgtaaaattctccagtggccgggatatggatgcggaagcagtgaaagaatgtctggagcatctgactgaaaatcacgaacgggcaaaaaatgacctgaaaatagaatccatggaggctgatggacagattcttacgattcatacatcagaaccgaaaccggcgctgttaaattatcttggcgatccttatggatgtatcattgatgtggaggcaggatttgatgacggaatcgtggcaggtaccggaccatacatcgctgtggactgtcagagcgatgatcatctgacactggtgaaaaacgataattactggaatggaacaccgaagattgatgaattgacgatccgtaccattacagatggaagcacactggccaatgcacttcagtcgggagaagtacaggctgcgtatggtatggcatatgaaagttatccgatgtttgaaaatgacgattatacattttcacagatttccacatcccgttgtttctttggaaagatgaattttgatgaaagttctgtatgtgcagatgcggcagtccgaaaagcgattgccatgggaattgacaaagaaaactttgtcacaacgcttctggaaggaaatggttatccggcaaacggggtatttccggat

SEQ ID NO: 2716 - DNA, 993 bp, Unknown
  gut microbiota DNA sequence
aacggctacaaaagaaatatacaggaagcaggaaaagaatgttggagtaattcttcatttttttcttgctttttttcatataatatgatactgtcagattacaaggaatggaaacgttaccgataacgtttccaaaagtaccggaaatctaaaggaggataaaaaatgagagcaagtggtatcttacttcctgtaacatccctgccgtctccgtatggtatcggctgtttttcaaaggaagcttatgagtttgtggaccagctggaaaaaggcggtgaaaagtactggcagattctgccgttgggaccgacggggtatggggattccccgtaccagtctttctccacttatgcgggcaatccgtattttattgatctggagacactggtgaaagaaggactgctgacaaaagaagagtgtgacagcgtggacttcggaagcaacccggcgtatgtggattatgagaagatttatctgggcagattcggtcttctggaaaaagcattccacagattcgtaccggatcaggaatatgaaactttcgtagagaataacagagaatggctggaggattacagtctgtatatggcaatcaaaaacagcctgggcggaattgcctggagcgagtgggaggcaccgttaaagaccagacaggcagaggcgctggaagaaaagagacaggaattaaaggaacagatcgcatttatctgtttccagcagtatgaatttgcaaaacagtggaaaaaactgaaaagctatgcaaatgaaaaagatatccagatcatcggtgatattccgatctatgtggcattcgacagtgcagatgcatgggcgaatccggaactgttccagtttgatgaaaacagcacaccgcttgcagtggcaggatgcccgccggatgctttcgcagcgaccggacagctctggggtaacccgttgtaccgctgggattatcatgcagagaacggctatgcgtggtggatcaaacgtctg

SEQ ID NO: 2717 - DNA, 651 bp, Unknown
  gut microbiota DNA sequence
ttcacggttccggtaaggatcagtttttcttttgctcttgtgagtgccacatataatacacgcagttcctcacccagactctccagccggatctgtttctggatcacctgccgcaccagtgacgatgcctgtgtccgctccttggggtctaccgcctgcatcccgattcccagatcctgatggatcaccagaccggtgctggcatcggacatgttaaaccgttttcccatgcctgccgcaaagacaatcggaaactccagtcccttacttttgtggatactcatgatccgcaccgtatcttcctgttccccacgtatattgacctcaccaaaatccacctgatatttctgcaattgttccacataccggataaaattaaacagcccgcgataactggtgctctcatattccatcgctttttccaccagcatctgcagatttgcccgccgttgtgcaccgccgggcatcgcacctgcgtataacccgtacccggtctttgtcaggatctctccgatcagttcgtggatcggtgtgtaagtgaccttctcgcggagtttttcatagacagaccagaaattgccaagtttttcacgcaattccgcttcctgtccctcctgcagatagttccagacgcatccatagatcttttct

SEQ ID NO: 2718 - DNA, 1493 bp, Unknown
  gut microbiota DNA sequence
aatcgcgataaaaccgttttcattatttccataagaacgcaccggagaatgtccgaatatttcttttgtcagttcataggttgcatccggcagtgcctcacccatggaaaataccatctctaccttccacttactgatatctcttcccgtccgtcggatataaccggtcaatgcagtcagtgcactcgaataggtcaccagtacctggatcttctttttctcgatatctttacagatcttttccagagaatcatctcccatgttggagatatccaccatgaccagattatttttgaaagatttccacatacttatggtatttttcccctttatccacgcgcggaattccccacgcttcattcccagacggaaaccgttcagttccatacaggaaataaagttcatattgacccggttcatcttgtcaccgtcacacagaacggtaaatggcgttccggtagaaccactggtactcagccggtacagattaccctgttctttgctgttctccaccagcacttcctcataatgctcaagaaaatctcccttggtcatcaccgggaaatcttccagttttgtccattccggatgttttttataatacggagaatggttttttacatagtccagaagcagatcgatcctccgctccatatattccggtgtcacaccttccacgatctctcttttattgacttcttttaattttttcagcttaccgccttttgcagcatccagaagattgaacaccactcttctaagaacttcacctgtctgcatcttttcattctccttctttcttcgccggttttgccttccagatccccagtgcgatcactgccacaacccgaagcgtatttgctcccaggcatgcccaggcaaatccgatcatcccataattttttgctgccagcaccgatgtggtcagcagaatcacaaaatgtgcaagctgtatccacagctgccatttttcatccgtaaatgttaaaacaagtataaataaaaatgcggaaaacaatcccagcacctgtgccagattgaccaccgtgaccagtcctttgatggacggaaacaggtcatggtaaaacagccagacaaacagcggtgttcccacctgacagcccaggaaaaagacacctgccacaccgcctcctgcaagcactgcctttccaaactgattccggtttaacagttccttgcgtttggtcagataggagatcacgattgtgttgatcggtgcgatcagaagcgccagagtctttccgatcagggaaaccacatagtagatcgtcacctgttcgtttccgaggatctgcttgatcaccagacggtccatgttcatcgtggtattcgtgatcagatacgacagcgtcaggaaaaatccgcgctccagcgccacggaaaaatggtcactccgctgaaaaaacttatgaaatacggatccggtaactgccacataaccgagtgcagccgcctcaccgaccagatagatc

SEQ ID NO: 2719 - DNA, 582 bp, Unknown
  gut microbiota DNA sequence
ggtattccacatccccgtagtaccggaaaaccgtcagcagaaacagggcaaataccccgattcccacagggatcccgctgatactgtcccttgacataaaaagtgccacaccgcttcccagtacaccgaacagcaacaggatccagtcgtagtctccattggttacctcatatgatcttcgcaccaccagacggctcgtattcaacgcctgcccgatggacggacagatgatcgccaccagtcctgtaatatacaaaagttctcccagctgctttgcacccatatagcggttgagcagcggcgtgacgatcagctgcaaaacgccgttcataaagatcagcccgcccatcgtatacagggtgttggcagcgatccgttttttctgttctttcttttccacctgtttctcctgtcacttcactgtttttcaccggtaccgcctggttctgttccatattgccaccagaaagcaccgatcccgtcactgacttttctcttccctattatccgcagaaaccggtctgattcttatacttttcgcaccggttttctatgtatttgcgctttccggaagcaagcacc

SEQ ID NO: 2720 - DNA, 498 bp, Unknown
  gut microbiota DNA sequence
ggtgctgatggcgttacagatctggggtgtgataaagattttaccgaatcatccacatgatcacggaaccggagagagtcatgaggaacacggttgcgaatgtcatgatcatcaccatcatcacgaggaggagcatcatcatccggtggactgccaggagggagatggtcattgtcactgtggtccgaaggtgacgaagaaagggtatcttggtgcactgctggctggcatggtgagtggagcggtggcttcgcattgttctacgccagtgatgatcgcgctgctggcaatggcggctcaggctgggaagacggcatgggggattttcctgatggtgatgtttgcgattggacacagtgttttgctggttacggcagggacgagttacagtgtggtggaacggtggatgtatgatccaaagtatgagaggattagtaaggttttgcggattgtgatgggagttttgattttgttgattggggtggctatgatttatct

SEQ ID NO: 2721 - DNA, 1252 bp, Unknown
  gut microbiota DNA sequence
aacaggagattccatttcatcaggcggcagagatcggaaccagaaaagtgatccaggaacattctacgatcggcctggtagttacctgtgacggctcttttggagagattccgcggaaaaactttgagaacggggaagaaaagacggtacaggaactgaaaaagcagggcaaaccattcctgatccttgttaattcaaaaaagccgtacggagaagaggcgcagaagctggtgaaggaactggaagataaatatcaggctgctgtgcttggcgtaaactgtgaacagcttcgaaaagaagacgtgattcggatcctcgaaaagattctctatgaattcccggtgcgccagatcgaatattacatacccaaatgggtggaactgcttccgattacccattatctgaaagaagatcttctgaaacagatgaaagaacagatgggaaaaatggaatatatccgggatatccggcaggaaaacttacagatggacagcagctatgtcaaatccatcacgctggaggagatcaatctttcgaacggcgtggtaaaagtccgcatccagatcggagatccctattattatcaggtgatgagtgagatgaccggtgtgccgatcgagagcgagtatcagctgatccacaccttaaaagaactggcacagatgaaacaggagtatgcaaaagtccagcatgcgatcgaatccgtccgcggaaccggctacggggtggtgatccctgagaaaaatgagattaccctggaagaaccggttgtgatccggcagggaaataaatacggtatcaagatcaagtcagccagcccttcgatccatatgatcaaagccaacattgagacggagatcgcgccgatcgtaggaagtgaggaacaggcacaggatctgattgcatttatcaaggaaaatgaaaaaacagccgatgacggcatgtgggagaccaacattttcggaaaatccatcgagcagctggtagaagacggcatccgcaccaagattgcccagattagcgaggaaagccaggtgaaactgcaggatacgatgcagaagatcgtcaatgacagcaagggagggctgatctgcattattatctgagaaaaagtatcggataagcgaaaagaatttgacaaagttctgtaacaaagctataataaattctgttgaaaatgaccaaaaaataaggggagaagcgaaagaatatttatgtaaagtacataatgtctctctttatgagacaacca

SEQ ID NO: 2722 - DNA, 482 bp, Unknown
  gut microbiota DNA sequence
cgatatggtagaacgtatcaaaggttccgtttactttttccggcagcgtttccagttcttccagactacattccaccagttccagatgcggatcttccggcagacggtctttccttgccgtatccttccggatcaccgcgcacacagagattccgtgtttcaggcactcctcaatgagcgcttccccgatcatactggtcgctcctgtcacgatcactctttccataatacgccttcctcctccatctcttctctcgaaagaaacggatacatatcttccagggatgccgacaccatggttccgtccggaagctgtctggacgccagtttcggctccgtcttctgaagtttcgacacaaagacctgacagatcaccggtgccggagcttccatgaccacccgcagatcttcttcgagtgtcgcactgtttctacattctttataagtaaattcatacgccggtgccagcctggaaagatccg

SEQ ID NO: 2723 - DNA, 1464 bp, Unknown
  gut microbiota DNA sequence
cgctctggtagacaacttctgtgatactgttcgggaactgactgcttcttacccgattcataataaccgcccctacggcaacttttcctgtgttgctttctccccctgcctcacactgaatgatcgctgccagaagtgccagttcgctgtcagatgcagacatggctgttcctgtctggctgacctgctctttttctttctgctgtgcttcatactccgcaacactgagtgctgtggtttcttctatctgaatatactccgcaaacatgtaagccgaatcttccccataacttacctgataccagtctccctcctggcccaggatctctacccggcttccctgtttcatgtttcctatctgaccggcatccatggacggctctttccgtacccgaagagaacttgctgtaaccgttccctgactgccatatgattcttcgtaaagatttttcgcttcttcaccaaatacgaggagatcggatcttacatacccttctacagatcccgacgtgatctttgtccagtctccctcctgttctactacctgtgccgctgcccccttcggcagtacgcctacgcgttcactctcctgtgaatcttcctggcgaatattggcatagtcggttacattcgcggctgctttctgcgcccattcatccgtatcgagaaccgaactcccggaattgtcttctgtaacttctgtggatgtctcatcggcaagtaccagtgttcctgaccccgctgtaacaaccagcacacctcccaggatccctgctgctttccataatttattcacttgaattacctcctactgatttcgttctttttacgatttgttacaaatttgttacgatttgttacggtgtgattgtaacaaatttaacttttcttgtcaacaggaacatttcgggggatttcgcggaattttccgaaaatttttggtggattgtaggttttgagggcgatatttgggacaggatgtaaaattgtgtaaatgacgaaatgtgattaaagtgtacatgtgtgtgcaatatatatggaggttgttcaagacggacgcagaaggagacgggcaccaggggtgggcaacgtgggcagggcaactttgaactagccgcccacacagtgttgcccacccctggtgcccgcctccttctgctgtgtattgacatctccactacgaatacattccccccacaaccctttccgctaccgtcgccaacactcagaaagttcgcgcttgctcaataagaacagacagccttttgctggcgcttttagccgagatgagatccagtccttagaagaacttgacagtgagcggctctccgcgaactggcactttagttcttcttaggacttagctcagatcagcgttgccagcggttgtctggtcttattgagcaagcgcggactttcgtccgttttgccgacactccccaataaaaaacaccccgccggaag

SEQ ID NO: 2724 - DNA, 23320 bp, Unknown
  gut microbiota DNA sequence
atcgctcgtccggttcacatccccgtgaacatcattccacagacgatacccatccagattacgtctgccctggcgcacataattatcccggatctgtaagaaatactgactcgaatccacattacaatagaagtggaatccctggctgctcagataattaaacttctcattatccgtcgtataatcatgccagtccgccagatcctgtccgtgtgcgaaaataatcgtatccgttccgccaaccagcggtgctacatactccagccatttctgcgtatccgtctggatccgctccatgctggcatctccgatccggatgtgaccccaggtatgacttgcgaactcccagccgtcagccttgatcgcatctgctaccttcgttgcctccgcacgctcgtcatcccagttaaaatccggatgcgcatccagccatgcctgctggtcatctgtcagattctcatgcgtcttgtatgcaatgtccgtacgataacccaggattccatcataacccgtcagcgcgatcataccctttgcaccgtgataagaagcatccggatgctcttcaataaactgatccagaagtggtacacagtcatacgcacccgttaccatcgttccgtctgcctgtacatactcacaggtaggttttccattttcatccagcacgatcttcgaagcaatgcctcttccatcataactgtgataataactcaaatcatccagcgacatcacgaatgctttcttaccagccggaagcttcagttccgtatttggcgtaaaatgcactgtaccatccgcatccgttgtctcgaccaccagatctctcaggcggaccagcacatatccgttatcatacattgcctgcgtgatcttattaaactcatccaccgtagtcatccactgcttgaaaccggctgcgatactgtcatctcccgcaaaaccacgatccggatccacgatcagagaatgatagaaaatatgagtcacctcatccatattcaccggcacacagctgtccttcgttgcctgatactcagcgatctttgccgtgatctccggatcatcagctgcaccctccacgccatttaacgtctcgatcgcaccatcataatcatacgtagctgccagatactcggcctgctccatcgctgttgtttttgcgtctgtcgcagctgctgccgtatcctgtgcatcagaagaagtatcgcctcctgttgtcgtatcctctgtagtgtccgcagtctcctgattctgctccgtctccggtttctgtgtactgccctgtgtctggtcttcgttcagtgtctttgtcagaaagaaaatacacactgccagaacaaccaacagaagaatcaaaatcacggatttgaccaccatggattttttcttcttctttttcttcagcgctttcttatccatcttctcactcatttttattcatactcctttcttctctgtctagaagcctcatacatcaggatcgctgcagccaccccggcattcagagactccagctgtcccttcattggaatcttgatcagacagtctgcctgaccggcggttgcgtctgtcagaccatttccctcatttccaatcaaaaatgcagttccaccggtatacgatgcctcatcataccagccctttcccttcagatgtgccgcataagaacgaaccctctgctttttgaaccatgcgaacacctcctcaagatccggtgcgatcacaaaaggaacccggtaaatagatcccatcgtagaacggatcgtctttggattgtaaatatccacgcagtttgcgctcataaagatcccatccactccggcgccctccgccgttcggaaaatcgttcccatatttcccggatcctgcagatcttcgaggacgagaaacagcgggtgctctttctcccccatcagttcttccattgtataatgatactgacgcacaacggtaagcactccctgcggcgtcagcgtatcactcatctgggcaaacactgaatcttttaccatttcataaggaatcccctgcaaaagtacctgatgctccggatcttccagaaaactttccgacacatatgtctttaccagccgttccctcggaacctcccggaacatccgtaacccttccaccagaaaaacatcctgctttctgcgctcccgggctttcttattcagctggatcatctgttttacctgcgcattgctgctgcttgttatcatagtatacccattcctttattttctatagaagttccatataaacatggactttggcttgttgcccgcgagtcaaaaacggcggcataccgactcggaaggtatgccgccgtcactctcgtcttttttatttggaatagtttgcagacagagattttgcaacttcgtactgatattcggaaatacctttctccatagccagtgcttcgttgatatcaaagtccacatattcgccgtttttgtatccaacgacacgttttgtttttcctgctgccagcagatctactgcataagatcccatcatggaagcatgtacacggtcgatacatgtcgggcttccaccacgctgcatatgacccagaatggttgcacgggtttcaataccggtagctgcctcgatacgttttgccatgctgctggaatgtccgataccctctgcgttgatgatgatgtggtgttttttaccacgttttcttccttcgatgatgttgttgatcagtttctgctcatcataatcgtatttttctggaagcaggatatcttctgcaccgttggcgataccacaccacagagccaggtaacctgcatttcttcccataacttcgataacgctgcaacgctcatgagaagtagaagtatcacgtactttgtcgattgcttccatagcagtattcacagcggtatcaaaaccgatggtatattctgtacatgcgatgtccaggtcgatggttcccggaataccaactgcgttgattcccagatttgccagcttctgagcacctgcaaaagaaccgtcaccaccgataactaccagaccgtcaatgccgtgttttctgcagatatctgctgcttttttctgtccttcttctgttctcatctctgcacaacgtgctgtatacaggatcgtaccaccgcgaccgatgatatcagatacatcttttgcagacatatcgatgatctcttcgttcagcagtccgtcataacctttcaggatacctttcatgttcagtcctttgctcagtccacgacgaacaaccgcacggatcgcagcattcattcccggagcatctcctccacttgtcaatacgccaatggtcttgagttcttttgccataatgttccctccactaatatatctaatctaataccggataactggattatccggctctatcgccttatcgttttatattttaatgcatatgaagctgtttttcaatactcttttccacaactttgacattttccgcgccgtattttccgcgtaaaataccaagcagattgtcctcgatttcgatgcttctcgatgccggaagatgtttcatctgcttttctgcccgcagatacacgaccacatgatcgctgccgtcggactggcgcagcgtatcatagagtcctgccacctcctgctcgtactgtctgcggtcggcaaactggatccacagctcccgcggcacctgatcgaacgagacgatcttttcacagatcagtttgctcgccttatcatcctccgctgatacttttcccatgataaatactttggaatccgtctcaatcagcgcagcatttctctcataatcccttggaaatacaaccacttccaccgttccgacaagatcttccaatgtgataaatgccatcactttattgtttttggtgtatttgatcgtcttttccgtgatcataccgccaatgaccactttcgattcatctttgaccttcggcatttcgctctcttccatcggttgaaaatccgaggtcgtcgccgtgatattctttttccagacatctgcgtattcctccagcggatgaccgctgatatacacgccaagcacttctttttcaaatgccagcttgttttctttctcatattctcctacgtccggcatccggatctcgaaactctttttatcctcctcgcccatgatatcaaacagactcatctgaccggtcatcgaagattttttctcctggttgaccgtatccatcacctgcacatagatcatcataaactgctttctcgttccgccgaggctgtcaaaggctcccgctttgataaagttttcgattgtccgcttattgacttcttttccgcttaaccgctggcaaaagtctttgagcgaggaaaatgcgccaccgcgttctctttcttccacgatcgctcccatcaccggttttccgatcccctttactgcagccatgccataccggatactgccatcttctacggagaaacttccgttactgcggttgatgtccggtggcaggatctgaatgcccatctgccggcagttcaggatatattcggataccttcgacggattatcaatacacgaagtcatcaatgccgccataaattccaccggataatagtattttaaccacgcagtctgatacgataccaccgcataagctgcagcgtgtgacttgttaaatgcatacttggcaaaatccgtcatctcatcgtagatcttatttgccacctgctcgctgattccgtttgcgatacagccgggaaccccttcttccttatttccataaacgaagttttccctctcttttgccataaccgccgctttcttcttcgccatggcacggcgtaccaggtcgcttcgtcccagtgtatagcctgccagatcacgcacgatctgcataacctgttcctgataaacgatacagccgtaggtcggttccagaatcggctccagctgcgggcagtcataggtgatctgatccggtgcattttttcctttgatatactgcgggataaaatccatcggacccggacggtacagggagattccggcgatgatatcttccagactcttcggtttcagctccttcatgaagtttttcataccgctactttccagctggaacacaccctcgcattttccgcttccgatcatgccgagtaccgcctgatcgttgtaatcgatttttgacagatccagctcgattccttcgctcttctgcgccagttttaccgcgttctggatcacggtcagcgtacgcagtcccaggaaatccatcttcagaagtcccagttcttccagcgtcgtcatcgtaaactgcgtcgtgatcgaaccgtccgaagcccgggagagcggcacatactcatccaccgctttctggctgatcacgacaccggcggcatgcatcgaagtatgccgcggcagaccttccagacgtttcgacatatcgatcagatagcggatctgctcgtcaccctcgtactgatttctcagctccgggttcattttcagggctttatcgatcgtgatatttaactcattcgggatcatcttcgcgatcgtatccacctgtgcatacggaaaatccagtacccttccgacatcccggataacaccgcgcgccgccatcgtaccgaacgtaacgatctgcaccacccggtcttttccgtattttctcacgacataatcaatgacttcctgtctccgttcgaaacagaagtcaatatcgatatctggcatggatactcgttccgggttcaggaaacgctcgaacagcagctgataccggatcggatccagctgtgtgatccccagcgaatacgaaacgatacttcccgccgcggaacctcgtcccggacctaccataatatcgttgtctctcgcatatttgataaaatcccatacaatcaggaaataatccacataccccatggtcttgattgtatttaactcataggtcagacgctctttcagctcttccgttaccggatggtatttttcttccaggccttcccagcagagtttattcaggtactcccaggaggtatagccgtccggaacgtcgtatttcggcagtttggtcacgccaaattcgatctctacgtgacaccggtcaccgattttctttgtattttccagagcctgcggtgcatacgggaacagtgccgccatctctgcttcggatttgacataatactgcccgccctcatagcgcatacggtcttcgtcctgcactttttttccggtctggatacacagcaggatatcgtgggagcctgcatcttccgcataggtataatgcacatcgttggtacataccagttcaatccccgtctcactgctcatacgcaccagctgctgattgaccatctcctgctccgggattccatgattctgtaattccaggaagaaattattttttccgaaaatctcctgataacgcagtgccgccttttttccttcctcatacagtcctctggtcagaaatctcgggatctcaccggcaaggcaggcgctcaacgcgataataccctcgtggtatttttccagaacttccagatccacacgcggtttgtagtaatatccttccacaaatcctgccgagacgatcttcatcaggttgctgtagccctgattattctccgccagcagtaccagatgataataccggtcttccccgtgctgcatctctttgtcaaatcgggaaccgggcgccacgtagacctcgcacccgaggatcgggttgattccggcttcctttgccgcgcggtaaaaatcgatacagccatacatcacaccgtgatctgtgatcgccgcactgtccatgcccagctctttcacccgggctacatactctttgattttattggaaccatccagcaagctgtattccgtatgcacatgcaaatgtgtaaatcccatcggttttcctcctattttgctatcgtggcagtcgccaaggttccgtgcaaatacggactttggctcgttgcctgcgtaataaagaatgtgcctcggcatattctcgcgcctgcggcggtcgcttgcgacatctaccttatacgccgcagtgcgcatcctcgcggagcgttttttactttacaggaaagcaatttcctgtaaggtaaaaaagtctggtcggtactatccccgtccagactttcctgcctctactcttttcctgtttttcgtgccagtacattcagccagagtttatctgacttttctgaccgtacatcctgtgtggtccagatatcaaccacttccagttccggatattcttccatcagactctgcaattcccttctggtgtaatcatggaaataacgcccatgataaattccatcccggtctcccttatgtacggaaaaataaagcacaccattttccttcagcgcctgcaccagttttttcataaccttacgcatctcatcttcggtcagatgaatcagggaagcacacgcccagatcccatcaaagacatcatcaaattccatctcatcataggtcatctgcagtacttctttgtccgtgtttaccactgcgagcttacacatctcctccgagccatccatcggtgttacataaaatccatattcttccaataacagggtgtcccttccggaaccacatcccaggtccagcacttctgcattctccgactcctcggacagaagttccacaaacggcttcataacctcttccatgctcgcatctactgtttcttcataatagggcaccgcataccggttataatagtctatcgagtccaacgataatcctccttttattactcagacagtcgttttcttttccaactgcatactatcttttttctatcggcaaccatccttcacgttcttccgttttcttcacgggactcagtctgcaaagtgttaccaaaatatactgtatagtatagcaactgccgcctaaaaaatcaagtaaatacgtttatcctggatcttgattttcttctcttttaataaatgaccgaccgcacgtttaaatgccgctttgctcagtccgaattcccgtttgatcacttccggtgacactttatcatcaaacggcagcacacccgcatactcaccgatcacctttaataccagttcggaatcctcatccatctgctggtaggctttttttctcggagaaaggttcagttttccatcctctcttacatttgtcacacggcagcttaccttctcgcccggacgatactggccctgcgcttccgtcttcgggatcagaccggaatactgatcgtcaactgccacaaatacgccgaaattgtcgctgatctcatagattcttccctctacctgatcttctaccacatacggagactgcgttttcaggtacggatatactttcatggtcgcacacagacggtcgctcttgtcgatatacagggctaccagaacttcctgatcctttttcaccttcacagtctgctctttatatggaagcaacagatctttttccagtccccagtccagaaatgctccgatttttccaacttccgcaacttttaccactgcggtctggtgaagctccagcgccggtactctggttgttgcaatcaggcggtctgcggaatcccggtagataaatacttccagttcatcgcctacttttgtatcagccggtacctgttttgccggcagaagcactctctcctgctccttcgcgtctgccttctctccaagatagacaccgaattccactttttttactacctgtaacttctgtcttcttcctaattcaatcatgatcgttcctccgtaactgtgttcacgcagcctcctgcgtgtgtattttttgttttttcattataatatatttcacacaccgttcccagcattttcttgtttttctttctattataatttctttcatttaaaaagtttctcaggcgaattctaccaccgcatacggttctttctcttcattacacaaagcaactacatagctgtcttccgttttcgaaaccagcgggaaaatcttatctccaagcactgcctgtctcttgtattccgcccgcagtctctgcacttgaaaatcagccggaatgtattcctgcgacaagcggatatactgtgcattgtttacatgatgattggagtccagatgatactgacggacggtaaagcatcccatctcctgccgttcctccggaatccgaatctttcttccgagcggtttcatatccagtttctcctctatcggatatactgcccgttcttcctccgatgcctttaccggatgtccggtttttgtatcgatatacgcccagcttgaatccgcacatgccagtatttccccatccagtgtctccatcagaaaattacgctccccgataaatccccggaacccgtgcggccaggtggaaatccgtatgctctccccaaggtcagctgctctcctgaattcgatctgccatccggtcagcacccacgctctgccaagttctccctgaaccgccgtgccgcgccctacagattccgaatgaaatacactgcaatcctgaaaataattcagcacactgtaaagagtcatcctcgtatcttcaccgacttcactgtaacgtactttactttcaaacgaatacatgccgttttcctcctgttgttatcaatatgcaatgcaatcaaacttggtccactggaccaattattgatatacagcgtaagaaaaaagccttggatctatatccaaggcttgaagctgggctacaaggattcgaaccttgaaatgacggagtcagagtccgttgccttaccatttggcgatagcccattaacttattgtgctgtgctttttatttctgtatcgctcagcgacaagatgtattatatagcactcttcagaaaaatgcaagtgtttttttgaaattttttaaaaaaattttttaaacccgttttttaccattttttcgccattttctttctctctgtcttttccagattccgcctttcttcaccgacaatttcctgcccattttttccgcatcggtttactttgttttttcaaaatggtatactatacaaaaattgatcactgaatttataaggacaccaataaatatatggaggtacgccatgagagcgctggatttaaccttattaactgatttatatgaattaaccatgatgcagggttattttaaaaaccctaccgatcaggttgttgtatttgatgctttctacagacagaatccgtgtgacggcggttatgcgatcgcagccggtctggaacaggtcatcgaatacatccgtgacctgcatttttctccggatgatgtggaatatctgcgcggactgaacctgttcgatgatgattttctggaatacctgagaggattccactttaccggtgatatttatgcgatcccggaaggaaccgttgtgttcccgagagaacctctcttaaaagtagtcgctcctgtcatggaagcacagctggtggaaactgcaatcttaaatatcatcaaccaccagagtctgatcgccaccaaagcctcccgtgtggtttatgcggcaaagggtgacggtattatggaattcggtctccgccgtgcacagggaccggatgccggtatctacggtgcaagagccgctgtgatcggcggatgcgtgggaacttccaacgtgctgaccggcaagatgttcgatgttccggtcaaaggtacacacgcacacagctggatcatgagcttcccggatgaatataccgccttcaaaacctatgcaaatctgtatccaaatgcctgcctgctgctggtagatacgtatgatgtactcgactccggtgtaccgaacgcgatccgcgtctttaaagaaatgaaagaaaaagatccgaacttccacggctacggtatccgtatcgacagcggtgacctggcgtatctttcaaagaaagcttctgagatgctcgaagctgccggattcggcgatgcgatcatctccgcttccagcgatctggatgaatacctgatcgacagcctgaaagcacagggcgccacgatcaattcctggggtgtcggcaccaacctgatcacctccaaagactgccctgcatttggcggcgtctacaaactggcagccatcaaagacaaagacgatgaagatttcgtaccgaagatcaaactttctgaaaatacagagaaaatcacaaacccgggaaataaaaccatttaccgtatctacgataaagtaactggcaagatccgtgccgatctgatctgtatggtggacgaaaccttcgacgaatccaaagacatgatcatcttcgatccgatcgaaacctggaaaaaaaccaagatcaaaggcgacacttacaccctgcgtgaacttctcgttccgatcttccagaaaggtctgtgtgtctacacctctccttccgttatggaaatgcaggcaatctgcaaaaaggaacaggaaaccctgtggccggagacacgccgtctggtaaatccgcagaaagtgtatgtggatctgtccgacaagctgtataaagtaaaatctcagctgctcgaagagatgagcatgaaggctctggatctgcagtaaaaatttgtcttacaggtatcgattctgtttataccattatatgtttaaaacacgacccaggaattccccacgaagtaattcctgggtcgctgaatatcgcaagacaaatctaaacaatgtttatttatcggaacgttgaatatcggtaattactcaacaaatagcatgccagactcccgagacatacaagccacgatatattttagaaagaaaggaacctgctatgaaacttacgattctcggaaccggaaacgctgttgtcacccgctgttacaatacctgctttatctttgacgatagcggaaaatacttcctagtcgatggaggcggcggtaacggcattctgcgccagttagaagatgccaacatcccttggaaagagatccgcgacatcttcatcacacacaaacacctcgaccatctgaccggtatcatctggatgatccgcatgatctgccagaacatgaaacgcggaacctacgagggcgaagccaacctctacggtcacgccgaagtcctccagatggcacacgatatcgcctgtatggtcctgcagccaaaagaagccgcctacatgggtgaccgcctgcaccttatcacagtagaaaacggtgaaaccagagaaatcatcgggcacgacgtgacctttttcgatatcggctccaccaaagccaaacagttcggcttctccatggatctcggcaacggcaaaaaactcacctgctgcggcgatgagccatacaacccatgcgaagaaccatacgccaaaggcagcacatggatgctccacgaagccttctgcctgtatcgcgacgccgaccattttaagccgtatgagaaacaccattctaccgtcaaagacgcctgcaaactggcacagacactcggtgttgaaaacctgattctttatcatacggaagataagacgattgagcatcgaaaggaactgtataccgcagagggcaaaccctatttttccggcaacctgttcgttccggatgatctggaaacatttaccttataaaacaaccttgtgcagcctgtaactatgtttcacgttacaggctgtactttttttgtataattcatccaccttttccacatactacccacagaaatcacagtaccagaaacgcttcagaccaatacacgaacaggaggaaagaacagatatgaaagctacaggaatcgttcgtcgtatcgatgaccttggacgggtagttattcccaaggagatccggcggactttgaaaataagggaatccgaaccgctggaaatctttacggatcgaaacggagaaatcatcttgaaaaaatactccccgatcggagaaatcaccaccagtgcacagcagcttgcggaagctgccgcaaaaacctgcggaaaacttttctgcatctgtgaccaggatcaggtcatcgcagcttccgggccggagagtaaaaagtatcaggggaagcagctcagtaaggatatggaaaaacgactgtttgaccgggattttttcccggaaggctctgcctactatcctgtcacagaagacgatacgcacacggaacagatcattgttcccgtgatcagttccggggattccatcggagccgtctgctttctcagcatgaaacgcaccagttccctgggggaagccgaacagaaagtagccgatatggtagcccgctatctggcactcaccatggaaccttaaatgcaacagactgttactcccaaaaaatggcagtatgtcagcccatcagctgtacataccgccatttttttattgtctgacaccctttatttctgctcatagtattcttccagtgtcagccccgtcagagtaaggtacaatgccagcgacctgctaacatatcggatatgccagggttcccatccatacccggtaatcgcttccttccctttcggataccgcaggataaagccaaacagaggcgcacaccgcgccagccaccgaccttcttttgtcgctccaaatccctcttccagttcataacccatctcctgacaggatacatccagcgcaagtcccgtctgatgttcactggctcccggaggtgctacccacagcacttcctgttcttcccgaggatccttttcatgttttgcccggtacagttcttcctgtctttcgtaactccgatatcccgaaacgccgcacaaatagatattttcctcttttcctctggaaaacagcttttccaccgcgttcgccgccggtgctaggagtaaccgtctggcatctcctgccggaaccgtaaagagaatgtccggttccaccaacagctgcggaatctgattcctgcgtagccgatgagatcggtttaccagaatcgtagtatccataactcccctcctccgtcctgccctgtgtgctgaaagcatttttgatacgcttcccggtcatttatgatgtactggtgcgaagcaggactatccccattctatgcatctgcctcctgaaatattccgccatactatcatgcagtcacaggatttgtcccggtatccatataaacgcaacaaaaaagacccaaagtctttttccttcggatcttttttctttatttcactctcagcttacctgatatacatctgcatatctcataccaaaacttaatgcttcgctgtggcttcccatgaaaatatccacatgtccgtatgctgtacctctgtcttctacggtataaatctgaccgttgatagaaagtttggttccaaaaggaactcctgccatcgcaatggtacgtcccggtgtcggtgtggttccgctggctgttccgccgccggaccatttaccgcaacagatggaacagctgcaatatgctgtcagtttgaatcttcccagatatttacctttggaagtatcaatcgttgtatctgtcgtactgctgtcactctttgaagtcgttgtgcttgttgatgtagtattctgttttttctctgttgctgacgctgcctgctgcgctgctttctgttgtgctgcctttttggctgccgcttcttctgccgcttttttctctgctgcttcttttgctgccgcttcctgggctgctttctcagctgctgcctgctgtgccgctaatctggctgccgcttcttcctcttttgcctgacgaagaaggttattgatcgcatcttcctggctgctgatctttgtcaacagatcattctctgctgtctgctgactctgaatatcttcctgatattcacggatctgctggtaagttgcctccaccagttcttctactgctgcctgcttgtccgcactctcctgctgaagagccataatatcttctttttcctgtgccacctgttcctctttggtctggatggcttcttttgtttctttgtatgtatccagcatgtctctgtcatactttgacatctgggaaatgttctcagcctggtttaagaaatccgaaatacttccggactcgaacagcaggttcatataattgctggctgagttttcatacatatagcggatacggagtttcatcgcttcatactgctgtgcttcgtccgctttcgcatcttcaaggtcactttgcagctgtgtcagttcttcctgcttcgcatcgtaatcattctgcagtttttccagactgctgcgaagatcgttcaactgtgtattcagatctgcaagataagtttctgattcacctttttttgattccagttcctgaatcttttcctgggtctgttgcagggaagactgattcgcctgctgctgtgctttcgcattggatatcttctcctgcgtcgtagcagctccaccctgtaccgcacttcccacaataagacatacggaaagtaccaggcttgtgattctttttcttctcatattaattcctctcactttctcaggcaagagtcattataacatgattttgtagcattgtgaagtagttttttaatatctcgtaataattatgtaatatttgatagaaatttgacaatttttaccgcaaagccacgaaaaattccggaattttcccgtacttatgtcaaccttttaaccgccagccactccagtatttattcttcaaaactccattgaccagttttccccatccaagggcatactgatccacacagaccaggatccagcctttctctctggtcgcctcccccggttccagaagcaatgtttctccgcgcagatacctcccgatccgctcatcctccggtgacagggagacacttcccgcataatcagaagccttcagcgtcatcgccagctgctgggacggctcaaaacggtttttcttcagatctcccatgtacagtccgtttcttaagaaatgaatcccgttcaacttcgccggcagctccggcaccagatagactttttcacctttgatctgtacccgctcccagtccggtttccactggcagtctttgaaaaattcttccataactgttttatttttcttatccatccgtgtcggcgcttccagtttgatccttgtctcaggcgcatcctctgactttttcatcagggccagaaaatgtccttcccctttcatcttatgcggccagatccgcacacagcggcgcagttcctctcttccgtccccccacgcgggattgccctcggaaaatccctcgtatccctcgattggaagcagttccatctccgggcactcattcaggatccaggaaatacttccctcattttccaccggtgcaaaggtacaggtggaatacagcagtttgccacccggacgcagcatccgcaccccatttttcaggatatctttctgcagtttcgcaaaatattccggtcgttcctcatcccaggttttgatcactgcgggatctttgcggaacatcccttctccggaacacggcgcatcgatcagtaccttatcaaagaatccttcgaaccgatccgccaggttctgcggtacttcgttggtcacaaaggcattggatatgccaaatacttccagattctttaacagtgcttttgcccgggaattgctgatatcatttgccaccagcacaccttttccctgaagtgctgcgccgagagcggttgcttttcctcccggtgccgcacacagatccagaacccgttcccccggttttaccggaaatttcgccgccggagtcatcgcacttggttcctgcagataataaagaccggcgctgtaatacggatgtctcgccggctgattttcttctttataaaaatacccggtcttcgtccagggaatcggccccagtgaaaatccggagccttccgccagttcctcttccgtgatcttcatcggattgatccggagtccgtactgtctgggattgtcataactttcgatatacgcttcgtattcatcccccagcatctctttcattctcttttcaaagctttccggcagttccactctcatcacacacctgtctcctctttttctttctcttctctccgttctctcacggatgtttttctacgctccactatagcaacactctgtcattttgtaaacaacaaaagaatgtgcttttttccattcaaaaagcggtggccccccagccaccgcttttatttacgcgagcaacgagccaaagttcatgcttgcatgaagccttggcgactgccgcgataacgagtaaaattcgcaaagcgtattttatctcgtttttgcgtcaccccatatatatgacaacccggttacgcattatctgcaacgacatcttctgccattacttcctcatatttctccaaaatcaggttctggatcttttctcttgtgttggaattgatcggatgtgcaatatcgcgatactctccatcggaagccttacggctcggcatagcgataaacagtcctttctctccctcgatcaccttaatatcatgtacaacaaattcatcatcaattgttatggaaacaactgctttcatctttccttcttttgtcactttgcgcactcttacgtctgtaatctccatagcacatgcccctttcatatgtcgttctctttctgaacagatatagccgctgatttttattttcccgcgaaccaccagacagctgctcttttattacagcgcatagcgctcgttcttttccacgacaactattatttcgtcttctccgcagtagtaagaatttgcccggatggtatcccggctttctacgatgcagttctcgatatgggtattatcacccagatatacgtcattcagaataatcgaattcttgatgacacagttgtttcctacatatactttcttaaacagaacagaattctccacctgtccgttgatgatacagccactcgataccaggctgttctttacctgacatcccggattgtattttgccggtggcagatcgtcgatcttggaatagatatccggatactgatggaagaaataatctcttacttccggtttcaggaaatccatgttggtcttgtaataagcctcaacggtagagatattgttccagtaatcctggatcttgtagccatagattctcttcagattcttatagcggatcaggatatcttttacaaaatcatgtcttccttcctgtgcgcagcgctcgatcatctcgatcagctggcggcggcggatgacatagattcctgtggaaatggtatgataatcggataccatcggtttttcttcaaattcttcgatccggtaatcttcgttcattcgaagcacaccgaatctggtcacatcttcgttcgcatccacatctttgcacacgatggtcacatcggcacgttttgcgatatggtattccagaactttgttatagtccagcttgtacacacagtcaccggatgcgattaccacatacggttcatggcttctcttcaggaaatccaggttctgataaatcgcatctgcggttccctgataccagaagctgttatccggagtgatcgtcggtgtaaatacaaacaatcctccctgttttctaccgaaatcccaccatttggaggaacttaaatgttcattcaatgatcttgcgttgtactgagtcagaaccgcaactttcgcaatatgagagttcgccatattactcagtgcaaagtcgatgcttcgataacttcccgctaccggcatcgctgcgatggcacgtctgttggacagttctctcatcctgttgttattaccgcctgccagaataattcctaatgctctcatattactcaccgtccttctttacaattgcgccgccgcttacaagctctccgtccggataatcctcagcagttgtctcaccgctgatggctgtgttctttccaatcttcacacctgacggaataacagaattttctgcgattgtaacaaggccgaatccatagacagccggtttcagtacgttcggagcttcctcgccgacacctgtaacaacattttctcccacctcaacactctctgcgatgatggacttgtcaatctggcttccggctccgatccgggaatgtttcatgatgatcgaatcccgcaccacggctcctttttcaattgttacgtccgcgccgatgacggaattatggacttcaccataaatctccgcgccttcgccgatgatacttctttcaattacggattccccggatatgtactgcggacggatgatatcacctttggtatagattttccagaactcctcatacaggttaaattccggaatgatatcgatcagttccatgtttgcttcccaataagatcccagtgttcctacatctttccagtatccgttaaattcataggcaaacagtctctttccgttatctctgcaataaggcaggatatgtttaccgaagtcacagtttggctgatccttcagtgccatcagagactctttgagtgttttccacgagaaaatataaattcccatcgatgccagattacttctcgggtgttccggtttttcttcaaactcggtgatccgtcctgctccgtcggtgatcataacaccgaaacggcttgcctcctcgatcggcaccggcatacaggcgatagttacatctgccttatttgccttatggtaatcaagcatcacttcgtaatccatcttgtagatatggtcaccggagagaatcagaacgtattccggattgtaggtctccatgtatgccatattctgaaaaattgcgtttgctgttccggtataccagtcgctgttaccatttttttcataggggggaagcacggtaacaccgcccacattccggtccagatcccacggaataccgatcccgatatgggtgttcagacgcagtggctgatactgggtcagtacgcccacggtatcaatgcccgagttaatacagttgctcaacggaaaatcgataatacgatattttcctccaaatgctaccgccggtttggcaaccttctcggtaagtacacccagtcggcttccctgacctccggccaacagcattgcaatcatttctttcttaatcatgcaatcacctcttgtcatatatagtaaacagattataacacacttcttatatttagtgaacattttttacatatttttctcaaatcttttcgtgtttttatgacatttacacaataattttgccctgtttcgtcattttcttctatatctaatggttttttgccgcattcttaaaaaaatctttccattttagccttttacgtctataataaatgtaatacaaatctttgtaagaaaaggagaactcctatatgtatacgattgattttacaaaacctgttcacatacattttattggtatcggcggtatcagcatgagcggtcttgccgagattcttttgaaagagggattcaccgtatccggttcggattccaaggaaagcacactgacagatcacctgactgaaaaaggtgcgcagatcttctatggacagcgcgcatccaacatcattgacggcattgatctggtggtttacaccgctgcgatccatccggacaacccggaatatgcctgtgcaaaagaaaaaaatatcccgatgatgacccgtgccgatctgctcggacagatcatgaaaaattatgagatcccgatcgccgtatccggaacccacggaaaaaccacaactacttccatggcttcccatattctgttagagggcggttttgatccgaccatctctgtcggcggtatcctgccggcgatcggtggtaacctgcgcctgggacattccggcacattcatcaccgaagcctgcgaatacaccaacagctttttaagcttcttcccgaagatcagcatcatcctgaacatggacgccgatcatctggatttctttaaagacattgacgatatccgtcattctttccgtctgttcgcagaaaaactcccggctgacggtactctgatcatcaacagcgacacccctcattatgaggacatcatcaaagatctgccgtgcgaagttatcacttacggactcgaacacgaagcagattatacagcgacggatattacatacgatacgttcggacatccgacctttacctgtctgcatcacggagaaaccgtaggaactttctccctgaaagtaccgggtattcacaatgtgtccaacgcactttccgtaatcgctctgggcgaaaaactgggcatggacgatgcaacgatccagaaaggtctggtcaacttcaccggaaccgaccgccgtttccagttcaaaggaaaaatcggcgatatcaccgtgatcgatgactacgcccatcacccaacagagatcaaagcaaccctgacctctgcgaaaaactatccgcacaaaaaaacctggtgtatcttccagccacacacctacacccgtaccaaagccctgctccaggacttcgccgaagccctgaccctggcagaccacgtggtactggcaaaaatctacgccgcaagagaaaccgacaccctcggcatctcctccgccgacctccaaaaacagatccaggtcctgggaaccccctgcgaatacttcccgaccttcgacgaaatcgagaattttcttctggaaaactgccagccaggcgacctcctgatcaccatgggcgccggcgacgtctaccaaatcggcgaaaaactcctgggaaagtaaaatcccagaggacatctttttaaaacgcattaaaaaaagggcaactgaaagtgtatctcaacactttcggttgccctttttatacgtacaaaccacttccagtcatttttccgttctgcctcctgcaatttctcctcttaaaattctcccactccctaccactcaaccacccctccccctttcgccaccattttttaaaacttatccacactatccacacatttatccccaccccctctgtggattcccctgtgcataactccgtttacataatcccccacccctcccaccaaattttctctatttttcaaccaattccctcaatatcaggttaccaataatctttatctcaagaatttatccccaacttatccacattatccacacccttatccaccccacttacccaccaacaaatcccccttaaccccttattttcaactaattttccacaaaaaaccatatttgctttctcaaagaatcatgctataataatcccgtaactaacacacataccattacttttctattacaggtgaactatgcagttatctttacataatggaagctccagcggagtcaccattatttccaatattttcatagactattatatcccccgcgccaacggggaattcgtaaaaatatacctttatctgctccgcagtctgcaaagcggcgataccgcactggacctgactgctgtagcggatgtttttgactgcacagaatccgatgtgctccgtaccctccgctactgggaaaatcagaaactggtggtgctcgcaggtacggacagtcagacttcgattgattttctgcagcctatgctgccggatgcggtgcagaacacactggcagaacaggctgttacccaaattgcgcctgtaacatcgacaaataccgtcagaaccggcacaacaccgacagctaaagtatctgtcagtcagacagcaaatatcgcacagacgggcaatcagaccccttcggcaccggaaaatcaaaaaaaatccctgagcgccgatcgtctgaaagaactctgtgagcaggaagatgtacgccagatcctgtttctggcagaaagttatctcggaaccacgctttccagaaccgtgaccgatgaacttctgtacatctacgaagaactacatttttccgtggatctgtttgactatctgatcgagtattgcgtctccaagggaagtaaagacattcattatataaagaaagtcgccttcagctggcatgaggcaggcatcaacaccgtgacccgcgccaaacaggagactacgacttatcacagaaactatttttcgattttaaaagcatttgggatcagcaaccggaatccggttcagtccgagatccacatgatcgatcactggatgaaagactatggatttaccatggacattctcacagaagcctgttcccgcacggtagcatccaccggaaaagcgaatttccggtatgcggacaagatcctttccggctggaaggacaaaggtgtccggcacctgaccgatattcaggctctcgataccctgcacagacagctgcagagcgaccgccaggaacagaaacagcggcaggaacagaaaggaacccgtccggcaggctccgggaacaaattcaacaatttccagcagcgaaattacgattatgaccaacttgaaaatcag

SEQ ID NO: 2725 - DNA, 5003 bp, Unknown
  gut microbiota DNA sequence
cagttccgtaacaaacacgaacaggatgcccatatcgccgaagcccaggcaaagattccccggctggcagagatagaccgggaaatcgcctcgatcagtgtaaaaaaagcccggattttactgggtgacaaagataatgaggactttgacctgaacacacagattcaggcgctctccagagaacgggcagatctgttaaagactcacggttacccggaggattatctgaagatgcattatacctgtccgatctgtcaggacaccgggtatgtggacaaccagaagtgcatctgcttcaaacgggcgatcagtgaacatctgtatacccagtccaatatccgggagttattaaaaacagccagttttgacgcattttcactggactattatccggaagatatgatcaacaaagccagcggtcagactgcccgacagttcgcagagaccgcattggagcgcgcaaaggattttgttcagaactttgatcattcctttgaaaatctttttatttacggagataccggcgtaggaaaaacatttctcacgtactgcatcgcaaaagaacttctggactcgatgcacagcgtgatctactactccgcttttgatctgttcgatgcatttgccagaaatacattttcaaactctgagactaccgagggcgaaaatgattacattctcaactgcgatctgctgatcatcgatgacctcggcacggagcttaccaacagtttcgtagcttctcagtttttcctttgcatcaacgagcggatcctcagaaagaaatccacggtgatttccaccaacctgacgttgggcaatttcatggacacttactccgagcgggtattttccagagtttccagtaactacacgatgatcaaactcatcggtaaagatataagaatccaaaaaaaaatattaggagggaactaaaatgtcacacaacaaaaatcacgattcacaacagcttcctgtaggacgactgggaatcatttctccttacagctgcgccgaactcggtgcaaaggtagacaattacctggttacctggagaaagaaacgccacaacgaaggcgttttatatgaaggctatgacagagatacctatctgattgcttccgatcttccgcgtttcggctccggtgaggcaaaaggtgtcctgaaagaatctgtacgtggtgatgatatctatattctggtggatgtctgcaactacagtctgacatattctctggcaggacagaccaatcacatgtccccggatgaccattatcagaacttaaaacgaatcattgcagcgatcgccggaaaagcaagacgaatcaacgttatcatgccgttcctttatgaaagccgccagcacagacgtaccggaagagaatctctggactgcgcactggcactgcaggaactgatcgagatgggtgtggaaaatatcatcaccttcgatgcgcatgatccgcgtattcagaacgcgatccctctgcatggatttgagacggtacagtcctcctatcagtttatcaagaacctgttaaagaaagaaaaagacctgaaactggacaaagatcacctgatggtcatcagcccggatgaaggcggcatgagccgtgccatttatctggcaaataaccttggtgtagatatgggtatgttctacaaacgccgtgactactccaccatcgtagacggaagaaacccgatcgtcgctcacgaattcctgggggctgacgttcgcggcaaggatatgatcatcgtggacgatatgatctcctccggtgacagtatgctcgaggtagcccagcttctgaaagaccgcggagccaacaaaatcttcatgtgctccaccttcggtctgttcaccaacggactgtccaaattcgacgaagcctacgaaaaaggaactttcgaccgcatcctgaccaccaacctgatctaccagaccccggaactgctgaccagaccatactatatcaactgtgatatgagcaaatacatcgccctgatcatcgacaccctgaatcacgacgactccatcagcaaactcctgaacccggtagaacgcatccagaaagttctgaccaaatatagaaataacgaaactatctgataagtttttaaaacaaaaggaagatattaacgaaagttcttatttcatagactctttcgttaatatcttccttttttcataaatctctatttttccatatttctcagtagaaggatttcacgcgcatacccctccagttcattcggtgtctccagataaatcgggattcctttcagtttcgggtgattcaccatcccttcaaacgtctccagtcccagcgatccctcaccaatcttctcatgcctgtccttatggctcgcgaacggattcttgctgtcattcatgtgaatcgccttcagcctctcaagcccgatcacctgatcgaactcctccagtacctgatccagctctcccgccagatcataccccgcatcatacacatgacacgtatcgaggcagacacccatgtggctcttcaactccacccgatccagaatctgtgccagttcctcaaaactgcgtccaacctctgtcccttttcctgccatcgtctccagaagcaccgtcgtgtgctgctcttctttcagaatccggttcagcatctcactgatcatccggatcccttcctgcgctccctgccctacatggcttcccggatgaaaattataacagttccccggaacatactccatccgcttcagatcatcttccatcgtcatccaggcaaattccctggtcttcgcatccttcgaacagggatttaacgtatacggcgcatgcgccagaatctggcagatatcatgctctttcgcaaactccagaaacttccgcacatcctccggatcaatctccttcgccctgcttcctctcggatttctcgtaaaaaactgaaacgtattcgctccgatcttcaccgcttcttttcccatatgcaaaaagcccttcgatgaggacaaatgacatcctattctcagcattgccgtctcctttatctgtattttatgttttctctcttcccgcgtgccgcacggtctcctcttccgtcagtaccgtaaatgccagcttcagcccggaaagttccatatcacagtcttcttcctccaatgtcggagaagccatctcccggatttcctcctgaagattttctatctggatcttcttttcctcgagttccaccgccagatgtgctccacgctcctgcagccgcaggatctgatgactggtctcccgcagttctttctttctctctttcaaccgctcttcccagtctttctgaagctcttccccggcagattctctctctgacatttccgcttctttgggggctgctgcctgcattaccgtacttcttcttgtccgaagccagtctgccagatattttcttccagccagcgctcccaccaggatcgcaagtccgacaatcgtgcagaccacccggttccaggaaaatggatcgatcagtgccaggatcgccagacaaacgcctacccaggtaataatttcggaaatttttgaaattttcgaaaaatctgtaagattactcttcctttcactggacgcagctacattctgtacccgtttttctaccacagtcggctcattttcctgctcctgtccactctgtggtcgacggctctcctccgcctgtcgttttccttcttcccgccgttcctgttccagatgtttctcctgtgcattgcggttcagctccagacgtcgaatctccgaacggttgaccagcatctgctgctccagaccggcacgttcccgcaccacgcgttgcacggtctgttccagttccgtgctgcgatcctggcgctgtttttccagggtcttctttcgttcttcccagtcattcattctctctgcaatgacctgatcgggatccatagtttcggtgagcaatgcctgtaatccataatccagtgctttctgctccacttttccctgtttcttttcaaaccagtggatatatgcacccaccggcgttcccagtttttcccgtttcagacgggtgagatcgtaacagggacgtgtttcgtctgtgattcttacaacatttccataagccttcagaggctccagctgaaattccagttccgggttccggtatccctggatccgaagccagtagatctctccgcttcccttctgctgaatcgcatcctgtactttctgttccagaccggtctgtgtcgtgccggaatggatccgtaaggacagcggaatataagaacgacacgcactgggaaccagtgtaatctgcgtgtgatatgcgccctgtgcatcctccgtaatctctccgtaaacgacaccgtgtgttccggcatcttccagacggatcggttccggggaaccggcatacgccatctgattctccaccagaacccccggcagatggcgatacccgagtgccacataagtaaaacctgctccgtcctcttttttcatcgggatatgcgtttcatcgccaccgtatgccagcaggatatggatccccggctgatcatccggccgtatggtactgtaaaccggttccgtaatctgcggctgctcataactgcatccatacactttcgtgtgcagtttctccagctcgatcacttccggcttcccgctcagaaatccatgaacgttctttgtccactttgccttacgatatgcagaatcttcccgcaaataatcgtgacttcctgccatccataccacttcggtatccggtatggatgcaaacagctgactgactctctctatctgagaaggcaacggctgtctgtgaaacagatctcctgcaatcagcaacaactctattttctcttctctgatctggtcgatcacccgtacaaaggtttcccagatttcattttccctgaatgcactccaggggcagcccgaatccggaaccgcccccaaatgtacatcagccatatgaataaatcgcatagcctct

SEQ ID NO: 2726 - DNA, 1502 bp, Unknown
  gut microbiota DNA sequence
cttcctccacgtatccggaaagaacaccagcaacaacggaaaaatctccaaccgtcccgccagcatatcaaaaatcaacacatacttaccaacatccgaaaacacattaaagttcgccgtcggtccaaccagctccagtccgggaccaatattattaaaagttgccgcaaccgccgtaaaattcgtgatcagatccagattatcaaatgccagaacaaacatagaagtcgcaaaaatcatgatatacacaaccataaacacattgacatttcttaccacttcatgctccacaactcttccatccatctggattttccggatctgacggggatgcagatactgcttgatctctttcttcatcgcttttaacaggataataaaacgcgaaactttaatacctccaccggtactgcctgcacacgcaccgacaaacatcagaagcacgagaatcgtccgggaaacctccggccagagattaaaatcgaccgtcgcaaatccggtggtagtaataatcgatgcaacctggaaagcagcctgttggattgcctttcccatgcttccatagactccccggatattccatccaatcagaagaaccgctcccagaatgatggccagataccagcgtacctcctcatttttcagtgcctgtttccatttttttgacagaagcagaaaatacacgttgaaattaataccaaacagaatcatgaatacagtaacaacaatctgaatcgttgtgctatagcctcccatactgtcattcttgattccgaaccctccggtaccggctgtaccaaaagcagttgtcagtgcatcaaataccggcattccacataacagcagaatcacagtctccagcaccgtcatcagaagatagatcgtatacagaatctttgccgtagaacgtacggtaggagccagacggctgactgagggacccggactctccgctttcatcagattcatctgtgaaccaccactcatcttaataatagaaagcaataataccaggacacccataccaccgatccaatgggtaaagcttctccacatcaggatacaacgtggtgcatcttccaccgatgccataatgcttgctcctgttgttgtaaaaccggagaccgtctcgaaaagagcatccacaaaatgcggaatcgtcccactgatcataaaaggtaacgaaccaatcagactgagcacaatccaggaaagagctaccgatacacatccctctttcataaaaaagtgcggtttttccggtcgacgcactacaaggagcgttcctgccagtgcactgatcagtcctgtgatcaaaaaggaggtccatgttttttctccatagatcagcccggtaactgcaggaagtgccatgcagatggcttccagattcagtacccagccgatcacataggtaataattcgataattcatacgtatctctcctatttttccagaatatcttcaatgtcccgcaggcatttctgactggttaccacaac

SEQ ID NO: 2727 - DNA, 519 bp, Unknown
  gut microbiota DNA sequence
gctcctgaatggatgtctgaaaaagctgtatctatcggtaactacgtagtaggaaccggtatcgataccttcctgggtgttgatccttacgtatccggttccagtgaaatgtgtgaactgctgacagaaggaaccagaaaatggactggcgctgcttatacagtagaaacagatatcgaaaaactgaccgatctgatgatcgaaagaatcgaagagaagagaacagctcttggaatctaatagaagagatttctcattgatctgatgtcggaagcggatcgcttctgacatcagatagaaatagaatgataaggtggatgacaaattatgaagattgcagttaccggtaaaggcggcgtgggaaagacaacatttgctgctactcttgcacgtctgtatgcagaagaggggcggcatgtactggcagccgatgtggatccggatgcgaatctgggactggctcttggattttcagaggaagagctggatacgatcgttccgatcagtaagatgcgtaag

SEQ ID NO: 2728 - DNA, 3456 bp, Unknown
  gut microbiota DNA sequence
acacctttgtggaatacaccgtcaaacacctgacccagacggccatcctggtgggtatgtactgctgtgatcttgccatcatgataacctgcaacaaacagatattttccgctatcatccacgcacaggtaacaacctctcattccatcaatacccactttgttgatcagctccagatctccatccggtttgatctcaaacactgccacgccttcatctgcgatcgaatacagatacttgccgtttttcgattttaccacataagacgaattgtttaccggcactacttttcgttcactcagggtaccttcttccacattcacgtcatacaaatgaattccaatactgcttccatgtgtataagttccaacatatgcaatgtatttttctttttccatgatgttttttcctttctttgcaaaatttgcgtattttttaatatctattgattattttatcatatttctgactatttcacaattctttcttaaaaaacttgcgaattgtctttcttctatgctacactcactatgataattttgaatacgaacataaattttcaggagaatttatcatatgaaacgaatcttaacttatctaataacggaatccgacagcgaccagcgaatctatgattttctgtgccaccacggatattcccgacacatccgcacctggttaaaacagcatcccggttccgtccgtctgaacggcgaggaagcactcttttattttccactaaaaaacggcgatctgctggaaatctcactggaagaggaacacccctcggaaaatatcgttccggtagatctaccgattcatattatctacgaagacgaagatctgatggtcattgataaaccggcggatatgccagtacacccttccatcggcaattatgaaaacactctggcaaatgcagctgcctggtactttcaccggcaggatatcccttttgtattccgctgcatcaaccggctggaccgcgacaccaccgggcttctgatcctcgccaaacatatgctaagcggtgccattctttccgaccagatgaaaaaaagagcgatccaccgcacctatcttgctatcacagagggaaagacagatcccgctggcacgatcgacagtccgatcggacgtacagatcagtctctgattctgcggcaggtggatcacgaaaatggcgattctgcctgcacccactatctgcaaaaatgctggcatccgaagactttctatccggaaactttacctgttccacaggatggactttctctggtacagttgcagcttgagaccggacgcacccatcagatccgtgtgcatatgacttccatcggccacccgctgatcggagatacgctgtataatccggaaacagctctaatgaaccgccaggcactgcactcttaccgactggcatttacgcatcctgtcactggagtttcgctggagtttacgtctccactgccagaagatatggtagaattttttccggactgtaatacttgataccgttgttgcaaaaactgattttgattatcgcggcagtcgccagggtttcgtgcaacaagcatggactttggctcgttgctcgtgtaaaaaagatctgagaaacgttttggttctttctgaactttaggtatatcaagcaaaaagcaggtatgaaaaatatctgctttttctataaatatttatttcttatctttgggtatttatgatataatatatgtacctaaaagggaagaagatgattcatatgaagtatattccaacacaagattattcttttctgcttgatgaaaaccattatgtttatgatcatgttgaagaggaagatagcttacatatttacattaaatctaaagaacatggctgtaaatgtcccctgtgtgaaaacatgagcacaaaacttcatgccacttacagaaaaaaatttcaggataccccaattcattgcaagcagacttttttacatgcaaatgtttataaatatgattgtgaaaaccgggattgtgaatgcaaagtctttatggaagatcttccgtttgccaaagcttctttctctctttcggatctattataaaacaagcgggtatcaatttgatacccgctaatgtttcatttggttatacccaaaattcagaaagaaccaacgttttccacatttctcagatcttttttatttttcatgtaatacctgtttttctacatcgcgcgaatccgcggcacttctgccacatgcagatacttgctgatgcattttaccagcagatcatgctcggatacgtgatccagaccggtgattgcgactgttccgatcacacccacttcttccacacggatcgggaatccgccgccacaggctgcatactctttctcatccagaagtctgtctgccagggtttctccccgctctctcagatccatgtacatccgcagactgctcttttcggtgaggcgcacggtattttcttttctggtcagccactgttcatggtacagatttgtgccgtccataccatactggaatacggtatagccgttgtttaagcggatccgtatcagcactgccgcacctctttttgctgcctctgccacgatcagattccccagttcccatgcatctgcattcgtaaaactggaaaactgaaggatttcttcctgcatctgtaatacactgcttaattcttcaatcgtcataccactacctccggcttccttttattttgccagtgccagcagaatctggttacttctggcgataaactgtgtcatttcttccggactcagctgtttgtgagccatcatagccagatcgtacagctgctggcagatcagcggaacattggtctcgtcttctttgtgttcagccacatattttaccagcggatggtttgcattcagaaccagtgtggctccgtttgctccaccaaacatattggcatccatgccgtacattttcatcatatcctgcatccggcggctttcctcggacagggtcatcatagaagaaatattttcatttttcagtttttctactttcacatccaactgctcattgttcagcgctttcttgaaggttgcagtcagctcttcagtcatttctttcagatcttcaccgtcttctttaaagtcttcggtcagatccgcatcgatacgctggaattttacatcgttatgtttctgttccacatgggtaataaaagcagtatcaatattatgtttcaggattactgcatccataccctgttccttgaacatgttgatgtactggctctgctgtacttcgtcagatacataataaacggttgtcttctccggctctttctcttccgcctgctcgccgtcttttttctcttcttccggtttctcggcttctgcttccggttttttattttcttcgatgcagtctttcagtgtcagatatttgccgtccagattcttgaacaggat

SEQ ID NO: 2729 - DNA, 1190 bp, Unknown
  gut microbiota DNA sequence
ttcatataacttacattaaaacaccaaataagttgaaattatttatgaaggatggtatattgtacttgagaggaggaaagagagaggtgagaaacataagaatcggaaagaatacctcaaataataaaaaaacaggattatatatcagagtttctacaaatgttcagtttgaagaaggatattcagtaggtgctcagacagagaaacttgaaaagtattgtaattatcaggaaattgataattatgatctgtacattgacggtggttattcgggaagtaatctgaaccgaccggagatgaaacgtcttattaaagaaattcaagaaggtaaagttgaatctgttgtagttgttaaacttgaccgtttgtccagaagtcagaaagatacgatttatcttctggaagatgtgtttgaagcaaatggtgttggatttatttctttaaatgagaactttgatacaacaacaccatatggaaaagcaatggtaggtatcttatctgtatttgctcagtatgaacgtgaaaacattcgtgaacgtacacagatgggaattacagagagaatcaaaaccggaaaatggagagggacgaaaccaccatttggttatgactataataacggtgatgacgttcttgtgccaaataaagatgcagaaacagtcagaaagatttttgaattatataaggaaggctattccacgtatgcactggcaaagatgtttgatttaaaaggagacaagcaagtgtccgatatgttatccagagtgacatacattggaaagctcaaatataataaggaaatcgttgatggtcttcacgagccgatagttgataaaaaattattcgatgaagttcaggaattgcgaaaaacaagaacaagagcaacttctcataaatcacagtatttactaacaggcttaatatattgtggattatgtggggcaaagatgcgttatcaaaaatggagtggcggaagagtgatgatttattgttattcactagatcatagcaagccgcacctggttaagaatcctaattgtcagaatggaaagttagatgcagctgaagttgaagaagttgttgttaatgatatgctgaaattatcaaaagagtatgaaataattgagggaaaatcagaacagcaaaatcaaaagggatttgaagctatgaaccagagaaaaacagttctt

SEQ ID NO: 2730 - DNA, 653 bp, Unknown
  gut microbiota DNA sequence
tgcttggctgtgaagcagagttttgtaccgctctggtacatcagatccccattcccattgtctttgtggattcctatggagaaggatttgacaatatcggattagaagactatgagggtgggtatgagatgacctcttatctgatcggtcagggacatcgaaagattgccttttttggggatcagcaacatccaatgggaagtaatctgtatagatttcacggactgcagaaagcgatggaagaacataagctgcagttttacaaagatgattatttttatcttccacagcatgataattaccggcacgaagtgctgcggcagtttgcacaaaacgtgaagaaaacagggtatacggcggcgttttttatctcggattttctggcaaatgaagctatcagcatcttttattcgaaagggatctccgttccggaagacctgtcggtcaccggtttcgatgataatatttatgcaagactttccaggccgatgcttacgaccgtgcggcagaagccggaagaaaagggaaaagaagcagttgggcttctgatgcggcgcatctatggagaagaggttccggtgggcaggatgagactgcccacggaattaattgtacgggaaagtgttcgcaatttggctgacagatagcagttg

SEQ ID NO: 2731 - DNA, 461 bp, Unknown
  gut microbiota DNA sequence
gtatcggttgccgcatcggctgcgcttcccatatacaggtaatcatagccaacaccgctcagtgtgatcagtgctgtcatcttgccgttttttacggtcagttttgttcccactactttgaacatggctgcgccggttacagcacttgtgctgtagataccatctgccggtgttccctcagccggaacatctccgatcttctccagatttttggagctgatcgtaacagttctgtcataccacttctgctgacgttcggaatgagacgccatcgtgagcgcggtatccagtgcggataccggaatctcatacgttcttccggttttagtctcgccgtccagtgtataggtagttgttccgttgtatttgatccagttgccggtatcggttgccgcatcggctgcgcttcccatatacaggtaatcatagccaacaccgctcagtgtgatcagtgctgtcat

SEQ ID NO: 2732 - DNA, 3124 bp, Unknown
  gut microbiota DNA sequence
ctctacctgactttttcctgttcccgcatctgtgcaggctgtcgtcatggtatccggagccggaatggtcatctgatacgttccctcggaccattttccggttttcgtgctgtagagtacataagaaaatgtctttccggtaatatctgtggtgaatccatcccaaatatatccatacgcaccattggtcagtttccacagagacagataatttccgccgtctccgctcttgattgctttgttgatttcgtctctggttccaaaatacattctgtcataggtatcgctgtccgtagccatcaccacacgaccaagtgctccactggtaaccatgtagtaactcttgtctgcgttgatgataaaatcttttgcatcggtcgtgagattggctttccggtaaatgatatcttccggtacatccccgatctttgtcataaactgcgggatctccagataatcctgttttgtcagccattttgctgttccttttgcgttatgtaatacaaacggaactttggttcccagctgggattttttcagggtgaaggtatatacccggtattccggacggctcggatccgattctccgagaagttttccttctactgcattggcatctttgacatcatcactgtctccgacttcaccgatatacagtttatcgtaagaagtagaaccagagtaaatggtaactgtgatctcgtctccctttaccgtgatcgtactgtcatcttcaatgttaaatacaccattctgcgtatgggcattgccataagcgtcatatattccgttcggatagcttgccgcatcaaaggttttctctacgttcggaatcttgataaacagatttcttccgctggtcagccagcttccgttggtacgtcccggcgtaatcggaacgtagattccctgctgatctgcagatacctggaaggtaaatgtggtctggtcatctttctgtgttccctgtaccaccggttctttggtgctgtcatctttctttccaagataaattctgtcatagatcgttccgtctacggtaaatgtaacggttacctgatcgccggagagtttcgcagaagaacttactaccttaaatccgtttaatgttgccgcagtaccgccctgttctatggttacacctgcctccggcagttcaacatcttcgcttccctttacttccggcacaaccagatacaactgctgattgctgtaccagttaccgtccggttttccgagaacaaccggaatggcttttcctgtcaggctcttatccacgctgaagctgaatctccatcccccgttgtcctgtgttccgctgatcaccggtgtcttgttttcatcactgtttttaccaagatacagcttgtcaaacgatgtgtttgtggtctccacggtcagatcgatcttatctccattcacctttgcctcaaaggttgagatctggaacatcttgaattctgttccgtccgctttgatcacctgtgctttggaggtatctgacggtgtcacatccggatccggtgtttcggtcggttccgtggtcggctccgggttttccccgttatctttgaactccggaatcgtcagatacaggtctgctctgctgtagaatgttccgtttgctttgatcggtacaaactgtaattttgttcctgctttgctcagcggaatgctgaatttgtatacctgattgttatcctcgttgatcgttccctcaatgaccggtgttttctcttcatcttctttacttcccaggtaaataccggtgtatgagaactttccggatgcattcgctttcaggtacagttcaatattaatgttttctccattcactgttgcggtggatttttccacattgaacatcgtaaatgcagatccgtctgctttttctgctgtgatactgttttccactttgcttccgtccggtacggatggtgccgtggtcggttccggatctgtatcagtgcttcccagtgtcggcagtttcagtgcaattttactggaactgaacttctgtgttcttccgtttctcggtacaaagatgacttcctgaccatttttctctgccggtacgctgaacgcgaatttctccagattcagctcggtatccacttcgcccattaccagcggttccttggtctcgtcatcccatcttccgatatacagtgcatcgtatgtaaaccttccactgctcgccggacttacatagatttccacatcgatctgatccccgttcagagttgctgaagattttgcaattttgaacatggaataatccgttcctgctttgtctccgttagcttcatccgtcgcatatactgctttgattacattctctgctgtactgctgttgtccgctgtggtaactacagatttctcttctttctgatcctctgcctgcgtctgctcttttgtctctgtctttgcagatgctgtctgagatttctccggtacctggcagaagacatcttcttttgtgtaccactcaccggatgctttcatgcccggtacgatctgtaatttgctgccaagcttctcctcgctgacgacaaactggaaggtgtactgtccgttcggactcttctttccttctacgaccgtttttttctcggtatcttctttctttcctacatataactgatcatacacatcgctgtctgtataaaccgtaaccaggtattcgtctttggtttcaatcagctctgtctttgtcactttcagatccggtaactcttttacagtttctgcatccgctgcactgtcctttgtttccgttgctgcttctgctttttcctgtttactttccgtttccttttcttcctgtgttgcttcctcttttacaggttctttcgttgtctccgaagtctctgtcacctgctgtgtaacttccacagtcgcttccggctctgttgtcaccggaacttccgcttcgctcacctgcccggccacttccgtatccggagcagcagcaaatgtgcccgacggcatacccagtgccatcattacagacagagataccgaaagtactctctttcctgttcctttcatctcacatttcctttctttataaatgtatcatctgtggcggtcaaacgagaagtgaccgtaaacccgtcagcat

SEQ ID NO: 2733 - DNA, 605 bp, Unknown
  gut microbiota DNA sequence
agctatgagttttatcagtcatatcaaagaagagttccaggtaatccaggaacgtgacccggcgatcaagacaccgctggaagtacttttatatccgagtttccgggtgatgatcaagtacagacgggcacacaaattatatttgaaaggtcattattttctggcacggtggatttcccagcgggcagccagaaagaccgggatcgagatccatccgggtgctacgatcggaaagggactgttcatcgatcacggaagcggtgtgatcattggagagactacgatcatcggcgataacgtgaccttgtatcagggcgttaccctgggcggaaacggaaaagaaaccggcaaacgtcacccgacactggaggataacgttatggtgagtgcgggagccaaaatcatcggttcgtttacaatcggtgccaactccaagatcggagcaggatctgttgtgatcgaggaagtaccgccaaactgtacggtcgtcggtattccgggacgtgtggtccgccagaaaaatatgaaagtaccgagaaccaatatggatcactgccatctgccggatccggtactggatgatctgaaaaccctacagaaagaat

SEQ ID NO: 2734 - DNA, 939 bp, Unknown
  gut microbiota DNA sequence
catataattattatgataccagggccaaaagttcagaaatctgacgcaagcttacttgctggaagttttcatactttctgcaatttctttattttgtacactctctcgcaataaaatagattctctcgctgtcttcccgtaccggttctctggtaaatgcatcgtagattgcttccactttcagtcctgcttcctccagtaattctttcactctctccggctcatatgccttctggtaatggaattcttcgtgcttccggtaaagatcgtcctcttctttaataaataatgtcaatgcatattcattgacctgtgattcctcatcaaagcagttttcccagataaagcttccctcttcccggttttctgcaatcgtcgtgttgccgatgacctcccggtatttgtacggagtattcatatcaaagacaaagattccgcccggatccagataattgttggccagacagaagacctccaaaagatcttcttcctccagaatataattcatacagtcacagatacttacaacagccctgaccgttccatacagttcaaattcccgcatatcctgcatcagatataaaatatccagaccggattccacccgtttttcctgggcgacctccagcatatccggggaattgtcgatgccgatcatatcgtacccctcagctgccagaagttctgtcatacttccggtaccgcagccaagctccgcgatcagtccgtcttctattccatattcttttaaaataccggtcagatacgtacaccatgccggataatcaatgttatccatgaacagatcgtatacaccggcaaaactttcataagattcttccatactgtctcctttctgacctgtcgttctctttcttccggtttcctgttttacaaaacgtttttcagaagtaataccttccgcaaatccaatcccag

SEQ ID NO: 2735 - DNA, 1007 bp, Unknown
  gut microbiota DNA sequence
tccgattcctcttgtgtaaccttgtaactgttcagtatcttcacaggtacaggaaaaattgcattaaaaatcaccttcggtgatgtcatttttgcttgtatgtctcaggattttggcatattcatgccaagacacctcgtggggtagtggctgctgaatagttacacaaccttttcttcctgtatattcttttccggtccctgtgcctttttctttccaaaccagaaaaacagtaccacgccggcaatcgcagtgaaaatagcgataaactgggatgtggacagacttcccacatttccccttttcagatccccacggaagaattccaggacaaatcttcccacactgtaacaaaccagatacagtcctgccacctgtccgtcgccctttttctttcctgcaaaccacatcaggaagatgcagttcagaaaatccagaccgctggagatcagctgcgtcggaatcaacggcacgttgttcggcgcataagcagaatcgtggaaaagaatatgaaatgcactgttcgtctcttttccatagcaacatcctgccagaaaacacccgattcttccaaatccctgtgccagtgccaccgacggcataaccagatcgaaatattttataaattttagttttgccaccttacagtagagccatgcggcaaggattcctccgatgattcctccataaaccacaaaaccgttccgtgcatctttcaaaagggaaggatctttaagaatcgccggaagctgcgtgatcagatatagaagctttgctcctccaaatccaccgatcaccgcccagaccgtcacatagaagactttgtccggatccagcgcatattttttcgaccggtacgtggcactgaagtatgccgccagcacaccaatggcaatcatcagtccatatccgtagattgtgatcggaccaatggaaaacaattcatttttcatggatatctccttttatgttttatcttttcgcgtcccccttattatatcagcatg

SEQ ID NO: 2736 - DNA, 610 bp, Unknown
  gut microbiota DNA sequence
ggataccagaagatcctctccgaatattttttcaggactctccgtcctccctgatccccggagagtgccagaagttccggaagatattcccgtgaaaaccagaccggattgccgggtgtctctcccagacagacacttcccagatccgcatggttttgctccattttgcttacaaattcttcaatggttgcctcagaaagccacggctgatctgcggtaaaaaatacaaacgcgtctgcgtcacctgcagccttcagcccgtttttgatcgtccaggacgcaccgtccctgctctcgggagaatatacggttcgatgtgccagctgctttccctgttcgagaagttcttcatactggctgaccagcacgatctcccaatccctgtgcctcttacataccgcagacaatcgttcaagcacatgcagatacatcggttttccatcaatcaggtaaaaaagtttattactgccaaaacggcggctgtttccagccgccatataaatcattcgaattctcattttttcaagagtcccatcgcaattttttcgcttgtgatcggcagttcccggaaccacagaccggttgcattatagattgcatgcgccagtgc

SEQ ID NO: 2737 - DNA, 2286 bp, Unknown
  gut microbiota DNA sequence
attcgcgcgatatgtctcgggttttctgtgaccttcgctcacaaaaaacacctcgcgggatattaccagtgaacagtaactattattttactgcgccgtttaccacgccgttgataatctgtttctgacagatcagatagaagatcaggatcggcagcaacgccagcagataagaggcaaatgccaggttgtagttggttccgaactgggtctggaaatttaactgtgccagcggcagagtgttctttccggttccggacatgataaccagcggagtcatgacatcattccaggtactcatcgcagtcagtaccgcaactgtcgcatgcatcggtttcatgatcgggaaaataatgttccagtaagtgctccaggtggtagctccgtccacacgggctgcctcttcaagcgccagcgggatattcttcagataaccggaatataacagtatattcatcggcataaagaataccacatacagtacgatcacaccaacacggttggcgattccaagctgtgccgtctgttttaccagcggcatcatcaggatcgcaaacggaacaaacataccgcttacaatatacagatatgcaaaattataaaactttttatttgccatgcttcttccgatcgcatatcctgccagagaatggatcagaatagcaaggatcacggtcacgatcgtaagcagtaaactgtttcccagagaatgccagaaatcggttactttcatcgcttccgcaaagtttgcaaaactccaggttttcggaaatgcaagtgctcccgcgatatcgtttgtcatctcagacggctgtttgaacgcaatgatcactgccatatacagagggaaaaacacagtgaggcagccgatgatcagtaaaatagtaatcggccagttaacttttgctgtctgattatttgttttcttactcattataactgttcctccttcttacccattactgtcatctggaatgcagagattgccacgataacgacaaagaacagaaccgcgttcgcactctggaaaccaaactgtccgccactcataccgttctggtagatcaggtaagagatggactctgtactctgggacggaccacccttggtcaatgccatgatctggtcaaataccatcaggaagttcttcatacacagcaccatattaatggtaaagaacggaatgatcagcgggaaggtcagatctttgaatcttctccaaccggttgccccgtcgatcgcgccggcttcatagacatcttccggtacggtctgcagaccggaaatatagataatcgtattcatcgcgatcgcctgccatgctcctacaatgacgataccgaaccatgcagtgctctcttttgccagaatactggagcttaaccattcgattcctgctgcctgtccggctgccggaagaatataagtaaagaagaaactgaaaatataaccgataaccagtcccccaagaatattcgggatgaaatagattcctctcagcacggttttgcctttgatcttcgcattcagtcccagtgccagaagaagactgatgatatttacgatcacggtacaaacaattgcatatttaaacgtaaacagatacgatcttcccacacgggcatccgtaaacagatctttgtagtttcgaagtccgacaaaatcatagcttccatatcccttgaagttcgtaaaactgtagataaaacctttgatcagcggcaatgtattaaagcagaaaaacagtaccagtaccggaatggtaatcaggagaaacgtgcgctctctgtcgttggtttttcctttcttattcatcgttcttatcccctttcctaattattacttccgttttctttttcgtaatcctgtactttctggatcagatcacggttgtaacgaacccactcagtatcaaattttttcaggaatttgtcggtagcattgtcgctgtcatccagcaggtacgtctggatcatcgcatctacagacatttcactcggatagtggtgatcctggtagtctaccagttttccctcgttgatgtaatctttcataccatccagcatagacggcagatcaaaatcaccttttttacacggtacggcactctgatcatcaatgtatgcctgtacattttcatcttccatgaagaaacgcagtacctcatatgcttcttctttgtgtttgcagtttttcataacagaaaactgtaaatcattaccggagttcagaacattttcctctgcattgttgcttgcagggaatacgaacgaatcgatattcata

SEQ ID NO: 2738 - DNA, 269 bp, Unknown
  gut microbiota DNA sequence
tacatgcatcgttgtatccgtacgctgccgggttgtcctgtgcatatgtcagaagtgctttttctttctctgccacttctctgtaattatcggtaaatgtggtattgcctttgtttacctccgaacacacatcagacggagccagatctacagcgatcgcattccacggagccaggcaggtccaggaatccttgaatccgaagtacagtggctgaatgccttctgcttcgatcttctcacacagagcggtaaattcatcccaggtcgtc

SEQ ID NO: 2739 - DNA, 193 bp, Unknown
  gut microbiota DNA sequence
tggctgcgatagagatctctgcatgggagcggttcggtgtggttacatatacaacatccaggtcctctttgataagctcctgatagtcttcaaatacttttgcatcttctgtgccatattctttttttgctttctctgcacgctctctgatgatgtcacagaaagctacgatctcatagagaccacttttctt

SEQ ID NO: 2740 - DNA, 1252 bp, Unknown
  gut microbiota DNA sequence
ttaagaagcaacggatatgaggacgatatctgtatcgagggatatcacgatccggtatacaacggagaactggagatgaccggacagctccacgcactgaactatctgaaatggtgcagaggcggagagttcacaccaaccccatgggagaaataatacagatatcacagagacagaaagaaacaggagggcattcctatgaaattagggtttgttacagcgatccttgacagctggaactatgaagagatgatggattttgcgtctgagcagggatttgagtgtgtggaagtggcatgctggccacaggaaaaagcagaaagaagatatgccggtgtaagccatatcgatgcggaacgggtcaaccaggatgatgcatatgcagagcatatcgtggaatatgcaaaaaaatcaggagtggagatctcgtcactggcctattatccaaacgtgatggcggcagataaagagaaaagcgcagccgctgtggaacacctgaaacaggtgatccttgcaagtaggaaattaggtgtgggcatggtcaccacatttatcggaagggaccagaccaaaaatgtacaggaaaacctggaactggtaaaagagatctggccgccgatcataaaactggctgaggaatgtgacgtgaaggtcgccatcgaaaactgcccgatgcttttcggcgaggaccagtggccgggaggacagaacctgatgacaacaccgccgatctggagagaggtattccggatcctggacagcgaccatctgggcatcaactacgatccatcccactttatctggcagatgatcgactatatccgcccactttatgagttcaaagacaagatcttccatgtccactacaaggatatcaagatctacaaagacaagctggaatcctgcggtatcatggcatatccgctggaatacatgtcaccgaagctcccgggactcggagatgtagactggggaaaatatgtatcagcacttacggatatcggatatgacggatatacctgcattgaggtcgaggacaaggcctttgaagattccaaggaaaaggttgagaattctttgatcctcagcaagagatatctggaacagttcgtgatttaatatagaataaagaaaaaggagataataccatgagaaaattaaaagcaggaatcgtaggatgcggaggaatcgccaacggaaaacaccttccggctatgaagaaaagtggtctctatgagatcgtagctttctg

SEQ ID NO: 2741 - DNA, 439 bp, Unknown
  gut microbiota DNA sequence
taaagaaagagaacactgccgataatttcagagaagatatatggaaaacgctgtgcggtttgggaggtggaaaagatgactttttttgatatttcccgaaagatgctgacagctggtttttacaaatatcgattgtactttctatgcaatttatctgcaacggcattattctgttgttttgcagttatttccacaaacaggacgtttatgaatgcgtcgattgtaaattcatcaatatccaataacatttatcttccattttttctgtctgcagtgtttctgcttttttttcttcctgcttcgtgtcaggcatttctggcatcaagaaaacaggaatacggcgtgatgttttctcttggcatgagccggaaggaagcgtttagaaacttactttttgaaaatgtgatcatatccgtgctggcattagcaatagcacttg

SEQ ID NO: 2742 - DNA, 213 bp, Unknown
  gut microbiota DNA sequence
tctggacggtaacggttctggtatccgatgttcaggattctgcctgttttctctgaagtctccaccatcttctgtgcttctgcataattctttgccatcggtttttcacacataacatcttttcctgcttccatggctgcgatagagatctctgcatgggagcggttcggtgtggttacatatacaacatccaggtcctctttgataagctcc

SEQ ID NO: 2743 - DNA, 242 bp, Unknown
  gut microbiota DNA sequence
ggattttcaatcggagtacgggctcaggaagcggatgatgaattctattcctttacatttgaatgcccgaaggatcgtgtaatcttcgagaaatctccgaactggccgtggccacagatgaacaatatgggactggaacgtctgattcgtctgcttcccggaaagaaatatcatgtacagattatcgtggatgatacgattgctacactgtatgtggacggagttgccttgaatacccgcat

SEQ ID NO: 2744 - DNA, 179 bp, Unknown
  gut microbiota DNA sequence
ccccaggtaggaactgctcttcttctgagtgcatgggcttttgcaaagtagatctctcccagttcgtcagccttgcacatctccttcagaaacagggagtctggacggtaacggttctggtatccgatgttcaggattctgcctgttttctctgaagtctccaccatcttctgtgcttc

SEQ ID NO: 2745 - DNA, 193 bp, Unknown
  gut microbiota DNA sequence
aagaaaagtggtctctatgagatcgtagctttctgtgacatcatcagagagcgtgcagagaaagcaaaaaaagaatatggtacagaagatgcaaaagtatttgaagactatcgggagcttatcaaagaggacctggatgttgtatatgtaaccacaccgaaccgctcccatgcagagatctctatcgcagcca

SEQ ID NO: 2746 - DNA, 5017 bp, Unknown
  gut microbiota DNA sequence
tatccgcatactgcttatcgcgatctgcttccgcagcctccagctgactggtggttgtctcgatctctccctctttttctgtaatatctgcttctttttgtgcaattccatcttctgtacttgcaatgtctgtcttggtagcatcaatctggatcatcaggtctaccatatctgcatccatagcattgatttctgactggatctgctgctgctgttcagacagagatgcgattgtctcattcgtctgacttaactggctctctgcctgcgccttctgctgtttgatatcggattccgtatccgcaaaaacggcaaatgactgagataccatcattacaagtcccaaaaacgcacatactactctttttttcatgtaaaacctctctttttgttgcccttgttactttgtttttaatgactttgtaacaatttcgttactttttacatactaacacgttccccctgtaaatgcaagaagtatgtctcagaatttgcaaaatgttcacagacttttcacattttcagtggattttgttgattttttcctgaaatcttccggtgtatcgcactgcatattttttcttttccacatgcaaaaagagaaccgatcttttctcttcggttctcttttttagaaaattccctttatttacaggcttttttgcacttaatcaatcagattctgcatactcttcagtccgataaccagagtagaagtgttatgcagcagtgcagatgtcgtcggctggatcataccggttacaccaagtgcgatcagtccggcattgaccaaaatgatcgaacggtagttcttatgaatccgtttcatcagtccgttactgattgcttttaatgtaacaatttcgtaaagattatctgcaccaattgtcacatctgcgatctcacgggcaatctccgcaccgtcactgattgcgattccgacatctgcggcagacagcgccggtgaatcattgataccgtcaccgatcatgatgacttttcgtcccgctgctttttcacgctctacaaatccggctttatcttccggcagtacctcagagtaatactcgtcaacaccgatctgtgctgctactgcttttgcagtacgctcactgtcaccggtcatcataactactttgctgataccggtacgtttcagagaattgatcactgcagatgcttccgaacgaatcgggtcatgaatgcagataaccgcagccagttccccttcaattgccagatacagatgagaatattcttccggcagtgccgcgaatttttcttccataccttccgggatcacacagtgttcatcttcaaagacaaaatgagcactaccgatgattactttatgtccattgatcgttgtggaaattccatgtgcaacgatgtattctacttttgaatgcatctcttcatgggaaatattccgttttttggcagcatcaacaacagcctttgccatagaatgaggaaaatgctcttccaggcaggctgcaatacgaagcagatcttcttcggaacggtcgcagaatgtttcgatttttgcaaccgtcggctctgcttttgtcagtgtgcctgtcttatcaaatacaatggtatctgcctctgcaattgcctccaggaatttgccgccttttacggtaatatcataaaggcttgcttcacggatcgcagaaagtacgctgatcggcatcgccagtttcagtgcacaggagaaatctaccatcagtaccgccagtgtcttggtaacattgcgtgtgatcagataggtcagaccggtacctgccagtgtatatggaaccagacggtctgccagatgttctgcttttccttctacgttggatttcagtttttcagattcttcgatcattgtaacgatcttttcaaacttacttccgccatttacttctttgacacagatggtcagttcgccttcttccacaacagttcccgcatacgcatacttctgtgcatttttctgtaccggaacagactcacctgtcagggatgcctgatttaccattgcatctccggccgttaccacgccatcgaacggaatgacattacccatatggacaacaatctcgtctcctgcctggatctgatctgccggaaccaggatctcctgaccgtcttttaccatccatactttggatacatgcagtgacatgcttcttgccagatcatccactgattttttatgagtccactcttcgagaatctcaccgattcccagaaggaacatcgtggaacctgcggtctcaaagtcaccgcggaagatcgatacgccgattgctgttgcatccagaaccggaacttccagttttccttttgcgagtgtccgcacgccatgccacagatatttcactgatttgatcgctgtgatcacagaacgcaccgatacaggaaggaacatcttgcttcccatacgcatgaccactttatttaccagtttttcccaatattcattctgtagttcacgaccggaatttttcagatacacttccggcactttggcagtctcatagtggaatgccttcagtgcccggatcacttcttcacggtcacctacaaaattaatcgtggcatcctgtgttttctcccggacttttacgcctgttaccagtttctggctgctcagataatacagtaacgtatccgcctgttcaaatgtcatacggttctgaagaagatggacacgcatacgtcctttaatttcatgtttaattataaatttcatagaataacactgtccttgtgcaagttaattatgcttctgtaaagtcttcttcttcagtctcttctgtttcttcagctgtttctgttacttcttcatcttctacaactgctgcttttgcttcacgctcttcgttgatctgctgagcttctgcgtagatatcttctgcattttcctgaacagatgttacaactttcatgacacaggattttgcacgcagaacagctgctgtgcagtttgcatagaattttttcgcatcatcacttgccagaatcttgattcctgctgtaccgaacagtacaccccctgcgaaaataccagttttttttgcgtcgaaatttttaaaaatgtttgtcataatattatctcctttgtgtttatcaaatttgtttacctactattatatcggcccgcgataatttcgcaagaacttttttctaattgagattttttctcaaaaagaaatcccgaaggggctaggaagcctgtccgggattattcgtatactttacgattctttttccagtcatataaccgcaactctccagtccacaggttaagacctgacgaaactttctgtcggaaagctgaagtaccgtgccatcatccagttccattctgcaatacggaacacattccatctcttcatcatcagcattaccggtaaacttatacatgtttttccggctgatcactccgatctcttctaatgtattcaccatgcggtaaacggttgcggccccgatactgggatcttgtttgcaggctttgtaataaatctccttgcaacaagagcagtcctcatccagaataatatcaaggatgatgcgccgctgccgggtgatccggcagccacgctctcttaattttgaaattatgatactctttggctctttctgcaattaatgtcaacacctccaaatagtacctttaatggctgcaatgtcctccgcaatgtgagcagtcaccaccgcactgcagtgattttccgttctttttgtctttaaccatgctgcggacgatcaatgcaactacaccaactaaaaccgcaccaactactactgttcccatgcaaaggtctccttccttaattatgctactttcagtgatttgctttctttataaggtctgaacagcatgtacaggaatgcaatcagcagcacaaccgcaactactgtccacagtccgaatcccccacctgtaaacagggtaccaaactgatagatacacagagatacgatataagcaagacaacactgatatccgatagcgaaccagaaccattttgcattattcatctcacgtttgatagctcccattgctgcgaagcatggtgcacataacaggttgaataccaggaatccgtaggcagcgatcggagtcataacctgtgccaggttaccccagatctcagaaccatcttctgcaacttctgcaaaaccgaacagcataccgaaggtagctactacgttttcttttgcgatcagaccggtgattgcagcaactgccatcttccatccttcaccggcttttgtccagcccagaggagcaaagatcggagcgatcacgttaccgatggatgccagaatactgtcatttaactgttctgcatccagcataccgaattttccgtctacccatccgaagctcatcaggaaccacagaatgatggtagataacaggatgatggtacctgcttttttgatgaaggaccatccacgctcccacatacttctcagtacgtttccaactgttggcatatggtaagccggcagctccataacgaacggagcaggttctccggaaaacatttttgttttctttaagataataccggagcagatgatagctgcaacacctacgaagtaagcactccatgctacccatcctgcattattaaagaatgcacctgcgatcagggcgatgatcggcagttttgctccacaaggaacaaatgttgttgtcatgattgtcatcttacggtctctgtcgctctcgatggtacgggatgccatgataccaggaacaccacaaccggaaccgatcagcatcgggatgaaagattttccggaaagaccaaatttacggaagatacggtccatgatgaatgctacacgggccatgtatccacagccttccaggaatgccaagaagataaacagtaccagcatctgcggtacgaaaccaagtacagcaccaacaccggctacgataccatcaaggatcagtccctgtaaccagtcagcacagttaacagctaccagcgctttctcaatt

SEQ ID NO: 2747 - DNA, 272 bp, Unknown
  gut microbiota DNA sequence
gaagtaccgaaacttactaccagcagttcgttgtcaccgatgtcatctccgtttaacggatcgtccttggatgcgtcaccggtatctcttccgaagtaatcagggtctgcattttcaccttctaccagttctttctgtgcatcggtcagagcatcccaggcttctttggcttctttacactgttcgtcagtgttgtcgtttctttcctgcacatagatctgatcgatcagggctgctactttatctgcggcctcctggtcagatgcactgtc

SEQ ID NO: 2748 - DNA, 1053 bp, Unknown
  gut microbiota DNA sequence
cttggaaagagaaaagtattctttacgatttccattatcctgattctgcttgcaccgatcggtatgggcgtgttccatgcaaaagacggaaaagcactgaactacagcctggagttcatgggcggtacttctacgaatgtaactttcaatgaagacctgtccatcgacgatcttgacagccaggtaaaaccggtagtacaggaagtaaccggtgatgcgaatattcagatttctaaagttgctgacagcaatgcggttatcatcaagacaagatctctgactctggatgaacgtcaggaactgaatcagaaactggtagacagctttggtgtggatgaaagcaagatcactgcggagagtatttcctcgacggtaagttccgagatgagaagagatgctatcgtggcagtcctgatcgctacgatctgtatgctgctgtacatctggttccgtttcaaagatgtacgttttgcatccagtgcggttctggcattgttacatgatgttctggtagttctggcattctatgcactgtcaagaatctctgtaggtaatacctttatcgcctgcatgctgacgatcgttggttattctatcaatgcgaccatcgttattttcgaccgtatccgtgagaatctgaagactgcgggcaagaaagcggatctgaaagaactggtgaacttaagtattacccagacactgaccagaagtatttatacatccttcacaacctttattacaatctttgtagtatttgttatgggtgtatcttctatccgtgagttcgcacttccgatcatggtaggtatcgtatgcggtgcttattcttccgtatgcatcacaggtgctctgtggtatgttctgaagacaaaagttggaaaacgtgcaaaataaaaatcagtaagcaaaaaagctgttgcagcgatgcagcagcttttttcaatcacagaggaaacaggagcagacaaatatggaaaaatggatggtagcagcgaaacgtgctgattttaaggaaatcggagagcacttcggcattgatcaggttacggcgag

SEQ ID NO: 2749 - DNA, 3506 bp, Unknown
  gut microbiota DNA sequence
aaaatgccatcaccgaaggtgatttacgcgagcaacgagtcaaagtccgtgcttgcacggaaccttgaggagtgccgcgataacgataaaaactcgcaaagcgtgtttttatcgttcaaatgcatttttgcccgtaactgtgaaggcactgaacagttacgaaaggaaaagcctttctccttgatgtgaaaggaggaaggctttttgttaagacaggagaagaacttatggcaagagaagtaaattttggaaaaatgctccacggtggagactataatccggaacagtggcttcacagcccggagattctggaaaaagacatcgaatattttaaaaaagcaaaaattaatgaggtatccctgggtatattttcctgggcagtactcgaaccggtagagggagaattccattttgaatggatggaaaagattatagatcgtctgtatgaaaatggcatttcaacaattctggcaaccccaaccggagcaagaccaagatggatggcacagaagtatccggaagtgcttcgggtagacgccagtcgtcacagaaatctgtacggagaaagacataatcactgctatacatctccggtgtacagagagaaaacaagaattatgaatacaaaactggcggaaaaattcaaagaccatccgggtgtgatcgcctggcatatttccaatgaatatggaggagagtgtcattgcccgttatgtcaggcagcctttaaaaactggctgaaagacaaatatcagacagcagataagatgaaccgggcatgggcaaccacattctggagtcaccgctataacgattttgatcaggtagacagtccttccccaagaggagacagctctcttcacggtctgaacctggactggaaaaggtttgtgaccgatcagactgtggactttgtgaaatgggagatccgggctcttagggatgcaggatccgacaaaccaaccactatcaatatgatgtacgatttccagggattaaattatcacaaatttgctgatgtagtagattttgtatcctgggataattatccacagtggcacaagaaagaagaatacctgacagccatggataatggcatgcagcatgatatcatgcgaagcattcagaaaaaaccatttttgttgatggagaactgtccgtcggcaaccaactggcagtccgtaagcaaattaaagaaaccgggaatgcttcatgcagcttccatgcaggctgttgcccacggatccgacagtattttgtatttccagcttcgacagagccagggttcctctgaaaagttccatggtgcagtgatcgatcattatggcaaggatgataccagagtatttaaggaggtaacggaagtaggagaaagtctggaaaaacttcaggaagttaccggagcgaagaacccggcacaggtggctgtggtatatgactgggagaaccgctgggccatggaagacgcccagggaccaagaaataaaggactgttctataaggaaactgtggaaaaatcctattacgcattccgcaaacagggactgaatgtggatatgatcgatatggagcaggatctggatggttataaagtagtagcagcgcctatgctttatatgttcagggaaggatttgaagagaaggttcgtaaatacgtagaaaatggtggaacctttatcctgacttactggtccggtatcgtagacagtaccgatctgtgtttcctggagggaactccccatggactgatggatgtgatgggacttcgcagtacagagattgacggtttgtatgatggggaatataatagaggagtaccggtgaggggaaatgagttgtgcctgacgaaaacctatacctgtaatcatctttgtgaactggttaagacttctactgcacagcctctgatgacctacgaaaccgatttttatgccggtatgccggcacttaccgtgaaccttttcggaaaaggaaaagcataccatgtctgcgcagactttgaacagggattttatgatgaagtttatcgtaagattgcaaaagaagcaggcgtaaaacgtgtagttgcccacatcccggaaggcgtggaagtaagtgtgcgccggaatcaggatacagattatgtatttgtacaaaacttcaatcgtcagccggtagaagtcaagttgcctgtagaacagtatccagtatggcttggaaaatatgatggcactatagatcggttcggcaccgtggtattaaaaggaaaggcaggagaaaaggaatgattcaagagagcattgtaaaactggtacagtatggactggcaaccggtctggtagaaaaggaagacaagcgttatactacgaataaaattctggaattactgcagatggatgcaatcgatgaagaatatgtaaaacagatcttggaatctgacggagcagatcagagtgtggcaggtgaactggaaagcattctgggagatatctgtgactatgcatatgaacatggtctgatggaagaaaacagtgtaggttatcgcgacctgtttgacacaaaagttatgagtcttttggtagaccgtccaagcaatgtgatccgtcgcttctgggaattgtataaagaagatccggtaaaggctaccgatgcacattacaaattcagtcaggataccgattatatccgtcgttaccgtatcgcaaaagacatgaaatgggtagcaccgacagaatacggtgatctggatattaccatcaacctgtccaaaccggaaaaagatccgaaagccatcgcagcagcaaagctggcaaaacagacatcctatccaaaatgtctgctttgcatggaaaacgaaggctacgccggacgactgaaccatccggcaagacagaaccacagaatcataccggtaaccatcaacaacagtgagtggggattccagtattctccttatgtatattataacgagcattgtatcgtattcaattctcagcatgtaccgatgaagatcgaacgtgcaaccttcgcaaaattgtttgactttgtaaaacagttcccgcactactttgtaggatccaatgcggatctgccgatcgtaggaggatcgatcctgagtcacgatcatttccagggtggacattatgaatttgccatggcgaaagcaccggtggaaaaagaagtagtgatcccgggattcgaagatgtcaaagcaggcatcgtaaaatggccgatgtccgtcatccgtataagcggtccggacacggagcatctgatcgaactggcagacaagatcctgttaaagtggagaggatacactgacgaggcagcatttatcttcgcggaaaccgacggagaaccacacaataccatcaccccgatcgcaagaaaacgtggtgatatgtatgagatggatctggttttgaggaataatattacgaccgaagaacatccgctgggtgtttatcatccgcatgcggaactgcaccatatcaagaaagaaaacatcggtctgattgaagttatgg

SEQ ID NO: 2750 - DNA, 17879 bp, Unknown
  gut microbiota DNA sequence
aaaaatacatggagttatacagcagcaatgctggcatattcggaaaaaggagaaacactgggaattcctgcagcagtaaaaacactggaaatgagcagaccataccagacgatgtgctgtatctttgctctgctgttactgtatgcattggtactgatgtttttgcagatgttttttacactgtggaaagggcagctggcaggggttatcagtgcattgacgtttagtgcatatgggcttttgctgaatccggataatctgaaaacactgttgaaacttccagatgaattttattataaagccagggtgattgtaggatggatttcaccgttgaatcaggcaacctattcgatgcataatttcggatatgataatcttccaagcctgaaagaaacttttttgatttttggcagcatactgacgattctggtgtttttgagtacaagacagatgaagagatataattttcaattcagagggacggaagagtaacaggaggaaaagaatgcgtacggtgattaaactggaacatgtttcaaaacaattttccgaagaacaggtattaaaagatgtcagttttgagtttcaggaagggaaaatttatgggatcgtgggaaataacggaagcgggaaaacggtactgatgaaatgtatctgcggttttctgaatccctccagtggaaaaattcttgtaaactataaagagattggaaaagatgtggattttcctgaagatattggtgtgattatagagacacccggatttttgccaaatcttaccggcatgaaaaatctggagatcctggcgtcattacaacataaaattggaaaagaaagaatccaggaagtacttctaaccgtaggactggatccgaaactgaaaaaaccggtatccaaatattcactcggtatgcggcaaagactgggaattgcacaggcggtaatggaagatccctccattctgattctggatgagccgtttaacggactggataaaaaaggggtaaagcagatgcacgaactgattctgagcctgaaaagtgagagaaaaacgattttgttatccagtcacagtcagaatgatattgatgtactgtgtgatacggtatgcgaaatggatgcgggaacgatgacatgtatccgggaaagagcgggtgagaaggatggatgaaatgtgtctggaaatgtgtaagattacccgatgggaacgtggatatcggctgattctggatcatgtggatttttcggttcacaagaaagagaaagtgctgatcagggggaaaatccaggaagatatcaggcagatgtttctggtagcttcgggagtaacggcagcgcaggaaggaacatgcagaatatcacgtgcgggtatcataccggagcaatttccggatctggagcgtatgagagcaatggattatctgttgctgccgctgcttacgcaagggtatgagagaaagcaggcgtgggaacagataaaaccggtggttaaagcgagtacattgtgggaaaaacgaatgatatatgtgaaaaatcttacagcatatgaaaaagtcgttttactaagcatcgcagcactttctacagaaccggaaatattgctggcaggagatggcatcagtaaaatgacagaagaagaacgtaaaaagtatggaacctggatttccgggcggctggcagattcgggcatggcttttgcggcatttggaaatttatgggaagatattttgtgctttgacagaatctgtgagatacagaacggacatcttctggaaatccataacacacgggaggaaaaaggatgaggcgaaacataagaaaagtactgtgtctgctgttgcttttactgtttcccatgcagacatggggagcggtggcagcagagccagagccgacagcgcagaatgaaaaactgagactggacaatgaaaaccggtacgaggatatggaaaaagcgtaccaggatggttatgaaccggaagtaagtggagagtgtgtgtctgtgattcttccactgctgtggaatgggaaaaatgaagtgaatacgataactgcatcgctggatcttggagatcagaatacagcaccgtttatatttcagaattatcagaagacaattcgaaagacagaagaaaaaatcaatgatagcgatcagacgagagaagtctttctgataaaatttgtattaaagctaaaaagtgacaggagaaatggtgcttatccggtacatataaaaacggcattgcaattggaagaacaggaaatagaacaaaattttacggtgtatgtacagatcaatgatgaaaaaacggcagaaatcacgccaacagcaacgccggaaccgacaccttctgatacgagtggtatttcagaggagacagacagtaccgtgccggcagcagaaattgcaggaggaggggatgttgctgccgccgttgtagcgggaggagaaaataaagaggaaaaagcgacatccgaaccgaaagtgatcgtggcagactgtaaagagattccggaacatatttatgcgggagattccgtgactttgaaagtgattcttaaaaatacgaataaaaagaaatatgtgcagaatatgaccgttacggcaggatgtgaaggggatggaatttcgcttggaaatgctgtgaatacgcagtattatgaaaaacttggtgcaggaaaaacactggaagttccggtcgagatccagacagataaaaagacagaagcaggaaaatataaactgacgctggaactgtcgtatgataatccggacgcagtaacacttaccgcaaccgggcagatagaaataacgattgaacagaaaagtgaacttacgatggagattggtcagatcccggaagaagtcaatgcaggagaccgtttgcagataccggtacagctgatgaatgttggaagaggaatggtttataatgcgagatgcaccgtggatgtccctgggctacagacagataaaagtctcttccttggaaaccttgaggggggaaccgctgtttccggtgaactggatgctttcgcaggtgtggtaaatgcagaggaggagacagcagaaaaaagatacgggcggacaggcggaaggattcttctgacttatgaagacgagaacggaaacagctatgaagaaaccagcgacattgtactgacgattcagccattaaagatacaagaacaaactacagacgaaaaggaaaaagagagcaataaaatcagccgccagtttcttatcggtgtaaccgcagttgttggtttgggcattgtcggagtagttcttccgggctggattcgcagaagaaaacagggacagtcttatgaatagaaaagaaatactctgttatacgggaaaaattgtatggcgaaaagatgcaatcatcatttgcctgttttggagtatggtatttttttgcctgaatgcgctggttgtttgtgggaaaaacatgaatgaacagaaaaagaccgctgtggacattctatgtgagatttcgcaggaatatcaggagcagatggggactctgcggaatatggaaggggtacaggcggtaactgtgtgggaagagagttcacagctgcttgagtggaatggatatgaagcggaaatcacgctgacaggaacggatcaggaatatttgcagacacaatttccggaggcgtacagtcaggggaaccattcatccatggcatgggcagtcgtagatgggagtataataaaacagctgaaggatacaaaaaaacatgcgattcagagagattcgccggaagatctgttgtatcagattgtggaaatcaacggggaaaaagtaaggatatatggaatcaacagcccaaaagaaaaacaggaaaaatctcaggtctttgtgtatacggatatagaaaaatacgaagaaatagtaatggcagatacggaaaacagagaaaacgttacagataccaccgctaccttgcagggagaaactcatactgaccgggaagcatatcattatcggattcaggtggtgaatgaagctgcagcagaaaaagttattgatacactgtccctttccggaattcctgtacagaatacggaagatctggaaaaacagcaggaacagagggaaaggaatctagggaaaatatggcagtggatctttggactttcgggttctcttgtgagtggaattatactgatatggcagcaggggaaactgtggatggcagaacaccatgcatttgtccaatacatgcaacagataagtcccgaaatctggaaaaagatctggaaaaaccggaaagtgttctatatcgttgcgggaggggcggcaggagaaatcgtttatttactgttgctatgcaacttgaatgaaatattataaaatatactggttgatatggaaattataatgaccaaaataaaacaatatgatataatacatataacaaaaacaatatgaaagagcgagcggagaaaataatggcaggaggtgaaaaaaataatgaagaaaaagatactcgttgcgcttggaatcggaatcgtagttatagcgggtgcaggaacggtttatgcgactcacagtcagaaagcaaaaaacagcagcaatcaggcgtatgagctggggcagatgattcaggaacaggacaaagagacggacacatcggatgagctgtatgcggttggaaaagatattcagatcacgaagcaggagatggaaaatcatgaaaagcgcttcgcactgggcgaggaagatgcacaggattcggtgacggatgatggaaagtcttcggaagaaaaggcatttcaggcgctggttcggagaaagacactggcggttgcggcggaagcggcagggtatacagtcagtgatacagaacaggatcagatcgtcagcgagaaacgggaagccatggatgcgggcatcgatgatccagaaaataaggaatacggggagatactgaaagcattgtatgattcctttggcggggaagatcagtactgggaatacatgcgcgaagagacgagaacatcagcggagatcgaaaagtatttcgcggataaagaaaaggagtacaaagaacagcttggctccgatggagagaccgctcagacgtgggatgaggcacgggaagaactggtggatcagctgatcgcggagcaggatgtgaaaactgtttaaaaatcagacagatgtaaagataagaaaaaggcaactcctggagacaggggttgtttttttgatgcaaaccacactttacagtagtaatttaccgaaggctcatgtataataaaatacggaaatgttgatgcaaaagggaagggtcctgggacaggagctttcctgcgtgaaaaaacggaatatggaaacatattctgcgaaaaagggagaacaagatgagtaagagaaatgatgtacacaaagtattgattatcggttccggtccaattattatcggtcaggcgtgtgagtttgactactccggaacacaggcgtgtaaagcactgcgccagctgggatatgagattgtactggtaaactccaatccggcaacgatcatgacggatccggggattgcagatgtcacgtatatcgaaccactgaatgtagagagactggaacagatcatcgcaaaagagcgtccggacgcgattcttccgaatcttggaggacagtcagggctgaatctttgttctgaacttgcagaagaagggatcctggacaaatacggtgtgaaagtcatcggcgttcaggtggatgcgatccagcgtggcgaggaccgtattgaatttaagaagacgatggaccgtctgggtatcgagatggcacgaagcgatgtcgcgtacagcgtggatgaggcgcttgcgattgctgacagactgggatatccggttgtgctgcgaccggcttacaccatgggtggagcaggcggcggtctggtatataatgtagaagaactgaaaactgtatgcgccagaggtctgcaggccagcctggtaggtcaggttctggtagaagaatccatccttggatgggaagaactggagctggaagttgtccgtgactccaaaaacaatatgattactgtatgctttatcgaaaatatcgatccgatcggcgtacataccggtgattctttctgttccgctccgatgctgaccatctccgaggaggtacagcaggaactgcagagacaggcatataagatcgtagaagaagtagaagtcatcggtggaaccaacgtacagtttgcccacgatccggtcagcggaagaatcatcgttatcgagatcaacccgagaacctcccgttcctccgcactggcaagtaaggcaaccggtttcccgatcgcactggtatctgcgatgctggcttccggtctgaacctggacgagatcccatgtggaaaatacggaaccctggacaaatacgttccggacggagactatgtggtaatcaaattcgcgcgctgggcatttgagaagttcaagggcgtagaggataagctgggtacacagatgcgtgccgtcggcgaagttatgagtatcggtaaaacctataaagaagcgttccagaaagctatccgaagcctggagatcggtcagttcggtcttggctttgccaaggatttccatgagaaatcaaaagaggaactgttaaagatgctggtagaaccgaacagccagagacagtttatcatgtatgaagcactgcgaaaaggtgcaacggtagacgaactgtttgctctgacaaagatcaaacactatttcatcgaacagatgaaagaactggtggaagaagaggaagcacttttggcaaacaaaggtcaggtgccggctccggaagccctgaaacaggcgaaactggacggtttttctgacaaatatctgggacagatcctggaagttccggaagaagacatccgtaatgcgagaatcgcacagggtgtggaggaagcatgggaaggtgtccacgtaagcggaacgaaggataatgcttattattactccacctatcactgcaaagacgaaagtccggtcagcgataacaagaataagatcatgatcctcggcggcggtccgaaccgtatcggtcagggtatcgaatttgactattgctgtgtacatgcggcgatggcactgaaaaaagcaggttttgagacgatcatcgtaaactgtaacccggaaacggtatctaccgactatgatacttccgataaactgtattttgagccactgacactggaagatgtactgtctatttataagaaggaacagccgctcggtgtgatcgcacagttcggtggccagacaccgctgaatctgtctgcagatctggaaaaatacggggtgaaaatccttggtacttctccggaagtcatcgatatggcagaagacagagatctgttccgtgcgatgatggacaaacttggtattccgatgccggaagcaggtatggcagtggatgtggatgaggcacttgcgattgcagaaaagatcggttatccggttatggttcgtccgtcctatgtactgggcggccgtggcatggaagtggtatacgatccggaaaatcttagaatctatatggaagcagcagaaggtgtgacaccggatcgaccgattctgatcgaccgtttcttgcgtcatgcgaccgagtgtgaggcagatgcgatcagcgacggtaatcatgcatttgttccggcggttatggaacatatcgagcttgccggcgtacattccggtgactccgcttgtatcatcccgtcaaaaaatatttcagaggaaaatctgaaaaccatcaaagaatatacaaagaaaatcgcagaggaaatgcatgtgcgtggtctgatgaacatgcagtatgcgatcgaagacggaacggtctatgtactggaagccaatccgcgtgcatcccgtaccgtaccgctggtatccaaggtgtgcaatatctccatggtaccgctggctacacagatcattacctccgagttcagcggcgcaccgtcgccactggatggtatgaaagagaaagagattccatattatggtgtcaaagaggctgtcttcccgttcaatatgttcccggaagttgacccgttgttaggaccagagatgcgttctaccggtgaggttctgggccttgcggacactgtgggagaggcattctataaagcacaggaagcaaccaagagcaaactgccgttagagggaactgtcctgatcagtgtcagcgaccgtgacaaaggagaggttgtggaagtcgcaaaacggtttaaagaagcaggatttgctatcctggcaaccggtcacacgaaagaactgatcgagcaggctggcatcaaggcagaaagagtattcaaacgcagtgaaggacgcccggatatctatgatgtgatcaccaacggtaaagtacagctggtagtcaacacaccgaagggtgacgaggatggtccggatgatagttatgtgagaaaggcttgcatcaagagccgtgtgccgtatatcacaacgatggcagcagcactggcaagcgcagacggtattctggcagagcagaagcaggagaaaaatgaagtagtatctctgcaggaactgcacagccggatccgtgaaaaataaaaggcaaaaagggagtaacgaaatatgatggatatgagagaatttcaggaaaaactggagcagctgatggaactggcagcaaagcaggagaagaatctgaataacgagcagattcttgagatctttgggctgaatcagttatctccgcagcagttgcagagtctgtatgaatatcttcgtatccagggaatccgtatccagggggcagatcttgcccctatggatatcggaaaggcactggatccgcaggaagaacaggaggaagagaagaagcctgtgattctggaagcagaggatgagcagtgtctgaaggagtatgaggagatgctccggcagttcccttcggaaaaggaaggggagcgggaggctctgcttttacaggcagtgacagatgttgccggtgtgcaggagcgtctggcacagttgtatctgaaggagatcttgcagtatgcgagaaagctgtggagacaggggatttatattggtgacctgattcaggaagggaatatgagtctgttgctggcgctggcggaagagatgccggaggaaggtaaggcgggctggatggagcagaggctgcttgacggtatggaatcctgggtgaaggagcagacggagcagaagtatcgggatgagtcgatggttgagaaggttcgaaagctggaggctgcgatccgggagttgtcggatgatgaggagcagaagttcagtgtggaggagctggcggcttatctggatatggatgaggaggaaatccgggctgtgctgagacttaccagcgaaggggcggatgaagaaaagtaaggattgcctgtttttttagtttggttagacggacgcggcaggcacctgttccatggggtgtggacaacgtgggcagggcaactttgaactagccactaactgcgactatattcacgagggtcggctgaccctcgcgaaagtctccgtaagtgtcggatttcaaagcttgccctaagcgcccacaaagtgttgtccacaccccatggaacaggtgcctgtcgctgtgcgtttaaggcgggagagaaaaaacagagggagatatttttcggcatccggatagaaaatgtctgttatataatacatgatatgataagataaggaaaaaactaagagcatatataaaaagaaagccagcggtgttcggtgagggaacgccgctggctttttataggggtgaagttgaagattagcagagtcaggaattacttgtcttgtttttcggcttctgtcgttgcttttgcatccgcgtttgtagctatgtctgttggaacaaccgggggctgagcagttggaggagtgatgttctcttttttggctctatgtctgcggagcagtttgcggatcagcaggatgatcacgataaggatggcagccaggacaaccaggattgggaggttggcgatgatggctacgaagaggtctacgaagaaatcgcggacttcgtagaggctgtttcgaaagccgttgctgatgcggctgcctatggtgttggaggtggactgttcgtaggctacttcggtgatgtagaagtagacagtgctatagtctaccaggttgtcgtaggttcgaagctgggtttcgtagctgttgatctggtagcggaggtcggagagtttggattcgagggccaggatctgatccagttcagtggcctgttcgagaagttcactgacacggtcgtattcggtccggagcgaatccaggtaggctttctgatcgacgtatcggagggtgatgtcttcggtttcgatatttttgttggtgacggtgcccagagttccggcagtttccaggaaactatccaggttgtcggaagggatccgggcagtgacgtagtaggagcgtctgctgtagccgttctgtggagtatccagggtggaggattcgatatagccaccgcaggaggtgatggagttgtccagtttcgttcggagggtgtcaagatcttcggtggcgatatccatcgagacggtgcggatcagtttccgggtgctctggtcgtgggttgcctcagcagcatcggtcgcagcatcagaaccggaagagtcagaagacgaaccggcagtttcagctgtggcggtatcgtccatcatatccgcttcgccgtcataggagaagccggagtcgtccaggggttcgctggcttcgacagcccaggagtctgcagatttattctggtggaccgcagaggtggttgcagaacttccgcaaccggagaaaagcaggatgccactcaaaaagagtgacggggcaagtaaggttttctttttcataacgaattcctcctttttcatgaaaatatagaaaaataaaaaaattaaaattttttgaaaaaaacacttgcattttccaaaaaggtgtagtattataatcgtgcaaggttcgttggtcaagcggttaagacgccgccctctcacggcggaaacaggggttcgattcccctacgaactgctactaacccggaagtcggaaatgatttccgggttttttgttgctatagataaaacctaactgtgaagatgcctgtcgaacagctaggttttatctatagcaacaaaagcattgaaataatgggtggttagcaagtctttctttgtatttattataagtgatatatataggaaagacaagaaagttcagaaaatctttaaaaaagttagaaaaatgtaagcaattgtgattgcggtgtgtggccttggccctattgtccatttctttaatatccatgtaacagactaacggttgaaaacagagaacacatatcaaaattggtccaccgaaccaattttgatatgcaatgcaaagagctgatgtctattgtttctcagaaatacgtgcggtggattttctttcaatcagctgcgcatgcaaaaggaatgtgctgatggaaacatgattgagaaggctggacaatgcaaaaaatccacttttacccagttcggttcgatcctgacggatggtggttaggggcggtgatgtataagcagctattggcagatcatcaaagcccacgatactgacatcttcaggaacccgatatccgagctgttgacactgaaccagagcagcactggcaatggtatcctggctgcagataatggcagtcattccactttttaaaaagtttggaagatgtttttccatacattcggaaagaaaacaggaacaaccagcattgtcataagaagctttcagtccgtgtttgcacatagaacggaagaaagcagagtatcggatctggataatctgagaaccaagagaattgctcagatatgcaattttttggtgcccctgcctgacaagatgggataccgccagttccatcccctcgtcattatcaatacccacataggcagtggaagggttgcctgtaatatagttatcataaagtacagttggagtacaactgttttcaaaatccttaagccatggatcggcaagagaaaaaccgatcacaaaagaccccacataattatgttccagcatataaacatcataaggctggttgcgttgtatctggatatcaacaggttcaatcacaacatcaaatccctgtggctccgccagctgccggaatcccataatgatatcatatgcaaaatgataaggttcttcatactgtatgttatctttttctattaagacacatatttttctgacagaatttcgataacgccgtaactttgtataaccaagtgcgacggcagtttctaaaacttgttttcgcaaattttcgctgatgtcaggggcgttattcagagcctttgatacagcacttttggaaattcccattttatcagcaatatcctggatcgtggtcatgattaaatgtccttctgtgtaaaaaagagttattctaccttcgttatatgatgaggattgtgagagtacgaagtacggaacaatccggtatcaaaggggtcaaaataccttttgcccacaatatcattatagagaatgtgattgtaaaaatcaatggaacaatgaaaatagtttagtaaagttttgctacaaaatctgagggtcaataattaataaaaatacaagtggataattatataaaatgaataaaatagtatgggaataacaaaaaagattgacgctgaaaagaaaaagaattatagtaaagacatcgaaacaattcgaaacaaatgtctaaaaatttagtttgttaaataatttggaggaaaatcagatggaatttgccggcgtatatcataagacatcggaacagatgagttatgcattggacgagaaccagcttgttgtaaatatcaagaccggatatgatgtaaagaaaatttttattcattatggcgatcccttcgatgcaggaatcctgggaggaaatgagaagtggacaggaaaaagggaagagattgtatacaaaaaacgtctgtcccaccaaatctggtggacaacaacacttttgcctgtttataagcgatgcaaatattattttgaacttcatacagaaaaagaagtctggtattactttgaagatggttttctgacggaagatcagcttaagatggacggtcgtatgctacagtgttttgttgtaccgtggatgaatccggcagatataaaccgtacaccttcatgggtgaacgatacgatctggtatcagatctttccggatcgattctgtaatggaactccggaaaaaaacggagaagacattctgccgtggcgaaatcagggcagggtgaccaatgaggaaaaatttgggggaaatctggaggggattcgtcagaaattatcctatctggaaaaacttggaattaccggtatttatttgaatcctatcatggaagccgagtcaaaccacaaatatgatacaacagattatacgaaaattgatccgtcttttggcgatggagataccatgaaagtactctgtaaagaggcacacgaaaaagggattcgaatcatggtggatgccgtattcaaccactgtggaagaaaatttgctccctggatggatgtactgaaaaatggaaagaattcccgctatgcggattggttcatggttgaaaactgggagcagatcggaaagagagcggataccagagacagacgtttttattctttcgcattttccgatgggatgccaaagctgaatactaataatgaagaagtgattcaatatttctgcaagatctgcgaagactggattcgggattatgatatagacggaatccggtttgatgtgggtaatgaagtatcccatcgatttttaaaacggataagggagcatctgaaaaagataaaaccagatatctatttacttggagaaatatggcatgatgcaagtcagtggctgctgggtgatgaatatgattctgtaatgaactatcccctgttaagtggaatccatgattttttcctggatcagaccatgaaaaaagaagaatttgaatacatggtaaatcgttgttatacgatgtatatgcagcaaaataacaatgtattgttcaatcttctggattctcatgatacagagcgtctgataaaccggcttcataatctggatattttttaccagcagctggcaattctttttacacttcccggaagtccatgtatttattacgggacggagattgctatggagggcgcccatgatcctgattgcagaaggtgcatgccgtggagcgaaatcgagagtgatgagaaccaggagaggattgggacgatcaatcgtttgatcatgcttagacggaatgagaaaacctgcagaagcccacattttcattttccaaatacctatgaaaacggacgatgtgtggaatatgtaaaaatcgatgaagaaggaaataaaatagaagtattattaaatgcgtcaaatgaaaatgtaagagtaaaaggagaaggcgaaatcctttttgcacggaaatttgatggtgacatacttggagcaaacggaaccctgattcgtaagatcgaagtaactattcagtagcaaatatcctgtcaggcaccaaggtctagagcaagcacggacttgactcattgctcatgtaaatgaaaaggcggcggattttgtgattgtacaaaatccgccgcctttttgtctgtgaaaatcaaaatataaggtttcatgaggaaaagcagtaattaatattttttatgttcttcctcggacatagcctgataatcataaattggatgaaattccttactacaattaaaagattcatactgcataaaaatccgatccataatattcgggatcgcggattccagaggctggaacagaagaatcaggtattgcatggaactgtaacgagtgtagatatcgatttttcgaatactcttacgaataatttcttccatttgtaataaagcctgttcagctttttcgatgcttggcgaggtttcaccggtggattccatggtgagcatgatcaggtaacatctgcaatggtttcggatgaccagttgatgaatataggaatactgtcttgcaaaatcacggtaatccagattcaaagcacccatatagctgccactgtcctgaagagattttgcaatctgagtcagattattgccggctccggatacactggtggacagatgatcgatctgaggctgatagaaggaaaactgattttttccatttcgcttggcataatataaagcattgtcggcttttgaactgcagtcggggaatggttcattgccggaacacatatacaggcctgcagacagggaggcgtattgaatctccgcatcatctctggtgagaacatggaattgatggaacagttgtgtcatatgctctgaagcttcctcatgggtgatgtcaggaaagaaaagcaagaattcatcaccaccaaggcgacaggcatatccatttgatgcaaagcgtgccagaagtttgcccagagtcatcagagcgcggtcaccagccttgtgtccatgcacatcattaattttcttcaggttatccatatccacaaacgcaagacatccactgtgatcctgaacggcacaggcgatttgtttttcaccaagagtacgcaatggaagaccggtaaggaaatcgtagctagtgatatcttcctgacttttgatggtagtaaacacatcggatataaacttattgatcgtgtgattggaatccatgtacagagagttttccatttctttgtatttgcttgtgacatcctccagatgcccttcgtccattaagtccagaagaatggcagagattcgaggatcaaactgtttgccggcactttccgaaaattcttttcgaatctgatcctcagacagagcatttcgatagatccttctggaatgcatggcatcaaaactgtctgccacggcaacgattcgtgcatagagaggaatagctgctccggaaagaccttccggatagccggttccatcatagcgttcgtgatgactttttgttacttcaaccaggtgaggaaccagtgtaatatcttttaaaatatgggcacctatgagggtatgctgtttcatgagggcatattcctcttcgctgagtcttcccggtttgcttaaaatctgatccgggatgccgatggcgccgatgtcgtgcaggtaggcacaatccttcagattttctatttcttcagaagacaaaccaagtcgtttaccgatcaatgctgcatattcggcgacacggatggaatgtccgcagttatttcgatcctttccctcaatggttgcagccagggtgcgcatcatttgcagggtcatttcctctgtctgcttttgtttcctttccagttcctgttgttgacgcatatcttccatatgctggattccacgaaccgtacggactacatttacaaataatagaatgatcatgccgataccggtaaagataccggacaccgaggtgacaaaatatacagaggcagattcaatagtcacacaaaccatgatgagcagcaatcccaccagcagtaaccggtccgtgtggtatttgctcttatgcagatactgaaagagatggacatataccatgacaaagacggcagcgaggataatctggcccaatggcagcatctcaatgtagtctttcatacctgtgctgtacaaaacagaactgattgcaaaattagccagaacaattccgccggcgatcagatacatacgtctgtgccggccattttgtatgctgtctgcataaagcaaaagaggaatcggacacagaatgatcatgacaaaacataaggaggcaagcgccgaagcattgggaacgagaatctgcctcaatttggattctcccagcagccagacagcacccatggtcatgcaccagccaaggtattccatatcaaagtcaatatgatagagaaaaccaaggatcatgctgaataaaataatagtcattccggaaaaaagaacaaagaaaccgataaaagtggtaggtgcatattgatggaagataatctgccagatggctgactgatctccacaatagatggaattaactaccccggaatagtttgatgtataagtcgtcagttccagacgaagttcttttcctgcatccttataggaagtagggcaaaaaacaaatctgctggcggaattcttcccaaccaatcgggtttctttggtggagtattcggctctgagttctcctcctatataaaactttacatcctggagagaagaacgaatagcaaatgctgtctcatcataattatccggcagtgttgtggtgagaaccatagtctctcccgccggaacctggtaccttcccggcactttaatttcttcggaagtcccgtctgctttttcccatacaaaggtaccggaataaagtgcggctgtcgaagtgcggtttgcactctgctcatctgcaccaaacaattccatgaataaaaaccagccgaagatcgcggccatcagaatatagaaaaagtatctcaatttatgtaaatatgatgcttgcgtgttcaaggaaaagctcctttcgtgcttaaaaatattaccgttaacaatataccatttttttcacggatagtcattagatttatcattttaaattgtgaattgtttatgacgcggattcaggactgcgctacaggaatgtatgtggaaacaaaagaaatggatgataatacggttataaaacgaagattaaggataaaacagcaatattaataattggaaatcggtggtacaatacatatgtgatttggtaacagttcagtatattcacagttacgaattataagaattccaggtggctgatgcgaaa

SEQ ID NO: 2751 - DNA, 4130 bp, Unknown
  gut microbiota DNA sequence
gtgatcaatcaggcagcaaaacgtatattaaaagccttatcttttgatggtgtagaagtggatgcatttcgccatatggcagacctgaagcgtctggatccgatgaagatattttacaagaagatagacgaaaaaatatataatggaagtcatgcagtaccggttcgtatctttttccctaatgaaaagtgctttcaggaaagtaatgacaaaaccagtgacagcagagaaaagaagctacttttgtttatccacggtggcggctgggtaacggagagtatcgataattatgaaagaatctgcgcacggcttgcagatgcaacaggacagtatgtggtagcggtagaatacagactggcgccggaggataaatttccatccggtctggaggactgttatgtggttgcgaaagcactgtataccgggaaatttgtgctaaatgtaaaaccggaaaatatcactctgatcggcgacagtgcaggaggaaatctttgcgcagcgctgtctttgatggcaagagatcggggagaattcatgccgaaaagacagattctgatctatccggccacttataatgattatacggaaaaatctccatttccctccgttaaggaaaatggaacggactatcttctgacagcaggaaaaatgcaggattatattgacctgtatgcgaaaaatgaagaggataaacaaaatccgtattttgccccttacctggcaaaagatgtgagtcatcagccggatactctgatacttacttctgagtttgatcctcttcgggatgaaggagaggcatacggaaaacgtttgaaggaagcaggaaatcatgtacagatccatcgtatcaaaggtgcactacatggctattttgcactgggaatcaagcatctgtatgtgcaggaaagtttcacttatatcaatgcgtttttgaagggagaagcattgtgaatcagaaaaaagcacgttggagaaggctggacaatgcggcaaagttgtattccgcagccagtaacaaaagggataccagagtattccggttttattgcgaattaaaagaagaggtccggaaggaacttttgcaggaggcactggatcagactgtggagacatttcccatgtttcttatggtactgagaaaaggattattctggcattatctggagccatgtaacctgcatccggtcgtaaaggaagagtataaagagccttgcagcaggctttatgtaaaagataagaagacacttctttttgaggtgacttattataaaaaacgaatcaattttgaagtgtttcatgtgctgacagatggtaccggtgcaacggagtttctgaaggaactggtgagtaattatctgtatctggcacatcagaaagaggggcttgagccggtttccatgttgccggaagatatgactgtccaggaccaggaatcagacagttttctgaagtattattccaaagaccagaaacggccgaaggaaaagaaaacacgtgccttccagatccgaaggaaaaagaaggatgggaaccatctccatgttcatgaaagtgtggtttctgtaaaggaagtgttaaagcgaagcagagaactgggggtatccatgacggtctttctgacagctgtctttctcaaggcaatccatgaagaaatgtcaaagatgcaggagaaaaaaccgatagttttgatggtgccggtaaatctgcgaaagttttttccgtccacatccatgttgaatttcttcaactggatagaaccgggatatgatttttcaaagcgggacagaagctttgaggaggtgcttggatataccaaagattttttcgaagaacaactgacaaaggaaaaaatgtctgctcatatcaacgatctgcttgcactggagttgcatccgatcctgagacttgctccattggaactgaaaaatctctgtatccacgcaggagcaaaattttctgagaaaaacacaacggctatattttccaacatgagtgctgtccgtatgccggatagttatgtgccttatattgaacgttttggtgtgtttaccaatacgccgaagctggagctgtgtctgtgttcgtttgaagataagttatccttcgcttttacatctagatacgataccgtgaatatcgagcggaatttctatcgtctgctaaaagagcagggaataacagcagaaaaagtcgaaccggaatttccaaagccccagatgccaagtgaacaggagatgaaagtctataaagtctatagttttctgtgtctggtacttgctacagctatggtagttacggatctgaactttcatccacgcatccgttggacctggtttactgccggtggtgtggcaacaatgtggattgcctcttcgattggattcttcaaaaggtataacctgctgaaaaatgtaatgtggcagcttttgatcggttcgattatctgctttatctgggatggttttaccgggtggcacggctggtcggcagatctggcattgcaaatgatggaggacatcaagtgccctaactgcggtgctgaggacactgttgatttggaagattatgtttattcggagagcagcgatgagagagaaaacggtatgggaccagattttgtaaggtattttgatagcgagcaaagttatgagtgtccagactgtggaaagattatttgcatttctggttggaagagagaatatccaatgggagctttcgattctgaggatgtggatgttgccttggtggaagaaaacgattaataaccttcgcaaaatttacaatccctattatgaagtaaaattttaaggaggctggatagatggcagtagttacagaagcattcgatattccgctggatatcatgaccaagttagcaacaggagaataccgcagaattggaggcgttgtaagagttgcaatgggtccaaacaaaggacagattgtgaagcaccttaaaccagtgaaattggaacaggctgcacaggcgcagaatgttggagctaaagttctacaatttgcaaagaacaataaaaagggactgattattggtacagtggttgctggcactattacagccggtggcgtggtgtaccataagataaaaaacagagagccagaagtggtgaagaagtatcatgcagcattacgagactacatcaacgatattcgaagtggagaattgagtatgaagtccatcaaccgtctgatggatgcattggatgagcttaagcagaacaagaactatgagaagattaagattgaactgacaacggaagaattaaatgttctggttaatcgtatttatgagtatactattaaacttgccagtgaaaatgcagttgagctaacagatgacgagttgcgctcttctgataataccattcttaatctacagaattatctcaaagcacagaaacgtatattcgaagctgcagcataaaaaaacagcctcactaccggagtgaaatctagtagtggggctgtacatttatgccttgatttcctgaccattcttgaaggtgaaacggatatcgtcggcactgtagatggtggcatattcgacaaggctgttacagctgtcgatgctgaactcttccaaagagtcctgcagctgctggaatgtcttgaggaaggattcgtattcagctctttgtagttgcatctgttgcaggtcgccatgagctagctgttcgagccttgcttttgatttgtcgaattttgccgaaagactgtcgtagcgcttctggtattcggtctggtttaaggcaaccgtagaattttccctgatggcggcttggaccatttcggaaataagctgtgtctcttcgagtagttcatcctgttctttttggatgaatctgattggacagtattgtgtttcaaggacttaaagacgaagaaagttgttggagagaaatactttccagcaactctgtctttaatgaatagagttcatttttttattcaactatccccatgatatatatgatatatacaatatgtaaatgtgcaattcaaatatcagtttatactaaatacaaataataataattactattattgacaaaagaataattatcatgtataatacagatatacaagaaacaaagtgttagaaaaattgctag

SEQ ID NO: 2752 - DNA, 316 bp, Unknown
  gut microbiota DNA sequence
tttgataacaaaaataaatcgacattgaaaagggaaaataactatgaaaaaatatgaatgtgaaccatgtggatatacttatgatccggcagtaggagatccagacgccggtatcgctccagaaactgcatttgaggatattccagatgactggacatgcccaatctgcggattaggaaaagatgttttcgttcctgtagaagactaagcagaaaaggcaggtacgaaactgccatacattaaaagagcctaagagaacatataaaagaaatggaggtcaaattatgacttacgatttaaacattacctttgatga

SEQ ID NO: 2753 - DNA, 2955 bp, Unknown
  gut microbiota DNA sequence
ggtttttggcagggtgaacaaatacatatcaggaggatatacatttatgaaaagaaaaattgtagcagttgtattagcttccacaatggtattcggaatgacagcttgtggctcttcaggagcaggcgattcctcaaacacaggaagtgacgcagcaacagacaacacagcaacagatgacggttcagaagatgcaaacgttacagaaggaagttctgatgatgaaaacacactgaccgtttggacatgggatccgaacttcaacatctatgcgattgaaaaagcagcagagatctatgcaaaagatcatcctggattcaaagtagacgtaagcgagatcaaatccgacgatatcgaaacaagactgacaacagctgtttctgccggagatctgagcacactgcctgacattttcctgatgcaggataactccttccagaaatatgctaccaactatccggatgtcttcacagacctgacagattcaggtatcgacttcagccagttctcatccgcaaaagttgcttactccacactggacggaaagaactacggtatcccgtttgataacggtgctgttatcgaatgcctgcgtaccgatatgctggaagaagctggatacacagtagatgacttcacagacattacatggtctgatttcatggaaaaagcaaaagttgttaaagaaaaaaccggtcagccaatcctgacatctcaggctggttcacctgacctggtaatggaaatgctgcagtcctgtggagagtctctgttcaacgaagacggatctgttaacatcaaagacaacaaagctctgaaaccaatcctggagatctatcagcagatggttgcagacggaacattagtagaagttactgactgggatcagtatatcgcatctatcaacaacggcacaacagctggtgttatcaacggatgctggatcatggcttctatcgtagctaacgatgatcagtctggaaaatgggcaatcacaaatatgccgaaactggatggcgttgacggagctactaactactccaataacggtggttcttcatgggcaatcagctctaactgccagaaacaggatcttgcaattgactttatgaaatccacatttgccggaagtacagatctgtacgatgacatcatctccaaaggagctctggcaacatgggcaccagctggcgatacagatgcatatgctcagcctgtagaattcttcagcaatgaagcagtttatgctaagatcgtagattttgctacaaagactccttccaatatcactggtgcattctactatgatgctcgtgatgctgtaggtgttgcactgtccaatatcatccagagtggtgcagatatggacgatgaaatcgcaaccgcacaggatactgtagaatttaatatgggtggctgattcagctgaacagttaaaaaccaagaagtgaaaaataaataagaagagggtctgcttcgaaaaaagcggagcagaccctctctttctaagaaatctccaaaagaaaggaaggatggatttcatgagcaatcagaagaaaaaaggattgacactggcaaagaaacacaacctgaccggttgggcattcttacttcctgcaaccctgttgattggctggatgagtttttatccgatgattcgggcgttcatcctgtcattacagacaggtatgggtgtaaacctgagctttaatggtttggcgaactacacacgtattttaaaagacccaacatttaaacagacattatttaacacgttcttctacctgatcgttcaggtgccgattatgctggtgctggcgctgatgtttgcatctatgctgaataacaaggatctgagatttaagggcctgttccgtacatgtatcttcttaccatgtgcgacatccctggtttcttatgctatgatcttccgttctttgtttgcaaatgatggtttcattaacatggttctgcgtaatttgggtatgtcaccgatcctgtggtttggtaatgcatggacagcccgtgccgttatcatcatcgcgctggtatggagatggacaggctacaacatggtattctatctgtccggtctgcagaatattgaatattctgtatacgaagcagcaaagattgatggggcaagcccgatgcagtcattcttcaagattacggttccgcttctgaaaccgaccatcctgctgacagccattacatctaccaatggtactctgcagctgttcgatgagtcactgaacctgacaaacggtggtcctggtaaatctactatgacaatgtctcattatatttacaacatctcctttaagcagagcccgaacttcggttatgctgcggcgatgtctatcctgatcctgattatggttgctattctggcaatacttcagatgaaagtaggtgacgaacgataatgggtaaaggtaaaaaattcttcatgtatcttatactgtcaatcgcgtcaattgtttctgtatttccactgtactatatgttctgtgcatctacaaacaagagcgttgacgttatcgccggcaaactgattccgggaacgtatctgattgaaaactacaaagcactgatcgcgaaccagaatttgggactggccctgtggaattccttccgaaatgcaacagtactgactgtcctgtgtctgctgatttgttccatcgccggttatggctttgagatctatcacgacaaaggaaaagacgttgtatttaccatcctgctgactgctatgatgattccttttgcagccatcatgattccgatgttccgtatgttctctactttgaaaatggtaaataccatgacagcgttcatgcttccatccattgcaactccgtttatgatcatgatgttccgtcaggcatctagatccttccctcatgatatcattgaggcagccagaatcgctggtctgagtgaagttggtat

SEQ ID NO: 2754 - DNA, 1446 bp, Unknown
  gut microbiota DNA sequence
gtatcttcttccgtatgttcattcctaccatgaaatccacatacgcggcagctatcatcatcacattcatgggtgcatggaataactatctgtggccaaaggtaattctgcagaataaagatgcgatcaccatgccgatgctggtttctaacctgttaagtggctataccgtagattatggtatgctgatgttaggtgtatttatctgtacaatcccgacagcaattatcttctttgctttccagaagagctttacagaaggtatcacaggtgctgttaaataataaaaaagtagctgtgcatatgctgaatggttatgtataagtaaattaaggcggatatttatagtatatgaatatccgcctgttttttagcaaggattgaaaaataggaggaaaaacagaatgggtactttcaattacgatttggtaaaagatcctacgtattttaacgacaaccgtgtggctgctcattcagaccacaaatattacgcttctgtggaagcgatggaacaggatgtggataacttccgtcacagcctgaatggattgtggaaattccattacgcaaaaaattacaactctacgatcccgggatttgagaaaacagaatattgttgcaaatcatgggatgatatccgtgtaccggctcatattcagatggagggatatgatgtaccgcagtatgcaaatgtacagtacccgtgggaaggaagagaagaagtagaaccgggtcagattccggagagattcaatccggttgcttcttatgtgaaatattttgaagttccggaagagatggaaggcaaaaaagtatttatctctttccagggtgcagaaagtggtatcgctgtatggctgaacggtaactttgtaggatacagtgaagatacctttacaccgtccgaattcgaactgactccttatctgaaagagggagaaaacaaactggcggctcaggtcttcaaatggaccagcagcagctggtgcgaggaccaggatttcttccgtttctcaggtatctaccgtgatgtctatctgtatgcgatcccggaagtccatgtatctgatgtgaagatccagacacttctggacgataccttcaccaaagcggatctggtgatcgataccaaagctaccaaggccggaaaagtaaaaatcaccttatccaaagatggaaaaaaactgcagagtgtagaagagacactggcagaggagtctcagtatgtgatgaaagtggagaatcctgaattgtggtctgcagaatctcctgtattatatgatctgttactggaagtgatggatgagaacggacaggtgacagaagtgatccctcagagagtgggcttccgtcgttttgagatgaaggattccatcatgatgctgaatggtaagagaatcgtctttaaaggtgttaaccgtcacgaattcagttctgtatccggcc

SEQ ID NO: 2755 - DNA, 2159 bp, Unknown
  gut microbiota DNA sequence
caaagacctggtgatcatgaaacagaacaatatcaatgccatccgtacctgtcattatccggatgcggtcggcatctatgaactgtgtgatgaatacggtatctatatgatcgcagagtgtaacatggagagccacggaagctgggatatcagtgcagaacagaccggtgacttcagcaaagtcgtaccatgtgaccgtccggaatggatggatatgatgctggatcgtgttaactctatgtatcagagagataagaaccatcctgcaatcctgatctggtcctgtggtaatgaatcctttggcggaaaagtcatctatgagatgtcacagctgtatcgtaagatggatccgaaccgtctggtacactatgaaggtgtctgccacgatagaagatacaacgataccagtgatatggaaagccagatgtatccgtctgtagaagctatccaggaattcctggaaaaagacagaagtaaaccatttatctgctgcgaatacactcatgcaatgggtaactcctgcggaggtatgcacaaatatacagatctgaccgataccgagccgtcctatcagggtggatttatctgggattatatcgatcagtccatctacaaaaaagaccgttacggaaaagaattccaggcatacggcggtgacttcaatgatcgtccatgtgactacaatttcagcggaaacggtatcgcatacggcggagaaagagacgcatcgccgaagatgcaggatgtgaaatttaactaccagaacatctctgccaaagtggaaaaagaccaggtaaccatcgtcaacaagaacctgtttatcaacactgatacctttgactgcttcgtagtacttgcaaaagatggaaaagaagtaaaagaagttccgatggaaactcatgtagctcctttgagtgaagagaccgtaagtctgccgattccggtacagaatctgccgggtgaatatgcagttactgtatccttccggctgaaagaagataccgtatgggcaaaacgtggtcatgaagtggcattcggacagggtgtctacaaagtagaagcacctgcaaaagctgtaaaacctgcaagatttgaagtgatcagatccggtcatgactttggtgttcgcggtgaaaacttcgatgtgctcttctcttacctgaatggcggtcttgcttcttaccgttacggtggagtggagatgatccagatgatcccaagaccaaacttctggcgtgcaccggttgacaacgataacggaagcctgatgcagatgcgctgcggacagtggaaactggcatccatgtatctgtctcacaaatatccaaccggaggacattatccgggaatgcatatccctgagatcgaagttctggatgacagtgcaaagattacatttacttatgcaatgccaacgactccggcaaccgagtgcaaactgagttatcaggtatatggagacggaagcatccgcaccacactgacttatgatccggtggagggtctgggcgatatgccggaattcggtgttatgttcaagttcgatgcagattacgacaatgtaacctggtacggcatgggaccggaagaaacctatgtggacagatgcgaaggcgcaaaactgggtatctacaggaacaaagtggaagataatatggcaaaatacatggttccgcaggaatgcggaaacaaggttggcgtacgttgggcatctgtaacagaccgtaagggcagaggaatgctgtttaccggtgatgctatggaattctccgcactgccatatacaccacacgagatggaaaatgcgatgcatccatttgagctgccacaggtacactacacggtagtacgtgtatccaaacagcagatgggtattgccggagatgacagctggggtgcaaaaccacttccggaatatctgatcaaaaccgatgaaaagatggaatttacattcacattcaaaggaatctgatgaaaattacaaataaataattaaatgaaaggaagtaacttttcagtagccactatcccgcgagatgtcttgacatgaatatgtcaaaatctcgagacatacaagcaaaaatgccatcaccgaaggtgatttacgcgagcaacgagtcaaagtccgtgcttgcacggaaccttgaggagtgccgcga

SEQ ID NO: 2756 - DNA, 1180 bp, Unknown
  gut microbiota DNA sequence
cggaatcacaccaagtacagtacgtctgtccatcggtacagaaaatatcgatgatatcattgctgatctggagcacggttttgaagcaatcaaataagaaaatttctgattgacatgtgaagttgtcctttgctattataaaaatagataacagggagtagttcacaccgatcaggtgttggatatctcgtcatcacgtcgaaagaccggggtatccactgaaagaagaacgagacttttatcgcatcatttgtgtgcggtgaaagtctcgttctttttctgtatataaaaaagaaacgccgacaaagaaccggatctttccagcgcacacggaaagcaggagggaaagagaatggaaatgattttacagatggtgttgctggcgttgggctttctgatgctggtgaaaggggctgattggtttgtagacggagcgtccgggatcgcagagcggttcgggatcccgcagctggtggtcggactgacgattgtggcgatgggaacgagtatgccggaggcggcggtaagtatcaactcggcgttaaaagggaacgcgggaattacgatcggaaacattgtgggaagcaatattttgaatattctgatcattcttggtattactgcggtaatcacaacggtggcggtacagaaatctacgatatggatcgagattccttatatgatggtaattacagttctgttactggtactggggaaaagcggaaatcagattacattcagcgaaggtgttatcctctgggtggtattcttactttatctgggatatctgttttattgtgcaaaaaagaacaaagaagaagtggtcgcggaggaagcaaaaccgatgtggaaattgctccttgcaacggtactgggactgctgctggtggtctggggcagtgatgttaccgtggatgcggcaacggcaattgcaagggcgctgggaatcagtgagcgtgtgatcggtcttacggtggtggcacttggaacatcccttccggagctgttcacctcggtgtctgcagcacggaagggaaaagcagatattgcgatcggaaatatcgtgggaagcaatattttcaatattttgttcgtggtaggtacggcagcactgattgttccggtggagtttctcccgggatttggcatcgatacggtgatcgcgctgggagccgggctt

SEQ ID NO: 2757 - DNA, 326 bp, Unknown
  gut microbiota DNA sequence
gatcacatggctctgtaccgtgaagagaaaactggagatgtcattgcagttaattatgttcttgaccgtacagaacattatcgcttagaggaaaaagagcgggcactggaaaaatcaaacagagagtatgcgaagcttctggaagaagagaaaaagcatacggctatgatcgaggaattgacaaagaaactgcaaagtcagttggagttgtttaccgtatccattcctggcggcgtcaaaatcagtaatgatgacccggaatactctttcaaatatgtttcagaacaatttgcaaatatgctcggttacgcaacaccaaaggaact

SEQ ID NO: 2758 - DNA, 626 bp, Unknown
  gut microbiota DNA sequence
aaaaaggggaatctgtccgtcctggaacagcccgagatctatacaccggcggcatatgaggaaaaactaaacagcatgcagccgaaatacgcgctgactgccggtctcagcaatcatatggtcacgaaaatggtgaaagctgcgctggaacaactggatctgacacaggattatctgccggaagagatccggctggaatacgaactggcagagtataattttgcagcggtgcagattcattttccatcgaaccaggaacagtatctggaagcgagaaaacggctggcattcgatgaatttttattatttatcctgggtctgaagcagttgaaagaacagacggcggcggataaaaaccactaccggatgaaagaagtctggaagacggaggaagtgatcgagaatctgccgtatcagctgaccggggcacagaagaacgtctggtatgagatcgagcaggatctgcggggcgaaaaactgatgacccgtctggtgcagggagatgtgggaagcggtaagacgatcgtagcgtttctggcgatgatcatgacggcagaaaatggttatcagagtgcaatcatggttccgaccgaggtacttgcaaaacagcattatgaggcgctgac

SEQ ID NO: 2759 - DNA, 878 bp, Unknown
  gut microbiota DNA sequence
ttcattgatcagcgccctgccaatcgcaactctctgtttctgacctcccgatatttccgtaattcctttgtcagctaatttttcaatgccgagcacatccgctattcttgaaaaacgctcttgctggatgtctgctttttttcgttcaagaatgagtggtaacaatatattttcttttaccgtcaaactctccaaaagctggaaatcctgaaaaatcattcccatatgctttctgcgaaaaaatgccttctcttcttccgtaagctgtgaaaacgtttctcctcctattacgatttctccatcgtccggtgtgtcaaccccggtcagcacatggagcagagtagtctttccactgccggatggtcccataatagcaaccatttctcctttcataacttgcagattcacattctgcaaaatccgcatagtttctcctgcagttttataactttttgaaatatgatttgcatttaatacatacatcgaagttcctcctgataataaattttaaatttgattatcagaagtatttaatcatccatccgaaccgatagactgcaaagggtaactcccggtctgaaagaaaactcaccttgtccgaggtctttaaagccatcatatacccagagcaccattatttctattccaccgaaacatatacactcatagaaatgcaaacatatactttcgcttatatcgttttcactatttgacttttccaagcattccatctgctgtatgactatactttccaaatccccttctgcataatatccactccagattcggaaatttagcgacaaaagtaaaatcagcatgatggaacttaaaaccataatagcagcaattctctgtttttttactgaaatcatatgaat

SEQ ID NO: 2760 - DNA, 449 bp, Unknown
  gut microbiota DNA sequence
cctacagtatggatctggaacaggttccggcggggcaagattttgcggagtattttttctttgatcagaaaaaaggatactgtatccattatgcgacgacggcaacgctgatgttccgtctgcttggcgtaccggcgagatatgtgaccggctatgtggtgacaccggaggattttacggaagacggagatggctatacggcgcagataccggatacgcaggcacatgcgtgggtggaagtctaccgtgccggaaaaggctggatcccggtagaagtgacaccgggctatcaggatagcagcgatgcaaatacagatccgggggagaatggcgaagagagtacgccaacaccggagccgactgaggaacagacggaagaggcaacaccggaacttacggaaacaccacagccggagcagggcgggacaacggtaacgccggaaggcgaa

SEQ ID NO: 2761 - DNA, 726 bp, Unknown
  gut microbiota DNA sequence
cagaaactcgtgggaatcgggcgcgttcttctgaagatttttgtggtgctgctgatgcttgccggactggccggcggcagtgctggcatggtggttcttcaaagaaaacgggtattgcaggagcgaaaccgccgctttttccagaaaaatatcaacaggggaatctgtgagatttcctatgcgatctatcagatccttcaggatgcaaaagaagcaggtgtactgcaggaaatcccggatcagaaagatgaccggaaatttgcccgacagacagaaaagaatctaccgtggatggaagagggggcatatacagcgatcgtggaactggcagagcgggcgacgtttgggccggatcggctgacgaagcaggagcgggcgcagtgttatcagttttatgagagtctggagcagcagttctggacacagatgccgaaacagaaaagattctggtggaaatacatgaaagcgtatcaaacttcataaactaggaaaaagacatcgggcagtcggtgaaaatatgaaagaaaaacttcgtatgatcctggcagtggcggggatttttctgttgcttcccctgcttctgacggttttcctgtcgggcagagaggcgttgcgcataaaaaaacaatggaatatggaatcggttctccccatgctgatgtgcagggaaattccctgggagtatgaggaggagatgaaaaaagtacaggctgttcttacaaggag

SEQ ID NO: 2762 - DNA, 1493 bp, Unknown
  gut microbiota DNA sequence
gtgggaaaaactgtggaaggaagcgaaagcagcgcagcgtcagaaggggtatcagcaggcatatcggagtatggaggcagcagtcaaagagaccgagggggagatgcttttttatcagttgaaggtctgcgagggtgtgttccaccggatcagcagcggcgcgacccgtgacggactggaagtgtttggaaagatggagaaagggtatcttctcagtgtggacagcaactgggatatgtatggggacggttatctgagcggtcattatttttcggaagaagcgttgcgggaacagctggaaaaagcgtatcccgggctggtatttacggaggaaccactggaaaaacagataaatatgcataaacgggacaaagtgggacacattttatccttgacggtgggaaataagacgatctcgggggaagaatttcgccagcttctggaactaccgtcgagtaattttacgatgcaggcagcagataggaaaatccgctttttatgcaagggacaggggcacgggctgggactttcgcagtatgggggaaatgtgctggcaagagaagggaaatcgtatcaggagatcctgcggtattattttccggagtgtgaggtgaaaacgaaaaaatcctgagaaaattttgtgtatacttccctcaaagaagggaattctatagataaagaatctggatgagtaactgggactgacggggacggttactggttttgttctttagtatagaatagcagaggtgaagatgatgaaaaaagaaaagacattgcgtatggcagttaccggtgcgctgcttctgaccgtggttgcagcggggatctccatgtaccggacggatacgacaccgaaaaaggaaaacaaagcacagcaggaacaggcgatgcaggaggaagacagcaaagatgtgacgagcaaagatgctgaggcacaggataccggagaattggcaaaaaataccacagaaaatcaggaagcgactccgtcgccgaccatgaatcaggataacccggacaatgcgatccctccaacacaggaaggagaaaatacccaggaaaccacagaatcccaggaatctgccgatacatccgcagccgtacagccggaactgaactttaccgaggacagccagatgctctggccggtcaacggtcaggtggtgatcgattacagcatggatgccaccacatattttccgacactggatcagtacaaatataacgatgccctgatgcttggctgcgaaagcggtgagccggtgcaggcagcagcaaacggtcaggtggtttccatcagcgaagatgtcgagaccggaactactatggtcatggatctcggaaacggctatcaggcaacctacggtcagctgaaagacatcaccgtagaaccgggacagaccgtagagagcggaaccatccttggctacgtcagtgacccgacaaaatattacgtcaaagagggcgccaacctgtatttcgccatgacc

SEQ ID NO: 2763 - DNA, 288 bp, Unknown
  gut microbiota DNA sequence
tcatctatctcgttcctcccggagccttcccacacccttttctggcataaaaaagctcccccagttggactcgaaccaacgacactgcggttaacagccgcatgctctaccgactgagctatggaggattatttcttttttcttatctctcttttttgtttcttttctctctccatgtaccttcaaaactgcacacacgtaacatccacttcctacttcctgcggttgaccgcttccaggtcaaaccctcgaccgattagtaacagtcagctccatacattactgcac

SEQ ID NO: 2764 - DNA, 247 bp, Unknown
  gut microbiota DNA sequence
gtatgatattatttagctagataaattagaatttaaggaggtcatatgagttttacgatgttattgcttctcacatacatagtaatgggtgtgggaagttttatcgcttttaagcgaaagcacaaagcaattggtatagcattgctgcttgtaatagtgcttagtgtcttgattttgggatacatgtggattcattcgccaatgtaacaatcggaatttgtgtgtggaggtgatggttgtgaagaaa

SEQ ID NO: 2765 - DNA, 2739 bp, Unknown
  gut microbiota DNA sequence
ccaacagttaaggaagccgtgatatatcttttagaaagtaatcacttccggttcatgcgtgaatgcagaaatcgttgcagttgcattcttaaaataaaaaacttctgtattcccatcatctgcggcatacattttctgcagactcggatatgcgtccagcatagactgtctagcttccacacgatcatcctctaccagttcaccagccacacggatccattcaccgcccttaaaagcacagatttcagctttcggattggcatgtaactgtttcgagacatctttcacttttccggtctggatatacagcttgccctcaaaaatatgagccgttccaaaaggacgaactctcggttgatcaccctctaccgttgccagataatatgtctctgcgtcttttaaaaattgtaatactttctccatgattatgccctcttctgtgttggtgcgttgtgagataagtatagcactggaaagacagatgtgcaaatttttatgtattcatatccacctttcatcttgcattcgttccatcaatttcttttattttcctgtggattttttcataaaatcatgtataatcaaatcgacacatattttggtcgacaagaccatacattaaaacactttgaccgacgaggtttctctggttttccagagtggggaatggttaacgccatcccctttaaatgtctaattaatttttcttctgattctcaggaataaatttctccagctccccatacttttcctcattatcccatagcagccatctcttaaatgccgtaaacgcagaactgtctttcagttccctcttcagaagcatctcaatatcttccttttcttcttcattctctgcttcctgatactctcttacatattctttgaactttgaaagatcttttcgcaacgttctgcgtataatccttgcttccattttcttctgaggagttgttccatagtaggcatcatttaatagcaaaatcgtatttctgattgcctcattatcatccttcaccgccgaaaactccagtttttcatccgttccaaaataacctgttttccgaaaagcaatcaggtgttctacaggctctgttgtacagttcaatattggttcgtatttgtctgacttaatattattgcaatgtgcacacacccaaaacagattattccaatcatatttcaatttcctatcgctccggtgcggaatcagatgctcgatttgataggatgttgcctctttgttttcgcaaatataacatttcccatggaatacttcccgtaacgcctgattcacatgttccgtattatacgaacgccctgtattacatgcttcctgcaaatcatccattgcctcttgtgtatgcgaagttgctttcctctcaatcttaatcatttgtttcccttcttcgttcgatatcttcaaacttttctctggcagctcctgacagatctgttgataaatttttgaattttatttttaattctgcccgttcagccctctcttcttctgtcagttcttttccagaacacaactgtgcatatcgctccagttcctcttttaacgtatccgaatattcatctgcctcaaagtagccttccgcaagttcatccgatgaaaaagcagccagattttccaattccacatgcttttccagatcatatgctttcgcattggaaatagaattcaaaatatatggcgaatgtgttgttacgataaattgaatattcgggaaaaattctgttaagaatggcaggatttttttctgtaattcaatatgaagatgcgtttccagttcatcaatcagaacaattccctgtgcattatactgactgatttcttcatccaataaccagtttttatccattcgaagaatcaaatcggatacaatatagattacagatgaatagccatctgacagttcactgaattcaaaaggctcccggccttcctgtctgattttaaaattataatttttataatcatattccagatgaatcgatttttcgtctagcaaaacctgcagcgcagattcaaatctgtcaaaccattgttgaatcctctctacgatttcctggtcgccttcgtttcttgcaaaagattgctgtgtcttcatgtgaaccatatacttaagaagaacatttccggcgttctctgtggtgtcatatacttcagacagttttatattttccacgccattcggtttcgcaaattctgctttccgttctgccgggaaatacgcagttataaattctcctttttgatacgcactttcaagtccatcataattattccacgaaactctgacgccatcgctatacttacgaatcagatccgaccattgtctgtaatcctgttctgctttaaatcgttcattctcacttgaagcatgttccatctcctgtttcgcatcttcttctaattgtggccatgttcccgttaatcgaataagatgtccatctttaagtactttcagatatcttactaatcttaacagtaacgatgtctttcctgaaccattttttccggtcagcaacagatgctggcgttttgttgtatttaactctattgttatattcgataagtgatacaacttgtctatataaatttcatttataaaatattctttcactatgaatcctccggtttccggttattctgtttaactattcattatattatcatgtacggaagatattttcaatttttctcgatatgctccctaacgcacgatgact

SEQ ID NO: 2766 - DNA, 246 bp, Unknown
  gut microbiota DNA sequence
tgtgagttatccggagataaattggtaacaaaaggtacctatgccaagatggctcgtggtgaaatggtcagattcatagcagaaaataatattgaaaatccggtggaaattcagaaatttgacagaattggatattcttttagatctgatttatcatcagattcaaaatatgtatttgaacgcaaaataaaatagttattcaggtaaaagatgctcagtttggtagcttttataataatgagaatt

SEQ ID NO: 2767 - DNA, 1323 bp, Unknown
  gut microbiota DNA sequence
catcttttctttcagtacatcgatcacccagatcatagcaagcacaagtgccagtgtaaacataatattgttccagttgatttcaacaaatctagccgatgtgcacatatcaaacggaacctctgatatcactccaaatacaagaagtgtaactaaatatctccatttagtgcttgtgtggaaatatccttccacaagaaggaagataaatatcgggaaagcgattcttcctaaaatatcaaaaaaatcactcaatcgattcaatgctcctccatccagatttggatagatcaatgccttattcgtatggtcaatgaacatcgataaaaaagcgatatatttcaattgcgctcctgagaatatcttgattcgttcttttatattgttcataagtttttcttttcagacatctttcttaattctattctagtaattttctgcgtgaagctcaaagtagctctgtggatgcgcgcataccggacagacttccggggctttcgttccaactacaatatgtccacagttgcggcattcccataccttcacttcgctcttctcaaacacctgcgcagtttcaatgttcttaagaagtgcacgatatctctcctcatggtgcttttcaatttctcctactgctctaaattttgctgcaagctcagggaaaccttcttcctctgctgttttagcaaagccatcatacatatctgtccactcgtagttctctccttctacagcagcagctaagttttcttttgtatcaccaattcctgctaattccttgaaccacatcttagcatgctctttctcattgtctgctgtttttaaaaataatgctgacatctgctcgtagccttcctttttcgctacggatgcaaaataagtatacttatttcttgcctgtgattctcctgcaaatgcctcctgtaaatttttttctgtctgtgttcctgtgtacttgttagcagccatctcttttacctccgttttctttactactatttcaaaatctcatgccatcatttgccgtaacgtgtcttctcatttcgtatacggtatttcttacaagatctttttgaatggtatttcttctacttgtcattcgtcctccttattaggattagttcttaataaggattatatacaactattatcctgttttcaaaaatagtaataattatcattattataaaaactgccaaactgaacatcttttacctgaataactattttatttcgcgttcatatacatattctgaatctgaagataaatcagacctaaacgaatatccgagtctgtcaaatttctgaatctccaccggattt

SEQ ID NO: 2768 - DNA, 459 bp, Unknown
  gut microbiota DNA sequence
attcggttgccgtagcccgctacgccgccctcattcggataaaatctcccacaaactgggactcgcagctcacgaaaagcttttttcagacacgttctaggcagattccgaagaattcgtttctttcagcaaacagtttttcaggatcagtgacggaaagagaatagaataaaagacaggaaagagagggaaaagcatgaaaatttactatcagcatccacagacctggtttggcgattgtatgccttttggaaagggtgatactttttacctgtttcatcagagagataccagagtgccgtgcccttttggagagccgtttggctgggatctggcaaccacaaaggattttgtgacttatgaggattgcggtgtggcaattccgagaggaacggatgaagagcaggatcagtttatctttgccggaagtatctgcgaagacagagaaggaaaatatca

SEQ ID NO: 2769 - DNA, 2529 bp, Unknown
  gut microbiota DNA sequence
ctgcagatatgcctctttgacatctgcaagcccgtcaaaatcagaaatatccatcaacatatcagaatcaaggaaattggagtagtttacatcaccaccgattccgataatatccggataatcctcacgaataaatctggttttcagaatggtcatggcgtcgttcggggaatcgatcaccagttcaatattgtcgtgtgtctcattgaatttcttttccagctcttcaaatacatctacggcttccggtttgtactgaacaacttcaatctttacttttccgtttgcttcctcttttccacatccggaaagcatggttccagctgccatcacaccagccattccaagacagagcgctgcttttccacgtcttttcattttccataattcctttccttattgatcttataaaccgttttgaattctagttagttttgtcaggttttgcaacatgtttacaaaaacaccaatattttatacaatatttctatatattttttgtgtattatgtccaagaaacatttttaacattctttctttttcacgtataaatttttgatttttgtatagaatgttgataacagcgtactttttttgcgtcctccgtagttttcccggtaatttccagcttaatttactgaaaatagtttcattttgttcgattcagatacatatttattgatttttttaatagatagcttataataaaagcagtatcattattgttacttattaaatttatgtgaaaggagcttttatgcagacactaacccgcaaagaagagcagattatgcaggctgtatggcagatcggtcatccctgtctgatctcagagattctgaaaaaggataccacgctcaaaagaaacaccgtagcacccggtatcatcacgcttaccaaaaaaggatatctgaaagtagattccatcggaaaatccatgacccgtaccggaagagcgtatgcaccgattgttacccagcatgcttatgatgaacagcagaaactgattcagtgtgtcgtagacagtcagacaacgaaagacggaattctgaattatattcagttactgatcgacacgaaccaggcagacgatgccttcagagctaatttaaaagaaaagattgagaaatagcagtatttgagattttatgaatgaagaaataaacaataaaccaaaaagaaccgatgatttctgacgatgccttttatctgaaaagcatagaagaaatcatcggttcttttttactctatctgtttttagtgatggaacagacggataccggtaaatgccattaccatgttgtatttatcacagcattcgatcaccagatcatcgcggacagatccgcccggctgtgcaatgtaggtaacaccgctcttgtgcgcgcgctcaatgttatctgcaaacgggaagaatgcatcggatcccagtgtaacatctgtcagctgatccagccatgcacgtttttcttctcttgtaaatactgccggtttctcggtaaaggatctctcccagttaccgtcaccaatgacatccatgtattcctcacccatatatacatcaatcgcattatctcgttctgcacgggtgataccctccttgaatggaaggttcagtacctgcggactctgacgcagccaccagttgtctgctttctgtcctgccagacgggtacagtgtacacgggactgctgtcctgcacctacaccgattgcctgtccgtcttttacgaaacatacggagttggactgagtatatttgaggatgatcagagaaatcttcatatctctcttggcttcttctgtcagttctttgtttttggtcaccagattggagatcagctcatcatcgattgccagttcctgtctgccctgttcgaaggtaacaccgaacacttctttatgttccagcggagccggtacataatccggatcgatctggatcacgttataatttccttttttcttctgtgccagaatctcgagtgcttccggtgtatatcccggtgcgatcacgccatcggatacctctctcttgatcagcatcgcggtatctttgtcacacacatctgacagagaaataaaatctccgaaagaagacatacggtccgcgcctcttgctctcgcataagcacaagcaatcggagagaagtttttccagtccatatcgtctacccagtagatttttgccaatgtctcgcttaacggaagacctactgctgcacctgccggagatacatgtttgaaagaagttgctgccggaagtccggttacctgtttcaggttggataccagctgccatccgttaaaagcatccaggaagttgatatatccaggttttccggaaagcactttgattggaagctctgatccgtcgttcatgtagattctggaaggtttctgatttgggttacatccatactttaactgtaattctttcattttgcttctccctctcctatttgtttttatttacgattcttgtctcataagtaccatctgcaatattgatatagcgtacaaacagag

SEQ ID NO: 2770 - DNA, 215 bp, Unknown
  gut microbiota DNA sequence
gaggcagataaagaagattttatctgggcaggaacttttgtcgcacatgaactgtatcagagaaaagacggcactttagggtgccggatcccggatacggtatggaatgcgtttcaggatgagaaaaagctggaggatgtaaaactggaaaaagaatcaggaagagcattacggcatgtagtaacggagaccggtgactgctatcgatacgaagc

SEQ ID NO: 2771 - DNA, 239 bp, Unknown
  gut microbiota DNA sequence
gtcatctccagttctccgttgtataccggatcgtgatatccctcgatacagatatcgtcctcatatccgttgcttcttaagatagaaataatatctctccagtttgtgtcgccaaatcccggcatacggtgccatacaaaaggaactgctccggagattccgccgtgtcttactgcatcccagtcgatggtcgcatcttttccatgtacatggacgatctttttgcaccattttctcag

SEQ ID NO: 2772 - DNA, 418 bp, Unknown
  gut microbiota DNA sequence
agagtagataaccggatggcggcggtctgcgtgacttccggtccgggagcgacgaatgccattaccggagccttgtgtgcgtggatggattccatcccgatgcttgtcctgtccggacaggtgcgatacgataccacggtgcgtcacagcggcttaaagatccgcacgatgggtgtgcaggaatatgatatcacgccgtccgtagaaccgatgacaaaatacgctgtcatggtgacagatccgcttacgatccggtatcatctggagcgggcgatctacctggcaaaaacgggccgtccgggaccgtgctggctggatcttccgttgaatgtacagagtgcggtcgtggaaaccgatgatctgaaagcgtatgatccgagcgaggatgcaaaagaacttccggctccggtaagcgagg

SEQ ID NO: 2773 - DNA, 601 bp, Unknown
  gut microbiota DNA sequence
atggattcccgagtggccaaaggggacagactgtaaatctgctgcaaattgcttcggtggttcgaatccacctccatccagttggataaaggtagttcagagttaaaattgttgaaatgatagcaaaaaggctcgaattcacctccatccattatcactttaagtgatgttaattctatcgcgggatggagcagtctggaagctcgtcgggctcataacccgaaggtcgcaggttcaaatcctgctcccgcaatttcgcccagatagctcagttggtagagcagaggactgaaaatcctcgtgtcactggttcgattccggttctgggcatatggggtattagctcagttggtagagcacttgacttttaatcaagttgtccggggttcgaatccccgatgcctcattaaatagccgctttcatggaatgtgaaagcggttttttgttgcattggaattagattttattatgaatataaaaagaagtagaatgatatatcattctacttctttttgttatgtaaataatgaatgaagggttaaatttatgtgatattttagaaatacctagagcgtgtttgaaaaatcattcctgcaatct

SEQ ID NO: 2774 - DNA, 729 bp, Unknown
  gut microbiota DNA sequence
ggtacatttaagttcgcaagatattataacaaatgtcagacctgatttccagtagagaaagtaaaatggaaggaaaaggttgaggaaaaaatgaggctttgttataataaaaaacaggtgtaaactccgaaagatcgggagaagaccggaattacagtgggtatgactactttttataaagaataagaaagaaacgaggagagaaaaatgaacagaatcggaattatcggagcaatggagcttgaagtagaagaactgaaaagccagatggaagaggttaccgtaaaagaaaaagcttccatggaattttatcagggtacattaaacggaaaagaagttgtcgtagtacgttccggaatcggtaaggtaaatgcagctgtctgcacacagatcctggtggatgattttcaggtagaagcggtgatcaataccggaatcgccggatccctgaaggcagagatcaacattggagatatcgttgtgtctaccgatgccctgcagcatgatatggatgccagagaattcggctatccaaagggccagattccacagatgaatgtattttcttttaaagcagatgagacactccgtaaagtagcggcagaatgctgtaagaaagcgaacccggatattcaggtgtttgaaggaagagtggtcagcggtgaccagtttgtggcaagcagtgaagtgaaggatgaactgatccgtgaatttgcaggaagctgtacc

SEQ ID NO: 2775 - DNA, 593 bp, Unknown
  gut microbiota DNA sequence
agagcagttcctacctggggtgtattcttaaatgaagaagaacagggcggcggtccgctgatcgatatcggaacccatgcgctggatctgactttatggatgatggataactatgaagtagagtctgtaacaggacagaccttccgcaaactggctgaccagaccaatcagggaaatgactttggagactgggatccgaaggaattcagtgtagaagattccgctttcggattcatccgtatgaaaaacggtgcagtgatcgagctggaagcagcctgggcactgaacacactggaagttgatgaggccaagacaagtctgtgcggaacaaaagccggagcagatatgaaagacggcctgcggatcaactacatccaccacaataaacaggtagtagagaaaccggcattattcggcgaaggagtagcattcttctcaggagaagagaaagaagcaccggactatgagcaggaactgttctaccacatcgttgcagacggagcagaacagatcgtaaaacctgcacaggctgcagttgtcacccgtgtactggaagcaatctatgagtcagcaaagagcggtaagacaattta

SEQ ID NO: 2776 - DNA, 389 bp, Unknown
  gut microbiota DNA sequence
cataataagtcattttatgagttcggttttgatgaagagtctgatggaacaagaagattattcgatttgatggatatgcttttgaataaacgggaagatgttctttatgttgtagatgaattggagcgaagcttacatccaaaactgacagaaagatttttgcaattatttatgcagttacatgatgagcagcgaatgcaattattgtttaccacacatgaatcatctattatggatcaggctatttttagaagggatgaaatctggtttgtagaacgtaacgcagaaaatgcaagctctatttattcattagatcgtttcaaggagaggtatgataaagtgttgagcaaggcatatctggaaggaagatatggtgcgataccggtatt

SEQ ID NO: 2777 - DNA, 586 bp, Unknown
  gut microbiota DNA sequence
caaaaagttaattgatatacgaaaagaattaaatattcatccgttgattgatatccgtttgcttgaaaaaacagagggagacagagatatttcatttccaagacgtttgattaaatttgcggaagaccagaaagaaaatccggaaatagcatttgataaagaacgagataagatgatcattgtttttgatggagatatttttgaagagaaggtgcttgattatgatgaattagtagcagaaggtgaaaagaacaacatattagcggttagcaatccggcatttgaactgttcttgttgttacattatgaaaattcatatgaagatgatattgagccaaatgcagagcagattatccagaacgaaaaagatggacatcagacgtttatctataagttgttacttgccagaacaggaatcaatccgaagaagaattctgcaattggagagttggcagagaaagtagagattgctattgagcaggaaaagaaaatcaatgaagatattcatcagtgtaaaggacagattacttgtaatataggtcggataattgatgaaattcggaaagatgatgggaagtaagctact

SEQ ID NO: 2778 - DNA, 182 bp, Unknown
  gut microbiota DNA sequence
tgtaacccgatccagtacgcagagcacagaaagacactggaaaaggtgatctgcactgctgaaaaattcggagctacccacgtaagcacctttgcaggagcctgggaaggaaaaccggtagaatccgcatacgaagagttcggaaaagtgttccgtgaactggcagaccttgcagaagaaaa

SEQ ID NO: 2779 - DNA, 188 bp, Unknown
  gut microbiota DNA sequence
acacgatccttcgggcattcaaatgtaaaggaatagaattcatcatccgcttcctgagcccgtactccgattgaaaatccacgggtaccctcagtaaatgtgacatctgcttcgtatcgatagcagtcaccggtctccgttactacatgccgtaatgctcttcctgattctttttccagttttacatc

SEQ ID NO: 2780 - DNA, 286 bp, Unknown
  gut microbiota DNA sequence
atctgatgtaaaataaacggttcttcctgttgttttatgcttgtctccttccagacgtgcccccaggatcagaatatatttttcagattcgtcatcccacagtacaaacggatctctccagtcatccggatcatatcccggctgcggaacaaaggtcactgcatcctgcgtctttgtccagtgtttcagatcctcactgaccgcatgcatcagtacctgagatggttttccctgttttggataatctctgttgtaaccggtgtagaatgcatgatattttccttct

SEQ ID NO: 2781 - DNA, 161 bp, Unknown
  gut microbiota DNA sequence
ctgatcgaatacggaccggcaaaacagatcatggacaatccggcacatccttacaccgaacttctgatgagttccgtaccccgtgtcggagacaaatgggagaaagagattgccatgccggatatggaaggaaaagaatatgcagtggaatactgtaagtt

SEQ ID NO: 2782 - DNA, 179 bp, Unknown
  gut microbiota DNA sequence
ccccaggtaggaactgctcttcttctgagtgcatgggcttttgcaaagtagatctctcccagttcgtcagccttgcacatttctttcagatacagggaatctggacggtaacggttctggtatccgatgttcaggattctgcctgttttctctgaagtctccaccatcttctgtgcttc

SEQ ID NO: 2783 - DNA, 239 bp, Unknown
  gut microbiota DNA sequence
ctgagaaaatggtgcaaaaagatcgtccatgtacatggaaaagatgcgaccatcgactgggatgcagtaagacacggcggtatctccggagcagttccattcgtatggcaccgtatgcctggatttggtgacacaaactggagagatatcatttctattttaagaagcaacggatatgaggacgatatctgtatcgagggatatcacgatccggtatacaacggagaactggagatgac

SEQ ID NO: 2784 - DNA, 13414 bp, Unknown
  gut microbiota DNA sequence
atgaaaaattcccttctttaacgtattctcacttacctatcatgcaccgattcagccagttgtgtcaatgcctgctttaaaatttctcgtgggcatgcaatatttatacgctcaaatccctctccgtccggtccaaacattgctccgctgtcaagccagagttttgctttgttctccaccagatcttttaactgctcttctttcatgccgagactcttaaaatccaaccataaaagataagtcccttccggctctgtcagtttgatctccggaagattctcttttaaaaatgtacggacataatccagatttccctccagataaattttcaattcttttaaccactcttcaccggtctcataagctgcctgacatgcaaccagtcccatcagattcacctggctgtaaccggctgctgtcacttccgcccggaatctcgcacgaagctccggattcgagatccatatattggaaatctgaagtccggcaatgttaaatgtcttacttggtgcggtacacgttgtagtgattgcagcgtatttttcatctaaagatgcaaatacatgatgtatattctctccatatgtaaaatcactgtggatctcatcactgactaccagcacgttatgtttcagacaaatgtctcctatcttacgaagttcccactccttccacacacgtccgaccggattgtgcggactgcacatcaggaataattttacattttcttcgacaatcttctgctcgaattcttcgaaattaatttcgtaatgtccgtctatctgctgaagcggactattgatcagccttctgtggttatctgtgatcacttcgctgaacggatagtaaaccggctgctgcagaagaactgcatcaccttcttttgtgtaagccttcactgccatcgcaagtgcgaacaccacgcccggtgtcttgatcagccattctttttctactttccatccgaaatgcttctcataccatccggctgctgcctggaagtaatcatcttttccttcgctgtatccgtagattccgtgtgcgactgcgtcacttaagcttttctggattcccggtgctgtctgaaaatccatatctgccacccagagcggaagcatatcatcacttctccctctttcttttgcgaaatcatatttcaggcattttgttccatgtctgtccactactttatcaaaatcgaacttcatctgtgcatcctcctacgcaagtgcctgctcaagatctgcgattagatcatctgcattttcaattccaactgacaatcttaagaaatcttctgtgattccaagcttctctcttacttctaccggcagatctccatgtgtctgaagcatcgggtaagtgatcagtgactctacgcctccgagactttctgcataagcgatcagtttcactctttccaggagtttccttgctgttgcttcactatctactttgaaagaaatcatacttccgaatccgcttgcctgtgatgcatttacttcatatcccggatgctctttcagacctacataatagacctgttttacttttttatgtccttttaaccagttcgcaatcttcatcgcattatcctgctgtgctcttaatctcacagacaatgtcttaattccacgcaaaatcagatagctgtcaaatggtgcaagacagcttccgactgtcttatatatataacggatcttcttcgctgtctcttcatccgccgaacacaggaatcctgccagtgtgtcattatgtccaccaaggaattttgtcccgctgtggataaccaaatctgctcccagttcaatcggtctttgaaataatggtgaaagaaatgtattgtcaacaataatcttcagattatgtttatctgcgatttctttcatctttctgagatctgtgacacgcatggtcggattacttggtgtctcgatataaagtgcttttgtattctctcggatacctgcttctacaagatctgcatctgcagtatctacataagagaactccaatcctctcttcccgccgacagactcaaacattcttacagaaccaccatacaaatcatctgtacaaagaatatgatctccgcggtcaaataactccatgcaaagacctaccgcagccataccatttgcgcatgctacagtatctaccgcaccttccagtgccgacatcgtatgctcaagctctgttcttgtcggattactctctctcgtatagtcatatccggtagactgtccaataccaggatgggcaaatgtcgctgcctggtagatcggtactgctaccgaaccgtaagaatgtgtcttttcatctgttccgtttccatgtatacatcgtgtctcaaatccgtaattcattatttatttacctctttcattgtaatcatccaggaaattatattccatgtcatctttgtggtatccgataatcgttcttaagttgacattatgcacactccggaaaatattcttttcgataatatctccctgttttctgaattccttgatcagctccttcatctcgtcacgtttggaacctcttccgccgccacaggatacacagttctctgtgaatctgcatgcacactggatgaaattgagctgattgtaatccctccatgctataatatcatcttccttgatcagatacattggcctgatcagctccataccctcgaaattctggctatggagcttcggcatcatcgtctccacctttccgccgtagaacatccccataagaatcgtctcaatcacatcgtcgaaatgatgtccgagtgcaatcttattacatcccagttcttttgcatgagagtatagataacctcttctcattctcgcgcaaaggtaacatggattcttgtcaatatctgctactgtatcaaatatctgcgtctcaaataccgtaagagggattccaagtactttggcattatcctgaatgatcttccagttatcttcattgtatcccggattcattaccagaaatactaattcaaaattcgctttgccatgttttaacaattcctgaaaaagctttgccatcagcatggaatcttttccaccggaaatacagactgcaatcttatctccgtcctggatcagatcgtattctctgattcctttcgtgaactttctccagattcccttgcggaatttcttgatgatactgcgttcaatctctttctgcttctctccggtagtattttcatcctgcacgaactcacttagtttctttctcaaaaaagaacggtatccgccttcaatattcgccgcatcgtatccggctgcttccagttcataaacagcatcgacactccattcaccggtatggcataatacatacaccggcttttctttcggaagttcttccatacgttcttctacttctgcaagcgggatgctgaccgctcccggtacagagcctctggtatatgcatctgcaggacggacgtccagcactgtgattgtatcctgatctaattgtaataactcttctatcgtgattgtcttcatatcttttaacctctctttgtgaattgctgttcatgtaacagctattcctattaaccagataggttttgttatttatctggtattatatgacgtttttccctgtctgtcaaggaactgaaatgtgttttaaaaacatttatctttcaaatatacgctagaaaagtttaccacaaaaaagaatactgtaccagtggtttcccgctaatacagtatgttttgttgttttctccggacgttcactccgcgcccattcgtaaaaccgcaccttcggtgctttccgctgcttctcagctactttttactcataaacgggcgctccctccaagcgttagaaagacctgcaatccttgtgcaagcacaaattgcaagtctttcaacgcttgtgtgaactgatgttatatataatacatatcctgtccataatcaatgtattcctgatactctttctccagatcatgcaaggttactgactggaggatctcggtcacactgtcatttaccctgtcgatcaccagcttctggattgcattgacactccctgtatattttccttctttcggaagttcctcatcttcgatgcggtagtcaccttccaaagcttctataatagaagaaacggtaatctcctgtggcggacggcttaagaaatagccgccctgggagccttttatactctttacgattcctgcttttctaagacttgcaaatacctgttccagatactgtggagatatcttattccgctctgcaatgctattgagcgccacctgttcagtttttgaattgatggtcaggtcgatcaacgctctcagaccatatctgcttttcattgaaagtttcatatatatctccacactccttcattattttttattctacggctttgaatgcctcatccagatcctggataatgtcatcaatgtgctctgttccgattgacagacggattgtattaggcttgattccctgatccagtaattcttcttctgtgcactggctgtgtgttgttgttgccggatggataaccagagattttacatctgcaacgttagcaagcagtgagaagagttccagattatcgatgaaatcttttgctttctgtgcatcacctttgatctcaaatgtgaagatagatcctcctccatttgggaaatatttcttatataattcctgctgctttggatcatcagatacagccggatgatttactttttctacctgtggatggttgttcaggtatttcactactttcagtgcattctcaacgtgacgctctacacgtaatgataatgtctcgagtccctgtaagaagatgaaagaatgaactggtgaaattgttgctcctgtatctcttaaaaggatggcacggatcttagtaacaaatgctgcaggtcctactgctttcgtaaagctgattccgtggtagcttgggtttggttctgtaagagaagcgaattttccggatgcttcccagtcgaatttaccactgtcaacgatgacaccaccgatagttgttccgtgtccaccgatgaattttgttgcagagtgaacaacgatgtctgcaccgtactcgattggtcttacaagataaggtgttgcaaatgtattatctacaacgagtggtattttatgcgcatgagcgatgtttgcaatcttttcgatatctacaacatctgagtttggatttcccagtgtctcaatgtagagtgcctttgtgttatcctgaattgctgcttctacttcatcatagttaaagatatcaacaaacgttgttgtgattccatactgtggaagtgtgtgctctaacaagttgaatgatccaccgtaaatattcttagctgctacgatatgatctccgttctgtgcgagattctcgatcgtgtatgttactgctgctgctccggatgctactgccagtgctgcaactccgccctccagtgctgcaatacgtttttcgaaaatgtcttctgtagggtttgtaagacgtccgtaaatgttacctgcatctgccagtccaaaacgtgctgctgcatgatcactgttgcggaatacataagaagatgtctgatagatcggcactgctcttgcatctgtaaccggatccggactttcctgtcctacgtgtaactgtaatgtttcaaattttaactctctattctctcttgtgattttttcgctcattgggttgatctcctttttcttcataattttatcgttatttgttgatactgtccgttctgtcttggattctatatctttttattctgtaaataatggtgttgaataatatctgtcacctgaatccggaagtaatgctacgattgtcttacctttgttctccggacgttttgcaagtgcgatagctcctgcaagtgcagctcctgatgaaatacctaccagaactccttctttcttagcaagaagttttgctgtctcaaatgcttcgtctgcttctgctttgtagatttcatcataaatctttgtatccagtgtctccggaacgaatccggctccgattccctgaatcttatgcgggcctgcttttccttctgaaagtaccggtgaggaagccggctccaaagctacgatctgaacttccggtttctgctcttttaagtaagcaccgattccggaaagtgttccgcctgttccgacacctgcgatcacgatatcgactgctccgtctgtgtcattccagatctcaggacctgttgtcttcttatgtgctgccggattagcaggatttacaaactgtccaggaacgaagctgtttggaatctcttttgcaagctcatctgcttttgcgatagctcccttcattccttttgctccttcggtaagtacgatctctgcaccgtaagctttcaggatgtttcttctttccacactcatcgtctccggcatcgtaagaatgattctgtatccttttgctgctgcaatagatgcaagaccgattcctgtattaccggatgttggttcgatgattacagaaccttcttttaagattcctttttcttccgcatcttcgatcattgcttttgcaattctgtctttgacgcttcctgccggattgaggtactcaagctttacaagaagtgttgcttccaaaccaagttctttttctatgtttactacttccaccagtggtgtatttccgatcagtcctaatgttcctttataaatctttgacattttgcttcctacctttcctactttttcggtatgttttcttgatgaatttactatactaccttaattcctatttgtcaactatgtttagtatgtttttgtaatttttatttttcatgcgcacaagcgcaacaacatcgcattcgtccccacattcgcttttcttttgtcattatcctgcacgctcctttccgctctttaaactaaataaaaccaatccttatatttcctattgtttcgataggttttatagattggttttattatattaccgctatgtcatatttgtcaagtatgttttttcagtttttcacacactctctacttcctgtaacttaggtattcagcgaacatatcttcaaatgtttttctctttgcctttgatacagacaagatttcattattatccatcttgatttctgactttttcacttctgtaatataccttgggtttacaagaaaacttttatggattctacaaaaatattctcttcttaattcttcttctatttcctggattctttttcttgttcttaatattttgccggtaccattctgcaatatatgtatttcacatcctcgtctgataattgaaaaatacaggatttcatctatatctattttctgatacataccatcatcttccacaataaagtattttttccctttatgttcttttgtatatgttagtattgttccaagttctctttgaatttctgacggattactttgttttaataaatatctgtatggctgcacacagaagctttctggtgtaggcaggtatatgccacttacaaatacaagaattaaatctttatttttcttcttcattatttcagatgctttattcccggaaattcccggtaactgaatatctaaaaaaagtaaatccagatcattttcttcatcctgtattaatgtttcacctgtcgaatactcatatataaagctttcactatcttctcttcggatagcttctgcaagcaatgtccggaagtttttatcatcatcacaaattcctatttttatcactctatgttcctcttcactgcataatcaaccttatatttttaccactttatcacataactccgcaatttcccaatcgtggctaataattatgataattttatcttgtttaatatcttgcaaatagtccataaccctttctttactcataacatctaacgctgacgtaggctcgtctaacaaaagaatatctgcagttttaataaacaaacgtatcaatgcaattttttgtctttctccacctgaaaattcacttttaccatcaatgatttttctttcttccttcatcattgtataatcctaataatatatccagcaatgtcgttttaccagatccattttatcattatttttcctttactttattacttaaacattccatataaccatttaaagaaaagatacagatacaaacacaatgaaaagcttactatcattgtttccatatctatttttctagaaatcaatcttccaatcaaatttccattttcctgataaaaggtcactccatttccataatctgcaccaatttcttctataagcaactgcagcattctatttttacaatttgttatttttttgaactttatcgttgcaaatttatcgttttcaaaatcacttaccgaaatttccttttgtctcagattttgctttgtctttttgtctaatattgtaatttttatttttatattagtgcagtctccgacattctgtgttttaacctgtattccatccaacgatttttcagtagaatatacatcctgcgtaagttttttttcacatataacgccagtatttgcatatttacccacatctactgttctattgtaaaagtattccttcttgtcaacatgcgcatataaatatgcaaatatcatacacacaataagcacgataatagttcctttatattttctcatattcttcacatacttcccttgtatttccatacattctcacttttccatgatccaaccacacaattttattacagattttcttcacctgttcaatactgtgtgacacaaataaaaccgttgtcccactttcctgcattttctttattcgatcttcacattttttctggaatctaaaatccccaacagacagtacctcatctacaatcaaaatatctggtattccaattgttgcgatagcaaatgctaatcttgataacatacccgaagaataattttttactggaacattcataaaattttctaattctgaaaattcaacgatatctctatagtttttcttcatctcactttgagaatacccaagtagtgctccgttcaaataaacattttcttcccctgtcaggtcaccatcaaaccctgctccaagttcaattaacggcgcaatctttccttttacttttactgttccctgcgtcggcctcagtatccctgcaatgatcttcaatatcgtgcttttcccacttccattcagtcctataagtcctagcgtatcaccctttttcacttcaaaactgacattcttcaatgcccagaaggaatgatacgtaatttgctgctttatcatctttataatatattctttgaaactgtcatatttttcggatgacatattgaattttattgatacatcttttacttcaacaaccgtctctttcatattcactcctacttatttgctatatatccataataaatttatcctgtctctttccaaaaacataaattcctattcccagcataataaatgtttccaacacaccaactccaagaatttttatcgaaatattttcttcatacaatacacattcacggaaaataattaaaaagtgtgtcagaggattcaacataacaatcttttgaacccgttccggtaaaaaggacatggtataaataatcggacacaaatacataagcgcagtcaaaaaaacggaatacaaatgcatcatatctctaaacttaactgcgatagctgataataccagtcccactcccgttgaaaataatgttaataaaatcaatgctacaactccttcgtaaagtctatagctcagatcaattcttaaaaccagcataacgcaaaacaaagcacttagcgtcgccataagattaatcatacttgaacatatcctcgcaagaacaaacagatatttcggcacatatattttcttaatcaacgacgcattatccacaatcgcagacattgacgatgttgttgcctcagagaaaaaattataaattaactgcccgctgaaaatatatgtcgggtaattttcaacattatttttgaagagagttgaaaaaacaacggacaatattatcatcataaaaagtggattcaatacgctccacaatactcctaataccgattttcgatattttacttttatatctctttttaataattcaatcaaaagcggtgtatattgttttatttcattacttttcatattcctttttactccattcatttaccagttgtaataacttctgataattatactttacagccggacatgcctttttttcttttctccgtaataccggacaccctcccatacatattggaagtattttacattctttacattcatccggaatttcataacttatccattctacaaatttttcattttcacaatccaaaggatgtaaaacatctccgcattttattatttcattaaattttgataatctcattctaataaatgcctcctattccaatcatttcttttattatcattacaaatatcctaaaaactcttttattttcttaaacgtactataaatagacaattttattcgtttgtatcacttattttctttcatcatactaatttcgtttaaatctttaccattaaatttgtttcatgcattttcaagtcttactgtattattctttattgcgaaaggaagtgatacaaatgaaatggttagtaacacctgtaaattctaagaagaaaccacatggctgtgccatttacgttcgccaatgtggacataaaatgtatgtaactttttaattccgctcaaaaaaaaagaaacagctgcttgcaactgtttcttttttacttatcctttatttttctcttctatatttcacacccatataatcagaaaatttctcatgaaatttctttgctttcattctggaaatctgtattttctgaccatcttccattgtaattatattattttttatctgaacaatatagttaaattgaacgatcacacttctatgtactctatagcaagtttcctgatccattttttcttcaatttccctgatattttctctaaccgtaattgtttttattttccgttgcttttcctcattctcataaaatgttatttttgaatgttttccttctgtcattacatataacaaattgtcactatgaatccatctttcttctttttcgcatgtaactttcaatattttttgattccgtaatttcatttcatgcaatatatcatctatattccgatcccaggattggttcatttcctgctttagcaaatatctatatggctgtacctgaaatgcctccgttgtcggcagtatggtaccggaacaataaatcaacagaattaatggattcattctatataattcttctgcaattgacatcccgtctcttttcggcagaacaacatccataaaaatcacatcgaagaaatgatccatttccattaataactgttccccagaatggtattcataaatttcaatctggtcgtctgatctgattttctccttcaacatagttcttaattgttttataaagaacaaattatcatcacaaattgctattttatacactgtctgctccttttatctcttgtatttgggaataataactcttacataatagacgccatcttcatatttgatattcaggaatccctggtatttcgcaacaacattttttacatattccagtccgattccatgattttcctgattttttttggttgaaagaaaccttgttccctttttcagcggtgctgtttcgcttgtattttgaatattcaatacgataaaatgattgttattcgaggtatatatatctaatgcaacactcttattatctctgcattttccagccgcctccatcgcattatctaaaaggttaccgagaattccaattttgtcgatatcatccaaaaaagtcagatctgcgcttggctctatattaactctgaactctatatttttatttttagcttctccattcttttcgcttactacaccgtttactattttatccgtgcaaaaaatttccttagtaacatacaatgcctgcttttccatttcttctataatattgataacttcgcgattgttattctcatttacaagtccggctatcgctttcatgtaatgttctatattatggatgtatttccggttttcatcattgactttttcaagtttccgataataatccgtcgaatagatagctttttgcatttctctttcctgcattcttatccgccctgtgtattcttcaacctttacaaaagccagaaatgcaagcataaccagtaatatcagtaaacacagaatgatacttcccagcattgcttctttcattgaaaagcctgatcttccggatacataaagcgtaattccagcaattatccccatatatacaaaccatatcaaagtcatccatccgataattctggaaaagattttatctaatacttctacatgctttgatatatatctttttaacaggattataatacatgtcagcaaaacacatctgagtatcataataccgacaccaacataatccatgatattttcaggaatttctttcattaacattaacatagccagagccagttgcaatccataattcaatatataaaaaaataaactagctactatcatagtctttttcgttccattaaaaaaaatattacacaatatgaaataaacaaatggcatgtataataatttaaatgctgaaataactccccaactactaaagtaataaataacagccactatgattccacacagccataatggttttctctttttattgcttttatctaatgtgatatttaagtaagccacataaacaaatgccaaatatactgcgcatataatcgttattccattgtagattatctgttgcatatttacctcttaattttctaagtttatatttctgcagactatattatcttactgtttggacaacatgtgaacaatatctatattataaatcaatatatttatattattcaagtcccccaaaagcaactaaaaattatccttgcaatattcaacaaccattctacttttacttctataaaagctttatctgtatatcaaatcaataacatttaatattccataacgctctgcaataatcttcagtccttttttaattttttcgtgactataattcttcaacaataatgcatcttccgtcagttcatttagatatccatagaatacaagcgctttttctaaagctccttctttatccgcatctacaagcgttaatatctcctcttccatcttcttaatgttatctataccactttgtccgtttgcagcttctaacatttttttgttttcgcttttaattgttccctctgaaatatttacaggtacacctgtatccttgtttaataataacttcaccattgttcttataacttcattat

SEQ ID NO: 2785 - DNA, 6696 bp, Unknown
  gut microbiota DNA sequence
ataaaatatagagaggaataagtggacattgaaaatgaaaaagaactcaaatttgaagtataaatttgagttcttttttagttcataagaataatatttgagttcttgcataaacttaaatatagtactagaatctaaaatataaatggaggaactaaaatgacaacagaagaattatatgacaaactaaaattaattcaaaaaatgaaatgcaaaacgcagaatttggaattgaaatcagcggagcaaggatgtccgaaacgattatatgattctttgtcaagcttttctaatcaggatgatggtggcattattgtttttggaattgatgagaaacaagattataaagaagttggtgtttatgatgctcaggacattcaaaagaaaattaatgagcaatgcttgcagatgaatccggttgtacggccgcttattacagttgtagagaaggaaaataaaaaatttgtttctgctgaaattcccggaatagatttggcagacagaccttgctattatcaaggacgtggaaggttgaaggggtcctatacccgtattggagatagtgatgaaccgatgacagaatacgaaatatatagttatgaagcatatagaagaaaatatcaagacgatatccgtgaggttccgagagtaacattaatgtcattggatcaggaagaactgaatcgttatgttgaactgttaaagagagggaaacaaagattagcaacacttgataatgaaagtatttatgaacttatgagcataaagcgaggagagaaagtaacgcttagtgcgactttgctttttagtccatatccacaggcatattttccacaattgtgtattacggcaattgtaattcctgggagaacaataggaagtcttggcgacatgggggaaagattctcggataatcagagaatagaaggaacaattccggaaatgttggatgaggcattattatttgtgaaacgcaatatgcggacaaagacaattataagtccgataaccggacgaagaactgacagaacagactatccaataacagcggttagagaagctattataaatgcattagtacatcgtgattatagtattcatacagaaggaatgccgattcaacttataatgtttgaagacaggattgaaatacataatccaggtggattatatggaagaatcactattgaccaattaggaaaaattcaaccggatacaagaaatccggtacttgcatcggcacttgaaacattgggaataacagaaaacaggtattcgggaattccaacaatccggatggaaatggagaaatataacttaagacagccagaattcttggatgaaagaggaagttttattgtaaaactatataaagaatcaaagaatgattatgaagatatgtcaaatgatgaagaaacaaataatttaatagtattttgtaaaacaccgcgtacaagaaaggaaatttgtgattatctggggttaaattctgttacttatgctatacagacgtatgtaaatccattagtagaagctggcgtaattaagttgagtattccagataagccaaagagtccaaaacagttatattatagcggagaaagagaaaaatgagagaagaccaattcctgcggcagcgtctgcagaaagaaatcccgattgagatttcacctgttttaagagatttaataactgttatattttgttattaaattctccgcaaacccttgaaaatctttgtgtgaatcctctatttcggacaggagataatttgacaggaaatttcaaagaagagtataatacatattaagacattttgaatcggcatgtgtccggaagaagctgtcactggcaggttctctgtattataagcaggttcgaaatagacgctatgggggaaaataatttggaaaaaaaactgacaataaatgatatagcccagatgtccggtgtggcaaaaagtactgtatcaagatatctgaacgggggaagcgtcaaagatgcaacggcccagaagataaaaaaaatcatcgaagaaaataattatgagccgaatctgtttgcaaggctgaatgcaaaagagagccggatcataggacttacggtacctggatttaactcggtaacaacaccgagacttgtagaagtaatcgttgcctatcttaagaaaaatgattatacacctcttatcatgcatacggaaaatgatatcgaagaagaaatacgctgtatcgaacggctgaagaatatgaatgtagatggaattatggttcttgcgacgggaagcacaaaagaatacgaagaagcagtaaagaagttaaaaattccaatcctgtttcttggacaacgcttcccgggagagaattctgtcattaatgatgattacaatgcaggatatgcggtgggtaattatatcggacaacgtaagttcaaggagatttatatgctctgggtacctgaagatgacccggcagtaggaggagaacgacgccatggagtgatcgatggacttatgtcctgtgagaaaaagccaaaagaagtcatagagacaacgttcttttatgaaaatgcaattgaaaatgtacagaaatttgtagatcatatgaagacaccggcggcagtcgtatgcgcaacagaccgtatcgcatttggcgtgtacaaagtaatgtcagagaaaggtatacggataccggaagaagtatccgtggtaggatttggcgattacgaagcaggagaactgttacagccgccacttacgacggtaaaatttgactggaagaactggggggagaccagtgctgagtcgatgatacagatgattttaggaaagccggtaagcccgcttcaggtcaacccgtatgaaattatagaaagaaaaagtgtaaaagagaactgagaatcaggcggatctgtcaatttgacagacccgcttttgtgcaatatagacaaatttagatatcaatttttggaaccgtttccaaaaatgaaattgcagtgacgttttgtgttgacatacaaaagctgatgtatataataaaaacataggaacggaaccggttccaaaacaaaacaatacaaggagaagagaaatgggaaagaacaatgagtatctggaaatatcaaaacagatcgtagccaatattggtggaatggataatatccagggaacagcacactgtgcaaccagactcaggatcgtattgaaagataatgatcttgcagatattgaaaaactggaagatatcgacaaagtaaaaggtgcgttcatagcaggtaatcagttacagctgatcctgggagctggaacagtgaatgatgtatatgaggtatttgccgagtatacgaatacacagaatatgtcactgggagatctgaaggaagaaagtgcgaagaggcagaatccacttcaggcagtgatcaaagcgttatctgatgtatttatcggaatcatgccggcacttcttgcagcagcccttctgatgggaattacaagcgtccttggcggacttgaagtagtaaagacacatgataccttatatgcgatcaaccggctggtaagtcttgcgtctacaggtatctttgcaatccttccaatggcagtatgctattcagccgtaaaaagatttggcgggaatccggttcttggtatggtaatcggagcaatcatgttagacagttctcttgccaatgcttaccaggctgcacagggaaccgttgatatagaagttatccgtctgttcggactgaagattgagatggtaggattccagggaggaatcatcatcgcgcttatgatgggatttgtagttgcaaaactggataaattcttcaataaggtaattccggatgtaatcaagcttctggttgcaccaatgctgacagtatttatctctacggtattactttttacacttgtaggtccggcaggacgaattctttctaatggaatcacagacggactgatgtggagtacagaacatctgggagcattcgggtatgcgttatttgccggagttcagcagatcgtagttatcacaggtcttcatcacattatcggtgcggtagaagcacagcttattgcatcgacaggaacaaactttttaaatccactgatgtctgtagctttatttggacaaagtggtgcggtacttggttatctttccctgaactggaagaacttaaaagccagagagctttgtattccaagtttctgctcgacattatttggtatcagtgaaccggcaatcttcggagtaaacttacgttacaagtttccactgatcggtggatgtatcggtggtgcagttgcaggtgcatatgtatactattcaaagcttactgctcttggattcggtacaactgcacttcctggaatggcaattgctaatccggcacatcacgggtacattaactacatcattgcacatgcaatcgcgattacgattggatttgtatgtacagtcatctttggaaaaatgtggtcagcaccggataagaataaaaatgacaaaaagaacgatacaaaagaaaatgatacaacaaaggcagttattacagaagagcctggtgcagtctatgcagcagcagagggaacagtaaaagatatcgaagcatcgacagatccgacatttgcaaacaaggtacttggagacggtgtcgttatctttccggaagacggaaccgttatggcaccatgtaaggcaaccgtatcactcgtatatccaaccggacatgcaatcggacttacaactgcagatggagcagagatcctgattcactgcggggtagataccgtcaatatgaacggtgaaggatttgagacacttgtaaaagaaggacaggaagtaacagcagaagaagcacttatcagatttgacatcgacctggtgaagaagcatggatactctccggagattcttgttatcttcacagagcttccggaaggaaagaccatcaaaacagaagaaaaacatattgcaaaaaatgataagatggctgaaatcgtgtaaggataaggtggacaggaacagatgaacaaagagacatatttaacagaatatccgaagcatgaaagtatgagggagaatgtaaaaaaagataaaaacagacttcactttcatatgatgccgccgacaggctggatgaatgatccgaatggtctgtgtgaatttcagggtgtgaatcatatttatttccaatatacaccatttcttgccggatggggaacgaagctttggggacattacacaacaaaggattggattcattataaagaagaagagccgttcctttatccggacgaagaatgggacagagacggtgtatatagcggatcagcctatacctgtgaagatggaattcactatttttacacaggaaatgtaaaactctgggataaagattatgattatatcatgaatggacgggaacagaatacgattcacgtattcagtccggatggaaagaatattgcatacaagaagcttgtaatgaccaatgatgattatccggtgaatatgtccaagcatgtcagagatccaaaaatctataaaaaagacggccgttattatatgatccagggaggccgtgatgcggaatcttatggctgtgcacttttgttttgttccgacgatctggaacactggaaatggtacgatacggtgcggacagcaaagccatttggttatatgtgggaatgcccggatctgttcgagattgacggccagcagattatgacatgctgtccacagggagtagatcagaagggatatgattaccagaatgtgtaccagtgtggatattttccggtagagtttgacctgaagaacaaatcatacagctttggaaaatttcaggaatttgacaaaggatttgacatctatgcgacacagacatttgcagatgaagcgggtagaagaatcctgattggctggatggggattccggatgcagattatgataatgatgcaacggttgcatatgactggatccatgcacttaccatgccaagagaactggaatggaaagatggaaagatcttacagcatccattaaaggagatgaaagatctgcgtaaaaatgcatttacctgcgagctggaagcatttacaaagtgggcacctgcggactgctgttttgaactgagacttgacgtggaagaagcaaaaaatctggagcttaagcttcgtgaagatgttacaataagctggaaggacgggctttttaccttatcgatgggagaaagcggacgtggaagaaagcagcgctttgctaaggtggaagagctttcggatattaccatcttttcggatacatcagccattgagatattcattaataacggggaaacggttctgacaacaagagtatatagtgaacatcttgaacagaaagtagagcttgtatccagagaggtaaagggaagcgttcatggatatgaacttggatcattcgaggttgaatataaaaaatagattccggactgcataagatataacaggtgaatacgcggaaaagaaaataaaaatgtggacaggttcctgaaaaaagaggtgccagtccacattttttataccatagtatgcaagagatgctgtcagtggcaagttttatgtattgccatgcatttgtaagaagtagcaggtggcaagttttttgtatctgactgcaaattccgcttcatcggatcaccgattc

SEQ ID NO: 2786 - DNA, 13766 bp, Unknown
  gut microbiota DNA sequence
catttttgtaataaatgcataatcttcgtcttctgttaatttatcttccacaaactgaattgctttctctgtctggtatttttcaaatacgtcgtctatagaaaatatatcctctcttttgatccgcacctgtaagtcatgtgcgatcgccagcaccagtcctacacgcaaatctaattttttacttctgtcctgaagaatatcgatcatcacttttcttgcatctaccagtttcgaatacagaaacggatcaaaatcatcgtattcttcttctttgttgctttcataagtaaggaaacgcaccggttcctttttaccaagcagaatccttgccacctccggacaggatacagacagtgtcatctccctgacatcttcaaattcttccacatgcctcggatacatcttacaggttctgcacaggcttttctcaccgagcgcagtatacatatcacagagattctgttcatttaagaatgcacagcgcttattcttatcctgtttaaatgtaccttctttccagttaatcgattttctgagtttttttttgaatgatccggttacttttttatattttttcagtgctgcttcgtctgccacgatctgccagccggcacagcaggtgtcttcgcattctcctgcaatgcaggaaaattcatgataatagtctggtattgtatataacattatgctacctctctttccaactttacacagtataacacaatttttatctcaatacattcaagctgtccggctttgtagattttcataattttttcattaactaagccagcaatacttcgcttaacattccatatacactatccggaagatgcatagcctgtataattccaagcacttcactggatgtttttccttctttcatataagcatatatcttttcttttacttcatattcgatttttgcctgatataataatgcaaatatttctgctggtttattattttccctcaaaaggtatcctttagaaaaacttatcgtgatctgttctgttacttccgtttccggaatatttacctgacatatatgacgcttttcatcatatattctttctgtttctatcgcctttcctccaactgtaacctcgagattatccacatccgcaattccataaaattccattttccatgtcctacgctttggaataacatcaagatttccatttgccggatggattataaattcattttcatttatccattccagttttgtctgcgcccaattttcttctttatcttcacatgtatctcctgtatcttccatcagtataaatgcattctttttgcccggaacgatcttaactgcaagttcttttggattttccacactgttcgtatactctgtcagatctgtcaacggaataattgcaccttcctttgccagtaccggaatatcctccagcgaccggtaaagttccagcatacgtccaccgtcatatttcagtccgctaaagatatcataccatttaccctccggaatccatgcttttacacacgctgtcccagctgctttatccgtcggctctgtaatcggacatacaaccaactccgttccaaaataatactcatttggcacttcatatgcttccggctgctctggttccaggtaatacattggacgtatcaatggctgtccgtcatgagaggcatgataattcatcgtataaagatatggaatcatttcatgtcgaagcttcaaatagcgtttcataatattttccgatactgcattataattccacggttcctttccggtgaatgcactattcgaactgtgcagacgcataattggagagaatacaccaaactgtatccatctggtggacaattcttcatctctgtatcctttcatgtggccgccgatatcatgactccaccacccatatcccacattacttgcgttcgctgtaaaatatggctgaaatgccagagattcccagctaataatcgtatctccggaaaatccgactggatacctgtgacttcccattcccgcgtatctggaaaatgttaatcttctttttcctcttcttccactatccagataatggtaatgattcaacatccacagcggatccagtcccggtattttagacagtcctccctgctgccagtccagccaccagaaatccactccctcttcttcatttggatgatgtaagtattcaaaataagctttcaaaaatttttgatctgtaacgtcaaagttcacaggctcttccttttcccagtctctccccatagcttctgccatctctttatatttttcttcatgagcctgcacgcctcctgcgggatgcacatttaatgttacctttaatccatggtcatggagccaggtcataaattctttcggatccgggaacagttctttgttccatgtgtagcctgtccatccgcttccgtatttcggatcaatatcaaccagatgccagtccatatcaatcacagatacggaaaaaggaatttcttctttctcgaatcttgtcatcaatgctttatattcctgatcattgtaacggtaaaatctgctccaccaatttccaagtgcataccgtggaagcaacggtgtctttccagtgagatgatagtagtctttcagacaatgctcatattcatgtccataccccaggaaataaatatcaatacaatcttcctttctcggctctacccatccatcttctgttattacaagtgacctgctgtcatctaaaattccataaccaaatcttgagatgattccatgctccagctcaatcgcaccatctgcttcatccagcgttcttgctgttcctccgagatctgttgcctcttctccgaaatgccagatgctatggtagacactgatatttcctctgacttgaaccgacagaccgtaatcggtaaatttctgcttattataaacaagatgaatcttatctgtaataatctccagtgattcctcattttctattacctgatattctggcactttgaatttacgatctatcacacattgtgttgctctgtcttcaaactgtccatcttcacagtactcaagtcttatcatttcttctgttaatactgtgaatctatatttttctccctggataatcgctgcgtcttccgcatgcccttctgtttttattctatataattcttccatctcttatctccttcttatcaatatcatacggttccatataaggaagaatcagatgctgatagctattatgacattaaaaagtgtcgacccttctgatcctttctgtaaggcaagtggcagttttgtccaaaatccatcccatggattgttgatgatattgatttttacattcggatgaattttttcatactcttttgcaatacttccaaaatattgttagcgctaacctcattaacaaaactagcacactcaaatttatctgtcaacatttcaacttaaatacactttttttctctattttgtctaatttccagcgatgttatttgtatattattacgtatttttatttctttttagaataatctataagatatattctttttttgatataataaattcatatattttagattaacgctaacctgtcgggagattatttatggtaactttaaaagatatcgcagaacgtgccggtgtcagtatgatgaccgtgtcacgtgttatgaatagtaaggaaggaaaagtatctgaaaaaactgcatcaagaattcgttctcccgcagacgaaatgggatatattcccaattcgtccgcaagaagtctggctgctaaatcttctcagataattgctgttatccttagagattcgaatacgtttcatccgctttctgatccttataatgcctcttttttaggattcattacaagagaaatacaaaagcgtggcttttatgtcatgattcatttcgttcaagatttttcagacataacatttcgtcttcgttcctggaatgccgagggtgccattttccttggagtatttgacgaagaggttcaaaaaattcaaaacaggaacaaaattcctctggtctttatagacagttacagtaatgtacggcaacttattaatatcggaatcgatgattacaaaggcggacaacttgcagctgaatattttcttaaaaatggtcataaaacacttggatttgtcggtccttttacgaaaacaggaggggttatttccaaacgctatcagggcttttctgatactttactggctcatcagataacacttttcgataaacatgtctacgatctggaacaaatggatccgcaggatatcatcgattctatttcgcatgattcctgcccaccgacaggtctttttgtattttccgatgaaacggccttacaactgatcaatattgcttccaacaaaggatgggatatcccttcccgcctgtcgtttataggttttgacgatcttccgtccttttgtactttttctgacaagcttacgaccattcatcaggatattttccgtaaggcagaaaccagttgtaatattcttttcgaacacattgcaacacctgacaagccaagtgagaacatcacgcttgatgtcagacttgtcgaacgaaattccgtatgcaggctttcatagtcaacaaatccccgggatctttaggaggttatctccgtttgcatcgatcgatacgatcagtggtccgaattctttacatgcgcgctctgtattttctttcataccacctttaccgatgatcacacgtacaccagtctcttttacgaattcgtactcgaatttttccattctcatacttgttgtcggtcctacagataccatttcgaatttgtcattttccagtggacggatgatcggtcctgcatggaagattgcgttgtttcttacatctacaggaagcgtacatcttcctattttagcatatgtaataaatccggagtttccgttttgtgtaaaatcacaaaacgctggcgctcattgtatactttatgcatgttactctgtttctaacggttgtaatcacagtcgaaaaagaacaggtcccgcactcctgcctgacctgttcttcctaactctttaatcttctttttttcgcttccatctctccaccgcagtcagcactccggccgatataccggacattgctgccagaactgcaatcggtgctacatctcctgtcttgaccggatagttccggtaaatggccgtttttcccgtcggagctatctccggcgcctgttcttttaccgaattcgtaaatataatctcgtacgattttccttctgttccttctttttcaccccaaactactgcttttggttctcctgcttctgtactagtcacccgtaccgtcacatcatatactgccgtatcataagtaacatctgtcacattagcggacttctgataaatcttatagtgataatcttccggttcttcatagcatatcggtccaaagctttgcttctcgttttttccgatctgaagttctgtccggtccggcactggtatgccagctttctccggctccagcacgattgttcctgccgcaccttgtacacttaccggaatctgaatctccacattcggtgttccggcatacactggaactgccattgtactgcctatccacataaataacattacgcccgcagctgctattttcttcacacttctatatcttagaatcttcactgtttttctgccacctccctctctaatttcccgatcagaactacacgaccattcgtctctgcctccgagcacgttgataaagcaatcagcgaattctcatccgccacatttacatcacgatactggactgcattcgcctgaatataatcaagcagatccttcagattctccttgcggtatccatccggatggtaaatctttgcatccgctgcagtcactttcatacaggcaaagaaccggattttccgtgttgcatctgtcagatagagctttcctttttggtgcgtttcaaaatattctttattcgtgaaatctgccacatccgcaaacattccaccatttttcatgttgtgtccatagaccagattatatggatcggagaaatcatccttgttcaggcatgacagaaagattgctcccgacagttcgaattccccatatacattcttattaatatattccatatcatcctgcccctgcaccaccggataatcgatgttggtcttcggcacctgaatccaggctttcacatccggattcatttttttcagatcctccagcgtcggattatccgctccgtcatctgtcggccggaacttcaacaactcttcatctgcaaatgaattggcatagatcttataagtatcccataacgaatacactccataagaaagcatcagaaggatcaggattcctgccatgatactgagtatccgattacctactcttgctgccatcgctgcctttttcatttcgccacttcctctctaatgctttcttatatcttctatctgcttttttcgcccaaccgattagtcaatatccatatcttttacacgttttcttctgaagaacagaaggctggatgcaattgctgcaccgatcagtgcgatatatggagcaatatgaaggaagattccggttggagagtttgttgttttatcatttacaacagtaatgttcttgtcgccattgtctgcggttgttcctgcaccggttgcgattgttcctgctgtcgtcgatgtctttacattatcaatggttgttgtatagccatcatctgcataactagcctctgttaccgtatattcatctgtctctgacaatccaaagatctttgctgtctcattatctttcaatgtaattgtcttagcctctcccgacaccagtgtggtcggagcttttccatctgaaaatgttacataatactgctctcctgctgctccgtctacttttatagtaaatttaaagtctttattacgatttccctgattaccggtaacctctttctttacggtcagatctttcaaagtatcgtgctgactgctgtaatcattcgtgaaaactccctcaccctttgactccggattatttttatctgcaaacagataagagctgacttccagatttccgtcatcatcggatgttacatacacatcaaaatacttctgttctgtggtataagcaacaccttcatacgcatttccgtccttgtccgttgcagcctcacttactacatagcggaagattccgggttttgcatcctctccttttgtgaatacagattcattaacattgagctttgtcgttcctattgtaattttctcatttccaatatcgctgtccgccggtaccgatgcaatgacatcattatccaaagttaccccatttgccggtcctgcatatattgccttctgattcccacctgccggcactgccgttcctggagcaacggtaaatttaaatgtagtcttcggtgcatatatattactttccttcataatctgttttgtgatcatcggagttttcttaactgcagtttcgctatctgaactttctgccgctgacacctgcattccgagcattgctgtcatcattattccggcagccgtaacagtggatactttttttaacattctcttttccatcatttcttttcctttctttttccatgttctgcaatcatgttactgattttacaggttcgatctgcgaaggacggtaatcactcttccctttatatcctttgcattgaccgcaccaaagtatctgctgtcttttgcaccttcacggaaatcacacagaatgaaatactggtctttctttactttcaccggataggatatgccatccacataggccggtgtcttataaaaaatatccggctcattcacaatgcttccgttgatcttcaattcatttttgtctgtaatctctaccttatctttctctctcgccacaatacgccctgtatacaatgtcccctctttttgaaataccacaacatcccggtcggaatatttccgttccagcctgtaatataagagcagatctccggcacatattttcggggacatatcctgattctttgcagaagtcattccaaaaatcacgccaaacaggaccgccagcatcactgccagcatgagtaaacgggtaaagaacagtatgatctctcttttttctttcatatatgctccttgtcagatgttattctcctgtcggatctccccatttgcggattccgtataccagtccgaaaaatgccagcattccgaatgctgcccctgtcatgaccatatacggagccgaagtctgccggattccggttgccggctgtacttctttcgtattcgtaaatgtcagatctgtattttctgatagcatatccgaaagttcttttttaccattgtccagtttctgttcctcttcttccgaaactttttttgtaatctgcacatcatagtcttccggttcttcggaaacgatatattccacaccatatgggatcgtcatctcgatcttttccatatgcttcagccggaatgtatagattccattttctaccgtaactgcgtcttttagttcttcctcactgaccggattgccctgtgcgtcatatttcacatagctgattcctcctgtataggattttccgttcagctttgtctgcacctggaaccggaaggcgtaggtacggtctcccatgttgccgccgactctctttgcaatcgtcagtacacggtcactccggatataccggttgacgaattttgcttccgaggttgtatttcttgcaatctgcccggatatttcctttgtatccggtgataccgtcagatcatatccatccggtacggcatcattttcatttactttatacgttgttcccggtgtcagattggtaaatgtatattcgtatgcgttgttttctgcattccataccagtccgtctgcattcagtttcagttcttttgtctccgtttttccgtctggtttcgtcagcgcacaggtaaaggacaggttctgtaataccttctgcaatgcttcctggttatcttccaatcctgtaatagctttcgaaatttttaaattgcccggatgtacttttatgactggtttcttgtaatattctgtatagttctgttctccatacttgtacatcagtattgcatgttcattttggttcgaatagaatccggtgcctcctgcatatgttccggttcctgcatctgcctgatctgtgtagcctgatgttctgtatttttcatatgccgtttctgtcggctggatcttggcaatgacctcataggtatagccttcctgcagtttatagtctgccggaaattgcattttaacggattttgatgcagaatcataagaagccgtgattccaaaatctgctgcattaaccgggtttccggatgcatcaaagatctgcacctgtggtgcaaggacatttccatctgctcccttcaccatctcaacattctcactcagcggatcggaaatcgtgacatttgtacatgccagttctgtgatctgtttctgaatgtcatcgaatgccttgttcagattcgccagcgttgttccggcataagatgcatgttttccggctttgactgctgaattggcaaagtcggtaagttttttgtaattccctgacggtcctacaccgaccgtgaaaaaataatcggtctgcatatcagcgactgcatcttttcctgccttcagactctttccatcttcgtcgctgcttccattgccttctgtataaccgtctgatctatatcggaaggttggatctccatcagatacgaagatcactgctgtcttggcattctgtcttttcccattcagcaatccttccgcacttctgatcccggcctgataattggttccgccgtccgattccggagaagtccgattcgtgatcgcagatgcctgattcgtccagtttacagcaatctctgcatcattccatgcctcatccctatatccaccaggccgatagtctctcttatttccactaaacgtcacaagcgcaaatctgacatccagattctcattagccgccagtgtattcgtcatgctgtcgattgcctgacttgccgcattccttctttccccgttattttcccagctattctgactgtcacgatccatcggataagccatacttccggatctgtccaagacatagatgacatccagcggcgctttcgaaaactcgctgtttacttttccttttactgtcaatttcagatcgtaggttccatccgcattctctgtcaccgtcttttcatgctccagagacatgccagaatccgacgactcttctccctcggcatgcacctccctgatactccctcccacgggcagcagtaccaggatcgcagccgtcagtatagtaatgattttctttatgctcttccggctgatagtatgtcccataacgctcctccatttctgtttcatttgaatgtggctgtttttctttaccctcatagtattcttatgtaggaggatgggattttattccagaatttctatttaatgcattatggcggctgtcaccgaggggaaattctaaagcaaaaaagttgacctaaaaacaagctcacaaaaaatccaaactcgacattcggctcagacagtggattttttgtgagcaaacggtcaactttttacttaatcttttttctgatatatctttcataaattctaagggctttttgtttttctacaaatattttttcatatcctgaatcagtttttcacacgtcttttcaaatttttttgccagtaaaatgctttctttttctgcctccgaataacgatttaatttctctgtaatggattttattcccatattggcaccatcaatcatcatttctgctattttcgaagtgtcgtcattgaacatcatctttacttcggcactgatccatgcaaatgtctctgctgccttttctgaaaacttttcttcctgaagttttccttctgataatcttatcgattctctctccatcttttcataatcttctttatatttagagaataactcctgcaattcctgatttttcagatatactaccagctgctcgatgctgttcactgccatcctgcagcccgaattacactctttcagaatctcatatgttgatgtgtccataatacttcctccttttttagatagtctgctatctttttatagtttttctttcttcattacataatctttcttttatagtatttctcaaattttattttttatgtctttagactaaaaaagcccttgcagatatcatttttatatccgcaaaggcttttctttctctcatattcttaatttaccataaaataattcagactgatttcatttgacgcaacatccgcaaggttgacacaactgtttcccatacggtcgatcagatgcaggatatttgtaaatggtgctgtcaggcttgctttacattttcctttattgacacgctgtacatgtgcttttctcatcttcagatccagatccatgatcttatctttccgtttgatcagcttctcgatctgcactgactcatctccctgtaatgccttaagtgaatcattgaacatcttctccagtgttttcagactcttctgcagttcatccatcgcttccggcgtatatttgtaccgattatctaccttttcccgtacacattttgcgacttctacactcagcgttcccatacgttccacatcacttaatatatacataagactcgccgtctgtgctgcctgctgctctgtcattgttccggcggagaacagggatgccagatattctgtgatctgatctgtcagtttcttgatctgcactcctttttcctgcaatggttccagttcattcatgtcttctgttttgacgattgtgatcgtatctgccacaaccactttcaccatttcactcacacgaaggatttcctttgcaaccagctgaagtgctgcagccggctgactgataatcttgtcatccagaaatacaggttttgcaggatccatatcgactgcttttccgtccgggatcagcgtcataacaatctttaccatcacattgatcaggcagacccatataagtgtcattgtaatgttgaataatgtatgtgcatttgcaatctgtcttgagattacttcaatctccggtcctttcggagaaatgtgctggatcagtaatgcaaatggtttcacaaaccagataaataacagacatccggaaatgttgaaaatacagtgtgcaactgcggtacgtttcgcatctttggtctgaccgatacttgccagaagtgctgtaattgtagtaccgatattatctccaagcaggatcgggattgctcctgcaagtccaagcatacttgtcacaccgtcaggtcccggctgtgatgcaaagttctgcaatacagcgatcgtcgcactactgctctgtactaccagtgtcataagcgttccgacaaatacaccaagtaccggaatatgtgccactctttcaatcagatccgtgaacaccgggctggatgccagcggtttcatgacatctcccatggtctcgattccaaggaataacagaccaaatgcaaaaattgtctgaccgatacttttcactttttcagatttcgcaataaacgaaatgataaatccaataaaaataatgatataaatgtaatcgctgatcttaaatgcaataatctgcgccgtcattgtcgtaccgatattcgcaccaaaaatgattgagattgcctgcggcagactcataagccccgcactgacaaatccgattgccataacggttgtcgcactactgctctgtaatactgctgtggtaagtgcacctgcgataaccccaagtaccgggttcttagtcagaagtgccaggatgcttttcatcttttctcctgccgctttctgcagacactcactcatcatattcattccataaataaagactgccagacctcctaaaagtccgaatattatctgcaatttttcattcataatatttttccattctccttcattcgtcttctgtagaacctgccgtcggcagcttctttcgagcatatgatgtcccctcgacgttacgggcttattgtaacgaaggtgtatgcagcctatatcaaatctatgttaaatctatgtaaaatcgtacccggagtttatatcacgttaaattctatgaaattatttccaaaaaaatgtaaaggaatcatcaaatgtatgcaaaattatctgaatacttaagatgattcctttttattgtttattcctattgtttctaatataatggttcattctcaatcagatattgcaagaatgcctcgcagccttctttcacatcttcataagtcacatcaaaattccccgtgtaccacggatctgcaatatctcttgcatctcctgcatattccagtaacagatgtactttatgctccggatctttccggatgatgcggttgatgttgcgaatgttccactgttccatgccgatcaggtaatcgaactcttcataatcttttcgcgtcatctgacgtgctctgtgattcccacacgggattccttcttctcttaatttgttctgtgtcccatagtgtaccggattgccatcttcttcgttactggttccggcagagtcgatgtagaaagatgactccagattcgctttttttactaaatctttcattacatattctgccatggtggagcggcagatgttgccgtggcaaacaaataatacttttatcatgtaaatttctccttcataat

SEQ ID NO: 2787 - DNA, 47284 bp, Unknown
  gut microbiota DNA sequence
ctgttctgaataattctctttagaattttcagggttgttgtctattgtttaattatcaaggttcttgtctttgctgtttgaaacagcttatttagattatcatattcattgacgtttgtcaagaacttttttaatctttttttcgaccagcttttcagctgttcgtccgctgtctcaagcgacagcttattaagaatatcacaagcagttgtgtttgtcaactgttattttattcttttttccaggaacaattcccggagatttctgattatgatccgtcattctctgcttttccataatcagtttgcaccgtcttctgcttcgactctgttacctcacggccttgtctaacgcgacagctagattaatataccacaagggcgtttgaattgtcaacgttgtttttatattttctgcaatttggacaattcagacaatttaacttctattctccatccttctatagacatatttacaagaagattatctctgcagacatgacaattcaaaaaaataagaccaggaatattctccctgatctcatttcccatacagacaaaaagctatatccatattaaatcaatttcactgccatccgcatgaccggattgcaatcatatatcaatttcagaatggaattgttctgtaccatttcatagatttcttttccgacagccgtcgtatacattaatgtcacaatcataaacaggatccacacaatgataagtgcaattccgattccaagtgcaccgcctgccagatgattaaagaaaccgattaccggtagttctgatacaatatccaaggcaaacacaaccgctcttataattaccgtcaccacaataaatgtaagtatgaatgctataatattgatcaccagtctggcaacataggcccctatatattgcggaaatgttgtaacgcccaattcatcatacatttctttattattgtttttaagcaacagattcttgaatacctccggtatatctgcagacttaatcatcgtctcctgcagactttctggtatgtctgcattttctataacattttctacgctgctgccacttccaccggtaagaccatccagtacatttgcagagattccatactttgcaagatcagaactgtcgatctttccatttacaatatctgaaatcgagattccataccggttcaacatctcttcactgacacctgctgccttcaaagccttctttaccgctgcttcattcagcccttgtccggatgcagtgtctcctccggtaattgccgaagtcgccgcatctgccatcgtactgactactttctgctttatcatatcatccagcggcgtatatttctctactgcctgagacacatacggcgttgcaaagaaaacaatcacaaacgtgacaattgttgcgatcaacgataccataatccggattgcacctctgaccagtcccgttatgatacaaatcagaaacacgatccctatggatatttccagccaattcatatgcatactttctccttattttacaagacggattttttccattccattcgcgctcaacacaatatactggttcacccctccaaccgggaatatttcctgtatgttattatccatcctgcctttgaacttctgtacaccatttttcataaatatattgcatgtttttccgtcatacatgatcacctgatcatcacataatttcacatgattataatcaccggtgaattctttcgacagcacgacttttccggtcttattgtataacctgagctcataaccactctttccctgattctttaggatcagaccgatatatttctcattatgaaatacactttttatctccttatccatggttatctttacagcttgtttcggaatgtcttttccggtatagatcaccatagcattgtcaccgattgccgccgatgtattctcatccataaaaaatccggatgccataattgtgttcttgtagttctttttagtaacctgatgatctgtcttatcttttcctgcatccccaaagttatagtaatgtaatctgccctcgatccggccatcctgcgtataaagatacagcacctgcatcaactgaccatttgcagacagagccacatccaccggatatccgcttcctgcaagtgatgtcttatgctctaccagtatgtttcctgccgtatcataacagattactttcattgctgtatcactttttaatattgcacttacaattccctgttccgatacactgactttttcaatcggcatcgtcgtatgcacttcacctttcaggccatcttcctgaaaaaccagaatatcattgccttctttgtccgcaaccgctgccgacttttctgtaatatctatcattggattctttatctgataggattgattccacttctcttttccggtctgactcagatacgaaataccatctttactatatttcaatacaccgtccgaaaactgtacataattattgtccgatgcactctcaccaacataggtatcactgatccggacctgggtatatgtctgtagattgatcagcagatatatcaacacgcccactgcagccactatcgcaataccaaccatcatctttttctgtttctttttttttcttttcatcagctcttcccggacttctttctccggcatcccatcttcactgttcagttcatccataatctcatctatgatcttatccgtgggatcttccggctctctcacaacatggagattgctgttcttcctgcgttccatccgtcggtcatcctttcaacgtttcttctgatactgtgtaccctagtataccacatttcacatttatgggagtaataatttttgtcctatatagatcaggttgccgtcagacagcccattcattttgcagattgccttcacatgcgacgtatctccatataatttctgactgattcccgcaagcgtttcgcctttctgtactacataaaaatcctgatcggagagttgtccgtccgatgtttctgatgtcgttgtcccttctgctttctttaccgttccagacgcttcttttgcattgtttttcgccgtttcagcggtttcggtccttgtctttgcgtcagcctgtccgccaccgactgtttccgaaagtgtttccagagaattctgtaccgctttcattttatcaaaattattaaccgttgtgatcccaatcaccaatacgatcagcacaagcactgcactcgtaatataggcaaatgccgaactctgatgctgctctttatattccatcttttctctcactgcactacgaaaattctttgcagctcgatcctcaaccacttcactgggggttactccattctccttgcgtgtattgatcatatagttctgcatctcaggattcttttcataataaatgtaatgccctccgatctgcatcagttcaccaaatttgtacgcataaaatatctcgtcctgctctcttgcgtttttccacaggaacagacttccttcctgcccaaattctctttcctgtattttcttcacttcccgattgcggctcatcggattgccttcttcaacaattccccatccgacaatatgactttccggaaaatactgcgctgcttcttccatcatatgtttcattccatcttgtccgatttcaagtttaccatccttttccgataattcttgcatctgtacagctcctgacacaaatacagccttttcgtcttccagttccagcacttctcccgccagaatcactcctatcggctgttctttcgctttttctcttaattggttcagatatgtatctacataatcttctacatatatctttggattgtcacttacatttcctatctgtcttacgttttttggaagttgtcttcccatgacacaatcacctcgtcttatatatttttgcctatgatatcatacaaaatatgcgtattttatcagttgatgggacctgtccatggaattttccgatacaattttttatttcccgacacacttccgggatttcaggcagcttttctttcagattttggtacataaaaagagattcccgaataaatcattcaggaatccctatcttattatattctgttcttatgatatgacgataatatttccacagtcccggtatccttccggcatctgatctgtaacgatttttgcgcctgcaaacggagcaaacgttacagaactcacctcaccgaacttagactcgtcacataatacatatttttcctggcactgttccatcgcaatctttttgaccattgcttcactcgcatccggtgtcgtgagccctgttttcttagtcacgccattggtaccaaagaaccccttggtaaaatgatactttctgatcgtctccattgcttcacttccgacaaccgcttccgtagaacttttcagttctcctccgatcagtcgtactttcaccccggactttgccaattgctgagcatgcactaccgcattcgtcacaacagttacatctttatcccgcagaaattccagcatatatccggttgtggttcctgcatcaagatatatatattcaccttgtccgatcaatcttgcggcatattctgcaatctgccgcttttctgatacatgaacggttattttctgagccactgtcggctcctgcggtgttaccacgtgatctaatgcgaccgcacctccgaacactttcaccagttttcccgcattatgaagtgctgtgatatctctgcgcacggtcgattccgatgtatccagaagttctttaacttctgtcacggtaatactgccttctttttcaagaagcttcaatatctgttcataacgctgttctgtaagcatatgtcctcctacaggttctcctgcatgaatttgcttactgcttcgcaagctgcttcttcatcagcaccctcaaatgtaaatgttacttcatggtctttctttgcaccaagtcccataaggccgaagatcttcttacagtcagctttctttccttctttttcgatcatcactgatgattcgaaagattttgcaagtttcaccagttctcctgccggacgagcgtggattccttcgttatctttgattacatacttaaattctttcattcttcatacctccatagaatattacatttggtgattttcattctattcattttttacaggtctgtcaacatctctgcggacaaacctgtattttactattatttttatataattttctttttgagtactccgagtaatatcgctgaaattacagttcctgctaccaatgccaccagatacatgattgcatttcccactacagggaatacgaagattccaccgtgcggtgccatcagtgtacatccaaatgccatagacagtgctccggctgccgcagaaccggcaatgcaggccggcagtacgtgaagcggatctgctgccgcatatggaatcgctccttcggtaataaatgcgagtcccataatgaagtttgtcggtcctgcttctctttctgattttgtaaatttgtctttaaataataatgttgcaagtgcaattgcacatggaggggtcattcctccgatcataacagctgccatgatatcataatttcctgctgcgattgcggctataccgaacgcatatgccgccttattgaacgggcctcccatatcaatcgccatcattccgccaaggatcagaccaagcacaagcttgcttgagccacccattccggtcagtccgttgttcagtgcagtattgattgctcccatgaccggctcaatcgcaaagttcataagaaggccgattccaagaattccggctaccggatagatcagaaccggtgcaatcttttccagtgcatccggaagcttgtcacacagttttctaagaagaagaatcagatatccggacacaaaaccagctaccagcgctccgaggaatccggattttccgtttgctgcgataactccgcctacaaatccaaccgcaagtgccggtctgtcgccgattgcttcacctatatatcccgcaagtaccggaagcatcaatccaaatgcaagtccgccgatcgtcttaagctgcgccgctaccggtgtaatagtaccaaagttagctctatctgcttttgccaatgcattcatatctacgcaaagtccgtcgatcaaaaatgccagtgcaatcagaataccaccgccgactacgaacggaagcatatgggatacaccattcatcaactgtgtgtaaatctgatgtccgatgctgccggatgatcttccacctttactttcctgcacttctgctccatttgccgcatgatataccggaacgtccccgctgatcacacggtcaaccagttcacctgctttactgataccatcagacacctggcagacaataactttctttccgtcaaaacgatccatcggaacctgtgcatctgcagctacgataattccgtctgcttcttcgatttcttttgaagtcaatacatttttcgctccgcctgaacctcttgtctcaacttttactgcacagtcttttgcttttgcagctttttcaattccttcagccgccatatacgtatgtgcaattccggtcgggcaggatgtgactgcaagaatcttaacctttcctctggtctcttcttctgctgccgttccttctcccgcaagtctttcatcaattcctgcttctttttcatcggcatcattgatgatacccataaattcttctactgtctccgcatttctcaaagcctctgtaaattcttcattcatcagaagaacagataacttactcaatacatccagatggatattgtcttctgtattcggtgctgcgatcaggaacatcagtgtaacaggctccccatccagcgaatcaaaatccacaccatccttaactaccattgctgccagccccggttttgttaccgcatcgcattttccatgcggaatggcgattccttctccgattcctgtcgtactttcttcttctcttgcatatacctgctttctatatgcttccttatcattgatcttttcgctctttaccatgagatcaacgatctggtcgagtgcttcgtttttgctctttggcgatgcattcaaaagaatacttcttgcatccagcaaatctgtgattctcatataattttccctcctgttgataaatcgttttctttgcaacacttttctcttttatgccttacaccagctgtttatatacttcttctacttccggtctggttgccagatattcggaaaatgcacttgcgcttcctgttgcgactcccatacggaaagcatgctcataatcctgcttttccatccagcctgtcatgaaacctgccaccatggaatctccggctcctacaccattgaccaatgttcctttcggcgccggcgaactatatacttctccattttccgcaatcaacaccgcaccttctcccgccatcgagatcagcacatttctggctcctttttcctgaagctttcttccataaggaatgacgtcctctctcgtcttaagtgtcacttcgaagatctcaccaagctcatgattatttggtttgatcagaaacggacgatactccagtacattcataagaagatctcttgttgcatccacaacgatcatgacgcctttatctttcaactctttcatgattctgctatagatatcgtctggcatagatgccgggatacttcctgcaaggaataagacatcgccttctttcatcgtattcagacgcttcatcaattcttctactttctctttcggaatctttggaccacttccattaatttctgttccgtcgatggatttcagtttcaaattgattcttgatattccttcttcaatctgaatgaaatcagatgctacaccttcttcttccaatcgtcttgcaatttcttttcccgtaaatccggccataaatccaagtgccgtactttggattccaagattcttaagcacgatagaaacattaatcccttttccacccggaagcatgagttctgagcttgtacggtttgtaagtccgagtttaaaatcgtccactgaaacgatgtaatccaacgatggattaaacgtaactgtataaatcatatttcttactcctttcaacttgttgagtttattatatcgtcaaatccagtcattttcaatcacattagttcacaaatattttgactgtttttggttgattttgcacaaataaagagcgaaaaagagcgaatctgactgtttttaattgcttaccgcaaaaaagctgccgcccaacgaaatctctttcgttaaagcgacagcctctgactatccgttctatattattattttacgaatgcttttacttttgcataaatgctgtctgcgtcaagaccgtatttcttaatcagttctacagccggaccagactcaccaaatgtatcatttacaccaatcttcattactttagccggtgctttctctgcaactacatcacatacagcacttccaagtccgccgataacagagtgttcttcaactgttacgatctttcctgtcttagctgctgctgcaacaaccgctgcttcatccaacggtttgatcgtgtgcatattgatcacttctgcactgattccgtctgctgcgagcttctctgctgctgcgagggattcagatacctcaagacctgttgcgatgattgttacatcagtaccttcacgaagtgtgatggctttaccaatctcgaatttgtattctgcattatcattgataaccggaactgcaagtcttccgaaacggagatatacaggacctacgtgctcataagctgcttttacagctgcttttgcttctacatcatcggaaggattgatcacgatcattccaggaattgttctcataagagcaatatcttcgttacactgatgtgtagcaccgtcttctccaacagagattccggcatgtgtagcaccgatcttaacgtttaattttggatatccgactgagttgcgaacctgctcaaatgcacgtcctgctgcaaacatagcaaatgaacttgcaaacggaacttttcctgtggcagcgatacctgctgcaactccgatcatgttacactcagcgattccacagtcaatgtgacgttccgggaaagcttttttgaacattcccgtcttggtagcttctgcaaggtcagcgtctaacactaccagatcttcatgttcttttcctaattctaccaaagcattaccgtagctttctcttgttgcgattttctttacttctgacataatgcttcacctgctttctctaattcttccattgcctgtgcatactgctcatcattaggagcttttccatgccatccggcctggtcttccatgaaggaaactccttttcctttgattgtctttgcaataattgcagtcggcattccctttgtctcacgagcctctttgaaagctgcttcgatctggtcaaaatcatttccatcaatattgatcacatggaagttaaatgcctcgaatttcttgtcgattggatatggagagttaacgtctgtaatctttccatcgatctgaaggttgttattatcaacgatcactaccaggttgtccagctttctgtgtcccgctaacatagaagcttcccagacctgtccctcctggatctcaccatctccgagaagtgtgtatactctgtaatcatcatctgaaagcttagctgaaatagccattcctactgcagctgagattccctgtccgagggatccgcttgacatatcaacacctgggatgtgtttcatatccggatgtccctgaagatatgatccgactttacgaagagttgtcagatcttctaccgggaagaatcctctgtgtgccagtgttgaataatatcccggtgctgtgtgtccttttgataatacaaaacggtcacggtctgctttcttaggatccttaggatcgatattcatctcttcaaaatacagatatgtataaatgtctgctgctgacagtgatccacccggatgtccggattttgcactgtgaactgcagtaacgatgcccttgcggacttcgttggctgtcttcataagctctaatttgttcatgttgttcctcctgaatcatttatatgatagctttacttattcttattctccgaatactgctttataatcagcttggaatttctcgattcctgcatctgttaatggatgatgtgtcatctgctcgattactttgtaaggtacagttgcgatatcggcacctgctaatgcacagtctgttacgtggatcgggttacgtacgcttgccgcaatgatctctgtatcgattcctgcaacttcgaagatctgtgcgatctctgagatcagatctactcctcttgtagaaatatcatccagacgtcccaggaatggtgatacgaatgatgcgcctgctcttgctgcaagaagcgcctggtttgcattgaagatcagagttacgtttgtcttgataccttctgctgcaagtactttaactgcctttaatccttctacagtcataggaatcttaactaccatattcggatggatcttagcgatctctcttccttctgcgatcatgccttctgcatctgttgttgtagcttttacttctccactgataggtccgtctacgatagatgcgatctcagcgataacttcttcaaatactttaccttcttttgcgatcagagatgggtttgttgttactccgcagataactcccatatcatttgctttcttaatatcctctacgttcgctgtgtcaatgaaaaatttcatgttgttttcctccttaaaagcggtgaaatctgttcaccattcccttgttatcgtttgatataaattatactctattcatggaactccggtcaatagccatgattttttattaataattttctttattaatatttttaaattattaattgagcttttttaaaatttttgatggaaatgttaacattatttttgattttttctttttattatcgattttcacgcatttataaggggcattaacatctaacatgtattttcagtttgtaaaattgagtaattattaataataatttttgcaaaagaattaatttttcttttttcgtgcattttttgcatacgttgttgttccacggacgatcagctgcggttcatattccacatgataggtactgatcggtgctgtttccatattcgccgaatgatgtgatgctatcttcttcattataatatcacatgcatcccttcctttaaaagtcacaaaatgctcgatcgtcgtcagattcatgttatgcattctggcaaacagtgtgttatcacatcccatcacggacacatcggccggcacttttatctttgcctcataaagtgcatccatgactccaaatgcaatcatgtcatttaatccgacaattgctgtcacatctgtcgtttcattcaacaactctttcgtcagttcatatccgatcttatattcggaatcaatatgtgccacatcaagatcaatctcttcttttgccgccttgatgatcacctggtctcgcagaccggctttttcatactctttcaggaaaccttccacccgttttgaacgttgtttctgtcttgctgtcaatggcggtgctatatatgcaacctttctgtgacctaattccagcagatgcttcgccatcactcttccaagttttgaattatcaagttccactgcatctacattcatcttttcattctggttatttacgatcgcaaccggtatctgttctgcaatctctcccaccagatccataaagcaatggctcggattacaggtgtagataatccccagcggccgtaactgccacatcattttcagatagcgttcttccatccggagatctctctgtgtattacatacaaaaagaccaaatcctttttcttttgcatgcgcctcgattccctgcagcagcataacataatacggattcgtcagattggggcagaacacaaccagaagtttctctctttttgtccccttcctcgttttccttttcggcgggacgtatcccagctcttttgcagcattttctactttttccacagtctctttggcaaatgacacatcatattttttgttcaggatcatagaaaccgtagattgtgatactccggcagcacgggcaatatctgttgatgtaacctttttcttcattctctcacctctggcggggacaaacactctacagttctgtccttccttcaagtgcccggagaagcgtcacttcatcgatatactccagatctcctccgaccggaacaccgcttgcaattctgcttactttaattcccgtcggtttgatcagcttactgatatacatcgctgtagtctcaccttccagactcgaattcgttgcaatgatcacttcttttacatctccctgcagacgcccgatcagttcctttaatttgatatcttccggacctatcccaagcatcggagagattgcaccatgaagcacatgatacacaccattatatttccctgtcttttcatatgccgcaagatctcttgtattctcaaccaccatgatcgtctgatgatcacggttactgttactgcagatcgggcacagttcctgatcggtaagtgtataacattctttgcaatattttatattctctctggcttccaccatcgtagaagccagcctttttacatcatcaaccggcatatgaatcagatggaacgcaagtcttgccgcagattttgctccgattcccggaaggcatgacagttcctcaatcaatttgctcatctgattactgtaataatccataattttttaactccctgtaagaatcattctttccggatcttctcttagaataatcccggcattccgccgcccatgccgccggtaaacttagacattgcagaagttgtctctgcgtctactttctccagtgcttcattgactgctgccacaagcagatcttccagcatctctacatcatccggatctactacttcttcatccagttttacttttaatatcttcttgcttccggatacagttacttcaacagcaccgccgcctgcagttgcactgaattcttttgtctccatttcctttgcctgttcttccatctgacgctgcatcttctgtgcctgtttcatcagatttgccatatttcccggcatcccgcctcctgggaatcctcctctttttgccatgataatatcctcctattcgtcttctacagtaatttccatattgatcagattctccagatccacaaagtgatcctcgaatctgcgtcctgcctccatctggcggacgtctatctctacttttttaccgatcttctgctcgatcaacgactggatctcttctttgtgatccggcgtcgcaactgcactggcactcagttcatccggcagcacgatcagaagccggttgccttctccggcacttaatctcgcttttttcagatatgtgcggagcatcggggaagcttcattgatgatcatccggaaatcttttgccaccgctttcacgtcttcatttaatgcctgcggaagttccggtttcggcttcggtgccgctgcttcttttgcatcggatgcatacacaacacgctccctgaccggtgcttcccacgctccgtcctccagctgtttttcaatcgcacggatgcggtccagcaaggcgtccttattctgatccattgccggacggcataatttgatcagggttacttccagcagaaccctcttctgtgtcgcatatttcaactgattcgtcagatccgaaaaaatgcggatgtagcggatcagtgtatcactgtcaatcatctgtgcttcttcttttaacagtgccagattctccgatgatacatccagtacatcttccatatcatccgagctcttcaccagaagcagattcctcagataccatgtgaaatctgccgccagctgagacaattctcttccctgcattaccagctcatctaccgtctcgatcacctgatgtacatccatcgcaagcagctgtcttaacagccggctgaatacttccgtatccaccgctcccagcacttccagtacatgatcatatgtcagtgtctcattcatatagaatgccgcacactgatccagaaggctcagtgaatccctcatagagccatccgccatctttgcgatatagcggaccgccttatcttccacatcccatccttctttatcgatcagttcacgcaatctcgctgcgatcgtctcaatggaaattcttttaaaatcatatcgctgacatcggctcaagatcgtaatcggaatcttgtgtgcctccgttgtcgcaagaataaatataacatattccggaggttcttccaatgtttttaacaatgcattgaatgcgccgatcgacagcatatgcacctcatcaataatatatactttatatttcccttctgtcgggcgatatgtgacctcttcacggatctcacggatgttgtccacaccattattagatgccgcatcaatctcgatcacattcatcgatgtaccagctgcgatcgaccggcacattgcacactccccgcacgggcttccatctaccggatgttcgcagttgactgctttcgcaaatatcttcgcaacggttgtctttccggttcctctggtcccgcagaacaaatatgcatgtccgatacgatctgcattgatctggttcttcaatgtccggacgatcgcatcctgtccttttacatcttcgaattcatccggacgaaacttacggtataatgccgtatatgacattctttacactccttgtctaaatggagatcctgctcagtctccgcatctattcatcaccgaagctgataccaatggtctttgcctcgtcaatgatcgatgcttttggatctacatattttagttttccggcaacttctgacaatggcacgcggataatctcctgatttctggtccctaccatacatccgaaatcaccttccaaaattgctctcgaagcttctgcaccaagtcttgttgcaagtacacggtcatatgcacacggagagccgcctctttgtgtatgtccgggaactgtgatccttacttctttatctgtcttttcctgaatcttctcggcaagttcatatgcaacagaaggatatttcttctttgcttttttctcttttaattctttctttgagagtgctgcatcttcttttgaaattgcaccttcggcaacagcaataattgtaaatctcttccctgctttgccgcgtttttcaattgcgtcaaccactgaattgatatcgtatggcatctccggaagaagaataatatcggcaccaccggcaattcctgcatgaagtgtgacccatcctactttatgtcccattacttccacgataaatacacggctgtgagatgtcgctgttgtatggatcttatcaatcgtatctgttgcaatatctactgcactctggaatccgaacgtcatatctgttccccagagatcattatctatcgtcttcgggagtgttaccacattaagtccttcttctctcagcatattggctgatttgtgtgttccattccctcccagaattaccaggcagtctagattcaacttgtgatatgtgtgtttcatcgcctctactttgtcaattccgtccttatccggtactctcatcaacttaaacggctgtctggatgttcccaggatcgttccgccaagtgtcaggattcccgaaaaatcttttgacgtaagcatcttaaaattcgaatagatcaaacccttatatccatcctgaaatccataaatctctacatcatccctttttgaaacaagcccctttacgacgcctctcattgctgcattcagtgcctggcagtcgccgccacttgtaagcattccaattcttaacatatatctgctcctttctatattgcctgtgtattcgtttattctgcaccatatagaatttccggtttagaaaagtcctacctatgagcttacccactttctgtatacaataccagtaaaattataacttatttttatggccgagacaatacgagacagatgttttttcatccggctcactcctgttgacaaaaattcccctgtctctttttccaaaacgtgttataatacatgtggaaaatttgtgtagaaagcaggtagtattgtggataaattagatataaaattatggacacttgcgtccaaaggtcagatcgttcctgaccgttcattactgaaaacaccggaacagattgaaatgattaaaaaaagtgcagcgttgaacaccgcagttctcgatcatgtagctgctcatattcacgcaggaatgagcactgccgagattgataaactggtgtatgattttacaacagagcatggcgggattcctgcgcctctgaattatgaaggattcccaaaaagcgtgtgcacttctatcaacaacgttatctgccacggcatcccaagtgaacacgagatcctgattgatggcgatatcatcaatgttgatgtatctactatcttaaacggctatttttccgatgcatcccgtatgttcacgatcggtgaggtatctccggaagcagaacgtatcgtccgtgtcacaaaagagtgcgtggaactcggcctcaaagctgcaaaaccatggggacatctcggagacattgcttatgcgatcaattcccacgcacaggaaaacggatattctgtcgtagaagagatcggcggtcatggaatcggtctggaattccatgaggaaccatttgtaagttatgttactccaaagggcagcgagatggttctggtcccaggtatgatgttcacgattgaaccaatgatcaatcagggatctccggaattctatgtagacgaagacaacggctggaccgtttatacagatgacgacggtctttctgcccagattgaatatatggttcttatcaaagaagacggagtagaagttcttacaaaataacacagagaacctgccgcaggcaactccatttttggcatactcagatattaaaaaagattaccggaaaggacagttccttttccggtaatcttttttatctccactttacagaatatacagccagtcatgctcctcttcattccgcattcccagcaccaatgccgaatgcggtcccatattcgcaaccacttcgccatcttccaccagatattcctcatactctgttgtatatccgtctttgtaagaatacagcagacgtttcatacgacatttcgccggaatctcagcctcccatacaggaactttcacttccgtacgttcgctgcggttattgatcacgatgacgatccggtcattgcctttgaaccttgcataagacaggacattctcttctccgccaagaatcttcagagaaccggttctaagtgccggatgctctttgtggatgcggatcgcttctttgtgaaacgcaatcagttcatggtcttcacgtccccacggataggtccttctgttatccggatccgtgaatccacagacacctgcctcatcaccataatatatggtcggtgctccgacccatgtcatctgcatgacgaccgcttcacgcataaccgctttatttacatattcatttgcagcttccggtcccagatgttctacacggccaaccatgtggttcgttctcgtaaggaatctcgaatgatcatggttcgaaagttcgttcatcgctacctgcagtgaaggggtcagcatgttcgacatatgatgtgccatcgacccgataaagttatcgatgttaccgagaagttcttctctggcctcatcactgtgcttttccattcctgtcagaaaccatgtgatcggctccatgaatgcatcatagttcatgacggtatcccactcgtcacctttaagccagtctctcggatccccgtaatgttccgcaaggatcagtgcactcggattcgcatctttcacggctcttctgaatttcttccagaaatcatggttatattcattgctgcgtcccagatctgctgccacatccagacgccatccatctacattatacggcggtgatacccatttccgcccgatatataagatataattttccagctttacagaatcttcataattcagtttcggcaaagtatcatgtccccaccagccatcataattaccattatacggccagttctccggtccttctttgaagaaacggaagtagcttctgtacggactgtctgccgatatataagcacccggttcataatctttttcgccttcgtatattctctcacgatccatccacttattgaaagaaccgcaatggttgaatacgccgtccagaatcactttcataccacgacggtgtaattcttctaccagcttaatgaacaactcattacttgcttccaggttcttaagacctgtcgtgcgttttttatacttcgttgcctgactgttgtccgtcacaccatccggaagcacctcacctccgtcatctacgatcttcccataatgcggatcaatataatcataatcctggatatcgtatttatggttcgacggtgacacaaataatggattaaaatatacaacttctacacccagctcctgcagataatcaagtttatccatgactccctgcagatccccgccgtagaattctcttacacccatgttcgccggatatttatcccagttcgttactctctgggaataatctccgatatagtaatactcgttcgtctctacatcatttgacttatctccgttataaaagcggtctgtaaatatctgatacataaccgctccctttgcccagtccggtgtggaaaatccgggtactacaacaaagttatagtactccaggatctcgcgagagattccacatcgtccataataatatttttctgttccagactgcacttcgaaacaatatctgaaaggctctgcccctagacgcacttcaaacgtataataatcaaattctccctgtgtgcactctttttccattacatatgtgtcagccgatgtcacaagccctactctgtctgcatcatccttcgccgtacggaaccggaacgttaccagttcattctccttcggttcagggggatatacatacccttctgttccatcgcaaaataaagccgccttattcatataactaacacctctctcattttttgtttccggaaaggaaagctcttcctcctagtcctccgatacatcttccgggaacagcgcttcaaattcttcccgggaaatcttttctttttccagcagaaggtctgcgcatgtatgcagaacatcgtcatattttctaatgatatgtcttgctctgtcataacattcatcaataattctctttacttcctggtcgattacagtagccacaccctctccgtagcctcttgctgtatgcgccagatcacgtccgatgaacacctcattgttgtcatcatcatagttgatcagcccgactgcttccgacataccgaactttgtaaccatggattttgccaaaccggttgcctgtttgatatcctgggatgcaccggttgtgatatcatcaaatacttcttcttcggctacacgtccaccgagtgataccgtaatatcctgaagcatctttccttttgtattaaacatctcatccttttccggaagcggcatcgtatatcctcccgcacttcctgtcgggatgatcgagacactgtatacaggtcccacatccgggagtacatggaacaggattgcatgccctgcttcatgaaatgctgtgattctcttctctttttcggaaatgacacggctcttcttctctgcaccgattccgacttttacaaatgctttcttaatatcatcctgttttaagaatactctgttatccttcgctgcaagaattgctgcctcgttcagaagattttccagatctgcacctgtaaatcctgctgttgtctgcgcaatctgctgcagattgatctcctcactcagtggtttacctttcgcatgaaccttaaggatctcctcacgccctttgatatcaggtcttccaaccataaccttgcggtcgaatcgtcccggacgaaggattgcaggatcaaggatgtctactcggttggttgcagccatcacgatgataccttcattgacaccaaaaccatccatctctacaagtaactggttcagtgtctgctcacgctcgtcatgtcctccgcccattccggttccacggcgtcttgcaactgcatcgatctcatcgataaagatgatacaaggtgcattcttcttagcctcctcgaacaggtctctgacacgggatgcaccgacaccgacaaacatttccacaaaatccgaaccggagatcgtaaagaacggaactcccgcttctccggcaactgccttcgcaagcagtgtcttaccggttcccggagggcctaccagcaacacgcctttcgggattcttgctcccacctggatatatttcttcggagatttcaggaaatcaacaatctcctccagttcctctttctcttcttccagacctgccacctgagcaaatgtcactttcttgtcacggtctgtactcagtcttgcacggctctttccaaaattcattgctttcgaattcgcaccgccgccctgccggttcatcagaccgaagagcaggaaaactccgcccagtgtaagaataaccggcagaaatgtggttgctgcccagctgtcctgagggatatccggcatcgtatactccacattctgttctttcagataatcctgaatctcgttaacatcagaaacatacagatatctgatcttatcggaatcgtcgtctccctttaacgtaatctctacacgccccgtcggaacactcttattctgattcacttctaccgactcgatcttgtcatcttgaatcaactgttggaaattcttccgggtaatctctttttctcgttgatcgaactgattggtaaaccacagtgctgcgaacaaaaatacgacaaacaccaggaatacagcaccgttcagtcctctcgctttcttattattcaattttcaggctcctttcttgtgacacgcctattctacgccctctaccactccgataaacggaaggtttctatatctctgagcgtaatccagaccatatcccacaacaaattcgtccgggatattgaatccgacataatctacttttacatcttttactcttctttccggtttgtccagaagcgtacaaagcttcatactctttggatttctcttagccaggatatccatcagataatataatgttcttcctgaatcaatgatatcctctacgatcagcacatcttttccttccagtgtctcatctaagtctttggcgatcttaacgacaccgcttgactttgttccgtcaccgtagctgctgacactcataaaatccatagataccggaacggtgattctctttgccagttcacacataaagaatactccgccctttaacacgcagatcagatgcacctgctttcccgcataatctttgctgatctgttctccaagttctttgatcctctttgcaacatcctcttcaggaactaatactttaactgtctctgccatcttcttctcctccgttaaattctatttccaaaatccttttggtcttatctgtaatctgatacgcctggttctgtctgtatccgataatccacagaatgtgactgccatctgctgccagccagatcttatctctgtcttccctcgggatcttcgcattgataaaatacttcttcagactctgcgttccgccatttctgtcgattgtgatatagtcaccggactctttatgtcttatttttacagtgctcttaattatatcatagtcaaaccatttcgtgtaggtttttttaggaaatgcgcctgtttccgccgtttgttcaaacatccgcatatgcactcccggttcattgccggcgtcctctttttcccctgttttgagatctgatctgtcaagcaggattccatcataacatttttccgctgtcattttataaggaaggctgatctttcttccggtctgaagccgtgccagatcttcgatcagtcttacatgcacctgctcgatatcttttctgcgccccgccagttcacatagcagcgcatgaatcaggaacgaacgtacagtcttatcgacatcccggaataattcctctttgatcagcagttccggaacgttttcacgttcttcatacagatcttctgcactcccacacggccgcttttccacatatcgctccctgcatttttgcacttcctgttccataaacgcccacactgcacgcatctgttccatcgtctcggacatgtgcatgaccgcctgcggattgacctcttgttcgagatagggaatcacatgattccggatccggtttctcgtatagtgatcttccagattcgtctcatccgtacaataactgattcccttttcctgtaaaaatgcttcaatctcacatctctgcacacagagaagcggacggatataccggacggtatctccttctgccgggctgataccgccaagtccacgcaggccgcatccgcggcttaagttccacaaaagcgtctccgcattgtcattttggtgatgcgccagcgcaatctttgtaccgtttttctctttgcacaccttttcaaatatctgccgcctgatattcctgcccgcctcttccagcgtcaggccctgttcttttgcatactgctccacattctcatgaaatgccagatacctgaccccgagttgtctgcatagtgcctttacatatctctcatcggcatctgcactgtcaccgcggatcccatgatggatatgcaccaccgtcagttccaatggcatctcatttttaaattcttttaacatgaaaagaaggcatacggagtctgcgcctccagatacgcctatgattacatgatcattctcctgtaacatatggtatttttccacatatgctttcacccgttgatacattccggccttccttttcctttattctgtctgtataaattcttcctgcccggtccttgatcttccactcaccggtatggcaaatatataagctatatataaattaaatatataaaatttcttatagaaagtcaacttaagccccatattccaatcaccagcaccgtcatatcatccatcggcatcccgccggaacttttcaacacctgacttaagattccgcgggcaaattccgtcggattgacaatatccgtctcccggatgaattccactaatttttcttcctgtgaaccttcaggcagggcatccatcacgccatctgtcaccatgatcacatattctcccgattccagattccgctcttccctgtccagttctatattctgtacaacaccgatcggaagtgtcgtcgactcgattttttcaacttctttcttcctcttaataaaagtcgccgaggctccggcctttacaaattcacaacttccctgatacagatcaaacaggcagacatccaatgtacagaacttcacttcttcccgtcctgtcaccagcgccgtattcatcatctgcaccgctgtctctaccggaaatcctgcttccagcagttcttccagcatctccaccaccattgtactgtcccggaatgcttcctctccggaacccatgccatccgaaagcgcaactcctttgcgtccgcccggaagatccttcatcagaaacgtatctcccgatatctcttccagtccttttccgatcctcgcaacaccctgcagtgtctgaaactttgctccctccatacaggcaatggtgccatattcttctccgatcacaagcctttccccctgtctcggaatcatcgttcttcctatacattttcccaccagaaacgcaacatcttttgcaaggacgacccgtcctttcatggcttttaccgtcagatggacttcatattttccctgctgtgtcatgtaaaacacaaccgaaagcagcttcacattttcttttttcagcgctgcctttatacgcttctccaaatggtcatcctggaagatcccggcatccagttccctggttgtatactgtatcattttagcgaagctcgtaagttgtcttgcatacccctctcttgcctgcaccagtctgtgattccacatcaggatctgcttggcattctcgaattcttccagactctctcttaaaaaacgtggtgcaaacaggcactgtctcttcagcctgcgttttaattccatattcagttctgcgccatattcttctgccgcacacaggatctcatacatcatctgataagtcaccgagtgcttttctcccagacattctccccgccgttcacagcctgcacagacattccctgtcaccttttcaaacatttcatcaatttcttctctggacaaggttcctttgtatgcctccatattcagaaatgttttggataaatgctgcagtgaatcggcaaatttgtccatctgtaccacatatggatttacaaatatttcctgttcctttatctgtgccaactttgtcgttcccctttcttctgaatacatgacggaaaaaagcttcaggaatctcttcctgaagcttatcattcgtcttttatagtcttatttcgatttaaaaacaatctcgttgtcatgtaccagacccagcttttctttcgctacatcttctacatatttatccgttccaacgtatttttccagttctttaatctcttttttccgatcctgttccgcctggatctgctcttttaattccgtctcctgcgcctgatactccctgttctttgcctttaatgtcatactgtttgcagacaccataactgtcaacataagaacaactgcgctgatcgccaacacacttctcttatgattctgagaacgcttgcgctgccgtcttctgcggtttctctgctttacatcattcatattaatttactcacccttgccggcagccctgccgtttcactcacctgttaattatttttattctatcttttttccccgggtttttcaagtgtttcggtaaaaaatctgctatgccgccgtacaattttccgacaaattttccccgtaatcgcaagaaaaactgacataatgatcccgccgattccaacacctagtataaagtaccatcgcacactaccactgcttgtgtagtaaatctgcacaaacaaaaaaatcgcggttccaatccaatagatcagatcctccagttcaataacccaatgagcatgatgtaccacttcccgcaggcagctgatacaacggtatgcaagacgtacgattgctccggccaggaccgccagcagaaatatgaacagttcttttcctatccccatcttacatttcaccttattttccttattcctcatgacattcccggttctccggcagatcaccggaataacttttcaaaaagacttcctgcctgctttgctgtcgaatggatatccgaatatgagatactgtcaatgtttcccgacagatcgatctctcccttttcaagattcacacggttcacatgcagatccgttcctctcaccatcagcattccctgctctgtctccagcaatatctcattcagattaaaagacagcacatccagaacacctgtcaccagtcctgccttccggttattcaatatcagtttatggtttttctgtactgctaccgtctccaaaactatcacaacctttcttactaatcatatgaaaaggaaatcgaaattatgacttttcacataattatgcaagaaaggttgtgatgatccccgccgctttttcaccggccattaataaggtttataaatatttgaaaaggtctcctgcctcttcttttttcgttgtatctttaatatcaagaacttctacttttacggttcttgttccgaactggatctctatgatatctccttgttttacttttacagacgccttggccggtttatcatttaccagtacacggccggcatcgcaggcttcattcgcaaccgtccggcgtttgatcaatctggatacttttaaaaatttgtctaatctcatctatctgttctcctgtatactttactgtcagccggttctttcgaacgcataatgctaaaaaaccgaagagtatcaggacactctccggcataaatcctttcggataaatattacaaattcagactactcgttgatagcatcttttaatgctttaccagctttgaactttggtgctttgcaagctgcaatcttcatagtctcgcctgtctgaggatttcttccttctctctcagctctcatgcttacttcaaaagtaccaaatccaacaacctgtactttatgctctttctttaattcatctgttacaacatcaacgaatgcttttaaagctttctcggaatctttctttgataattctgcctggtcagcgattgctgcgatcagttctgttttgttcatggatatatcctcctcttatttacatttagaattcataatttcgattctttttatacaaagtcactgtccataccccgtcatatgacatgcctttatgtactgttatacctgttttcatacggaatgtcaaggtaaatcccctgttttccctgtattttcaaggttttccggcattttcaggtgccctcagagttcaaatccaaacagttcttttaaaaacatttttttctcttctgtctgctttatcgcagtctttagtttctctgtattttttaccgatatccacgctttattcatgcaatagtatgaatttgcaattttccagaacttttccggataaatcagacggattttcaaatattctgtttcgcttctggtaagtgggtggattgcagaatacgcattcagcatgccatctccgagccggagcttccacccgcttttctccattacttttctgagaaaatagtacagatcctctacctggatatcccgatggaatttttcaaaattcattgtcgcgattccttctcttgtcatgatgatattatggtaattatactctccgtgcgtcataccggaacggttcatctcttcctgatacaattgttcataatccgactgttccagttcgcataccgctgcttctgcccactgatacatcagttcaaactgctgcaaaaatgcaaattcaaattcccctttcgggacagcttttctgacaaactgccgtactttttttaactcccggttatgccgtctgtatttttcaccggtcttaatcccttctgtaatcccatactccagttcatgcctcataacagtatgtaatttcgccagattcccggccgcttctaatatttccctggtcttttttatgtcgcattcatggcctgcataccattttttcagcatataccggtcaccattatccaacgaagagatatattcaccgttccggttcgctaccatataatcaatctgatgctctccttgttcataaagccatgtataaagttcgcataacgcagggattcttttttcggatgttgtaacttccttcaaaaggaatacccctttgttcgtttcgcataaaacagcacctctgactttacgggtgctgtttacttctatatcatattgttccagtattttttgttcaaattcctgcatttatattccccgcactttacacttgatattctttttaaatgtatgtgggaaatataaaaaatattcactgctgttatacttctttatccgtggaaatataattcaacagtgtctctctcgtattcatttccggattctcgatcacaaggttcaataattcgtttaacttttccccaatctcttttcccggcttcattcctgcccggatcagatctctgccggtcacagctaattcttttaacgatacacactgccctttttctataatctctgcatatgtctgttctacttcatccagattttttaatttttctgccctccggtactcactttgcgccagaacatctgcccttctgacttccatataatatgggaaaatatcttcgccgatcttattcattgctcttctgacattcttcggcacggccggcatgcggtaatcatgattcagcacaagtcttgtaaccttatgcagcgtatcattatcgaattttaatctccggagtacttctttcgcaatgcgctcacttcccaatgcatgcattttaaaatgcgcaacgccgtcttcatccatggtcttgtattccggttttcctgtatcatgcagtaacattgtcaatcttaagatcttatcattgcggacattcatcattgcatgaatggtatgttccccaacggtatacatatgatgcggtgtctcctgctctgtctccatcatccggtcaaattccggcaaaaatatcttcgtaattccaagttcataggtagttcttatcagttccggccggtcagatgtcagcatcttcaccagctctacctgtatcctctccgcactgatattttcgagtgtcggtgcaagaagcttcattccttctttcgtctcctcatcgatctcaaatcccagctgcgctgcgaacctgacacctcttaaaatccggagtgcatcttccgagaaccgttccttggcatttcccacacaacggatcatatgcttttccagatcctgcattcctccaaagatatctacgatcccatccttgtcattatatgccatggcattgatcgtaaaatcccgtctgagcaggtcttccttcagattccttgtaaatgtcacttctttcggatgtctgctgtcctcatattttccatcgattctgtacgtcgtaacttcgtaaccctcatgattcagaagtacagttatcgtcccatgttcaattccggtatcaaatgttttgtcgaataatgcctttgtctcttccggcatcgccgatgttgtaatatcccagtcgcccggttctcttccgaggatagaatctctgacacatcccccgactgcgtatgcttcaaatccatgcgactgtaaggtatgaatgataaactgtacatcatccggtaattttatattaaagttatccacaaatatctcctccgtctatccatgttatcaacattctatatcataccatatttttgcctgtgtctgtggatgaaaatagacggtggattttttaatccaccgtccatctttataatccgtttattcttaatatgatttaccccagtaagccatgtgtttcgcaggttttccgcaataaatacatttatcggaaatgaattcttcatcttcgatcagacatcttgttgcagctccgcctgtctgatattttacttcgccctcacattccggatctccacaccagcatgcttttacaaatccacggttggctttgaacttctcaaccatttcatccattgtagtagctgtatcaatgtggctgttcaggaattcttctgctctgttgtacatatcctgctgctcctgctctaagatctcgcgcagttttactgcgatctcatcgagagatacaacgatcttttcacggttatcacgacgtacaacaacaacctggttcttctcgatatcctttggtccgatctcgatacgtgttgggataccaaggatctcctgctcagagaatttccatcctgtactcttatcagagtcatcgatcttcactctgtatcctgcttttttcagttcgtcaagcagtgcataagatctgtcaagtacaccttctttgtgctgggcgattggaatgattctacattcaaccggtgctacgtgtggtggcagtaccagtccgtcatcgtcaccgtgaaccatgatcagggctccgatacttcttgttgaccatccccatgatgtctcatacgcactgtgcagttcgttgttcttatctacatatttgattccgaatgcatccgggaatccgtttccgaagaaatggcttgtcgcagactgaagtgcttttccgtcatgcatcagtgcttcgatcgtgtatgtgtcttctgctccggcgaatttctcgtgttctgcctttcttcctgctacgaatgggatagccattgtctctttatagcaatccttataaacttcccacatctggattgttctttcttcagcttcttcatatgttgcatgaagtgtgtgaccttcctgccataagaattctcttgaacggaggaatggtcttgttgtcttctcccaacggagaacggagttccactggttccatacctttggaagatctctgtatgattttacagtctttgcccagaggtcacagaacaatgtctctgatgtagggcgtacgcataatctttcctgcagtctttccattccaccatgtgttacccatgcaacttccggtgcaaatccttctacgtgatcagcttctttttccagaagtgattccggaatcagtactggcaggtatacattctcaactcctgtttctttaaaacgtctgtccagatctgcctgaatcagttcccagattgcataaccattcggtaagtagttcatgcatccttttacgcttgaataatcacaaagatttgcttcacgtacaacgtctgtgtaccactgtgcgaaatcttcgtcacgagatgtaatgtttttgactaatttttcctttgccatgtttctcttctccttttcaattttggtggaatccttattccacgttatttttttgccgggagttccgcaacctggcacaaaaaacgccgggcctttcgactccccgaaaaagggaccgaaaagctcggcggtaccaccctagttaactgcgaccctttcgcagctctcttcattggccgttaacgccggctgacacgctgcactttcatacagtggctccaggaccggttccatgtgatgaacagcagatatctcacaccatatgatatcctctctgcagctggattctcatgtactaattcccttcatcgccataaaaaatattgaattgtcaattattttaatccatgaggtatgttttgtcaagatattatccctgcttctgccagtactttcccgctcaattatgttttcctcttttctccacaacttcttgcagttttttcccctccatgatttaataagtataacatttgttttaacaaaggagaagtatatggctactttaaatatattatatgaagatccgcacattttagtctgtgtcaagccacacggtatcgcaacccagagcaaaagtatccgttacccggacatggtcagcctgatcaaaaaccatctggcgaaatccagtggttccaggaaccccggctcagctgagccttaccttgccgtcatccacagactggaccaaccggtcgccggaatccttgtctttgctaagactccggctgctgcaaaagatctgaataaacaattacagaatcagggattcgggaaatattaccgggcacttattgccaatacaccttcaacaaaagaaggaacacttgagaattatatggtcaaagatgccagaacaaacacttcccgtatctgttctgcaaaggaaaacggatcaaaaattgcacggctgcattatgatacagttcctgttacggactggctgtttaccgcacctgctgctttccacggaactgaactggaaatccatctggataccggccgccatcatcagatccgtgtacaactcgcatctgtcggttgtccgattgttggagataccaaatataatcaggaactttctgacaccacgggctggcagacaatccggctgtgtgcttataaactagattttaaacacccgattacacataagactatgcattttcagttagcaaatgatcctgtgtattttttaccgataaaaaataactgtcataagacatttttaaacaaactgctgacagcttgttctgacacacaacattcaaaaaaggagcaggaaattcctgctccgctttttcgccgatacatataccatctatgcttctgctgcatcctctgccagtgcttcttcatatttctcaagaatgaaattctgaatgcgctctcttgttcttgaattgatcggatgtgcaatatctctatattccccatccacagctttcttgctaggcattgcaataaagagtcccttctctccttcaatcaccttaatgtcatgtaccacaaattcctcatccatggtaatggaaacgacagctttcagcttgccctcctttgctactttacgcacgcgtacatctgtaatctgcatttttctagcccctttcttctagcctttgcaccattttctcttaaagtgcatacctctcatttttttctacgactactctcacaccattttcaccaacataacgtgtatttgcccgaatcgtatctctgctttccacaatacaattctcaatatatacattatctccgagatagacatcattcaaaataatggaattcttaatgacacagttgttccccacgaatgtcttcttgaaaagaatcgaattctcgactgttccattaataatgcttccgcttgccacaagactgttcttaaccatggatcccggattatactttgccggcggcagatcactgaccttggaatagatgctcggctgtgtccggaagaaatactcccgtacttctggcttcaggaaatccatatttgtctgataatatgcatccactgttgaaatgttgctccagtaatcttttattttataaccgtagattttcttcagattcttatacctgatgagaatatcggtcacaaaatcatgtctgtcatcttctgcgcaacgttcgatcagatcgatcagctggcgtcttctgattacatagatacctgttgatacaatctgtgactgtgccaccatcggcttctcttcgaattcttcaatgcgcatagaatcattcattttgattgttccgaaacggctcgcatcttcgttcggaccaagttctttacaaacaactgtaatatctgctttctttgcaatatgatattccagcactttgttataatccatcttatatactgcatcacctgatgtaataataacataaggttcatgacaacgttttaagaaatccagattctggtatatcgcatctgccgttccgcgataccagtatccgttctccgctgtgatcgtcggggtaaatacataaagccccccttgttttcttccgaaatcccaccattttgaggaattcagatgttcattcagtgaacgtgcattgtactgcgtcagaactgccaccttctgaatgtgagagtttgacatattgctgagcgcaaagtcaattgctctgtagcttcctgcaatcggcatcgccgctactgctctcttatgtgtcagttcacgcatcttgttgctgttaccacctgctaaaataattccaactgctctcatgcctgtccacctgcctttatcaatgtttcgccactttccagtactccatccgggtaatcttctttggatgttacgccactgacagcagtattctttccaatctgtacgccatccggtatcacggatttttcacccacagcaaccagtccaaaggaatagatcgccggttttaatttgttcggcacatcgcttccgataccaaatgtaacattatctccgacaacacaattttcagcaatgatcgccttatctaccacgcaattctttccaattctggcgtctttcataataatagaatccttgataacagaaccttctcctataataacgccggatcctataatactgttatgtacctctccatacacttctgccccgttacagataatgcttctttctatcacagactgtgcggaaatatactgtggcggcaggatctcactgttggtatatatcttccagaattcttcatacaaattaaattccggaataatatcgatcagttccatattggcctcccaatatgatcccaatgttcctacatctttccaatatccgttatattcatatgcaaataatctctcgcctttattgtgacaatacggaatgatatgttttccaaaatcacatcccggctcgtccttcaatgtctcaagcgcttccttcaacgctttccatgagaaaatgtaaattcccatggatgccagattactcttcggctctgccggcttttcctggaactcctgaattcttccatcctcgtctgcgataacgattccaaaacggctcgcctcttccatcggtacaggcattgccgcaatcgttacatcggcattatgtgccttatgataatccagcatcacctcataatccatcttataaatatgatctcccgataagatcagaacataatccggatcaaactgctccatataatccaggttctgatagatcgcattcgcagttccggagtaccattcactgcttccacttctctcatatggcggaagcactgttacgcctccgtaattcctgtcaagatcccatggaataccaatccctatatgtgcattcaaccttaatggctggtactgtgtcaatacacctaccgtatcgattcctgaattaatgcagttgctgagtggaaagtcaataatgcggtacttaccaccaaatgcaacggccggctttgcaacttttgctgtgagaactccaagtctgctgccttgtcctcctgccagcaacattgctatcatttcctttttcctcatgtcatcaccccttctcagtagtcttgctttttttattatatcatacttcctcccatgttgctaacaatttttacaatttttcaaacatttccgcaatctttttgttgaattattacaaaaacttacgggttggattttttttgatatatgtttataataatatgaagaacatgtagtttttatgatgatatttttaccaaaatgaacataaaggatggtatattatgtataaaattaattttgaaacccctatacacgtacactttatcggaatcggcggaatcagcatgagcggtcttgcagagattcttttaaaagaaggcttcactatttccggatccgataataaagaatctgcccttacagatcaccttgagcagatgggtgcaaaggtattctacggacagaaagcttctaatattattcccggcattgatgtagttgtatacacagcagctatccatccggataacgaagaatatgccgaagcagtaagacagaagcttcctatgctgacccgtgcggaattactcggacagttgatgacaaactatgatatgccgatcgcaatctcaggtactcacggaaaaacaaccacaacttcgatgctttcacacattctcctcgccggagaattggaccctacgatttccgtaggcggaatcctgaaagccatcggcggaaatatccgtgtgggcgactctgaatactttgttaccgaagcatgcgaatacacgaacagttttctgcatttcttcccgaagatcggtgtgatcctgaatattgacgaagatcatctggatttcttcaaggatctggctgatatccgtaattccttccatcgtttcgctaaattacttccgaaggacggaaccctggtcatcaatgataacattcctgatctggaagagatcactgcagaccttgactgccgtgtgatccgttacggcaacgacagctcccttgactacagtgcaaccaacattctccacgacaagaagggtgaagcttcctttgacctgataaaatccggggaatttatcgaccgaatctccttatctgtcaacggagaccacaatgtatccaatgcattatctgcaatcgcagtcgctgatcttctcggagttcctttcagcaagatcaaagaaggtctgaagtccttccacggcactgaccgtcgttttgaatacaaaggtgaagtcaacggatttacgatcatcgatgattatgcacaccatccgacagagatcaacgctacgttaacagcggcaaaggaatatccgcacaaagaagtctggtgtatcttccagccgcatacttatacacgtaccaaagcgttattccctgagttcgtagatgccctgacacatgccgaccatgtgatcctcgcagacatctatgcagcccgtgagacagatactctgggcatgtcctctgagatgatcgcagaagaattaaagaaaaaaggatgcgatgcttactatttcccaagcttcgaagagattgaatctttctgtctggacagatgccagaaaggggatgtgttgataactatgggagctggaaacgttgtaaacattggggaaaacctgcttacccgctagttatccacattatccacacaattttatccacaaaaaagtcggatttcggctcaaaaatttcttttttccccggcttcccggtgctataatgtgtctacaatgaaacgaacgatacaaaggttccggggaggacggggaattattatgaaggaattaaaactcacaaaatatgtacagacgaatgcaactgtactggataatgaatttattgaccattatatggtcagagcgaatggagagtatgtcaaagtatatctcctgcttctccgtcatatgaatcagtcctccggatatctttctgtctccgaactggctgatcttcttgaatgcaccgagaaagatatccttcgtgcattgagatactggaaaagcgaaggactgctcgattatctggatgacactccggatgatccctcaccaaagagcacggctccttcaccggcagcctcttctggattacacgatgtgcagtccggctatatgacatcttccatacctgcagactctgtctctgactctgcagctttggcgtctacaacgaacatccagcagtaccgcagccgcaaagaacgtgcagagttcaaagaattactgttcgtagcagagcagtacctcggaaagacactttctgctactgatattgaccagattacttatttttatgatacactgaatatgtcagctgaacttattgaatatctgattgaatattgtgtcgagaatggtcacaagagtatgcattatattaataaggtggccttatcgtggcatgaagaaaacataacaactgtgaaccttgccaagacaagttcatttctctataataaaaactgttattgtgtcctgaatgcatatggtatcaaaggacgtggtcctgctgcctccgagattgcctatatccgcaagtggtcagaagaatatggattcgctttggaagtcatccttgaagcctgcgaccgcacgatgaattccattcatcagccaagctttgattacaccgattccattctgaagcgctggaaggacaagaacgtccgtcagttgaaagatatcgatgcggttgatgctgactaccgcaaagagaaagaacgtgcaaaagaactggcaaaagaacgcaagagacaacagcagactcagaaacctgtaaacagccagaataataagttcaataacttcgatggccgttcctatgatatgaacgatctggaacgccgtctggttcagcaataaattatacatatcagattttattatatgaatgcaagagagcctgtccctgacagtttttcttgcatacttaggtataaaggagtttccattacatggcactttccaattctcagtacgatcacttaatgcgtacttatgaacaaaaacaactggataatgaatttcagctcagaaagcgctatgagaaggcatacgctctcattcctgaattagaggaaatggatcattccatctcctctttaagtgtgaaaaaggcaaggctgcttttggacggagaccagactgctttatcttcattaaagtcagagatcgaagaactctctgcccgaaaacctgcactgttaaaatcacacggtctgcccgccaattatctggaaatgcattaccagtgtcctgactgtaaggataccggttatattggcacacacaaatgtcactgtttcaaaaaagcgattgtagactatttatacacacaatccaatctcaaagatatccttgacaaagagaacttttcaacctgttctctgacctattattccagaaatcatatcgatcctcttaccggacggtcttctctggaatccatggaaaccgcattaaatgtctgtcacaacttcgtagatacattctctgaagaatttcataacatactattgtatggagacaccggtgtcggaaagacttttctttcccactgcattgcaaaggagttaatggattcagcttattccgttatctactttacagcagccggactttttgatatccttgcagagaacacatttgggaaacggcagaacaaggattctgatgtatttgaacatatctacgactgtgacttactgatcattgatgatctgggaacagaactgccgaattcattcactgtatcccagctgttcatttgtctgaatgaacgtatattgagacagaaatcaactataatatctaccaaccttgcattggatgatataaaaactatttactcggaacggacattttcacgcatcagcagtaattacaccattctgcgtattaccggtgatgatatccgtatccaaaaaaaattattaaacctgggaggtactaatgatgttacgccgtaacgatcgtaatcttgagaatataccggtaggagcacttggactgattgctcttgacggttgtacagagatgggagcaaaggttaatgactatctcgtaaaatggagaaaggaagatggacatgttcataagaacgatgttgctttcacaggctatgagaaagacacatacttaattgatgcaaaagttccacgttttggttctggtgaagccaagggtatcatcaacgaatctgttcgtggtaaagacctttatcttatggtcgatgtatgtaactatagcctgacatattcactgacaggaaatgtaaatcatatgtcccctgacgatcattttcagaacttgaaacgtattattgctgcagtaggtggaaaaggacgtcgtatcaacgtcattatgccattcttatatgaaagccgtcagcacaagagaggcagccgtgaatctctggactgtgcacttgctcttcaggagcttgtccgcatgggtgttgacaacattattacttttgatgcacacgatcctcgtgtacagaatgcgattccattaaatggattcgagacaatccgtccgacttaccagttcatcaaaggtcttctccgtacattcaaagaccttcagatcgacagcgaacacatgatggcgatcagcccggatgaaggtgctacaggacgtgcaatctatcttgccaatgtacttaatcttgatatgggtatgttctacaaacgtcgtgacttctcgcgtgtggtagacggacgtaacccaatcgttgcccatgagttcctcggatcgtccgtagaaggaaaagatgtaatcattctggatgatatgatttcttccggtgacagtatgttagatgttgcccgccagttaaaacagcgcaaggcaaaacgtatcttctgtgccgctacattcggtctgttcacaaacggactggagaaatttgaccaggcatataaagaaggtatcctggatgctgttctgactaccaacttaatctatcagacaccggaacttctggaacgtccatattatatcaactgtgacatgagcaaatatatcgcacttgttattgatacactgaaccatgacggttctatcagcagcatcctgaatccgattgaaagaattcagaatgttgttactaaatataaaaacggcgaagaagtttaagattctaaaaatgctgcctggaaattcccggcagcatttttattttctatcttacttcaattcaacacgttatagttctattttatgataagcaattcccgcttccttcatcacctgttcttctctcttctgacaggtaaacaacaacacctgtttcttatgtgctttcagccacttaagtgtctgcagcattctctcttcatcgtaatatgcgaacacatcatccagaatcactggcatctcttcttcgcacaacagttctccgaccgccatacgcaatgccaaatagatctgttctactgttccccggcttacctgttcaatctccaccagtttttcgtctgtcacaagcgatacatgaagtttttcatctgtgacgagctttgtatattttcccccggtgatctcacggatgatcgcagaagccttctcattcagatctcttttcaaatatccgcgcattgctcctgacagctgctccagatgctctgctgccatctgaactgcctggcgtttcatttcgtattctcgggattgttcattgatctcatccaattctgccagctgctctccaagattatcatactgaattgttttttctttcagttcttctgtaatatgggccttttcccaccgtaacttctcgatcggaaccttttcttcttcctgtgtgatctcttccaaaataatctccggttccgtctttacctgtttctttccgactttcatccggttccatacatacaggccaaatgcaaggaacagtacaatcgccaccagataattccatggtctcgaaagtatgatcactgcagccacgataaccagtgcgaatatcagtatctccatcggatggatcctccatttttccggacgtatctcatccatgacacctcttccatgttctccttccagttgccgttctttccgtttttcttcctcttttccggctctgtactccagttcttcctccacccggtcgagttcctcctccagatgatgaacatcacgccagataaatgagacttcctgttccagtttttcacgcttctgctgctttctggacatctccatgcgaatctcattttccagaaccttcttcctgcctttcagttgttccaacgccccattcagatcgatctctccattgcctgaagtataataatttgtcgcgtaatttttcaattccatcgccatactttcgcccatctgtgcatttctctggctcatggaaaccgtattctcataacggtcaacattcatctctccaagcagcatccgcagatccccgtcctctacagaaaggacctctccatcctctatacagacaagctctgcctttttggaatatttatcaaaatttctttcaatacggaaatgtttccctccgcttgcaaattttaatgttccggaataataattcggattgtcccacggttcatagatgctgaatgtatcattctgcgctgctcttcctcttccccgttcgattccgaagagcatccctttgataaaggtatggatcgtagattttcctgattcattttccccatggatcagattgattccttcttccagattgatctgccggtcatgaaattttccaaagttttttaacaataattcattaatctgcatttttcggttctagcctcttcttgtctccatcaacgcccgtactccctcacagagtgcctgatactccaggctgtctgccggatacccctccaggctttcaatgtattgcccaagaatatttcctttattttcattttttaattttgtaaaatcatacgccggctttgtatgatccgtaatctccactacattaccatagggatccatatgatccaactcataccagatatccggatcacgatatccggttaatgtgatcttatacatatgctgcattccctgctctgcgatcatatctgtaattttctgcctcagtacatgaccggttacagatttatccacctttacctcgcagtttctgtattcccgcaacgcatgtggtacaaaccggatctgacagccttttccggtaattcttccctcgatatagccatgcctcccgatatctcctgtatccgtcggttccagcgaaccggcatacgccatcctgttttccaccaacagctgtggtttatgaatatgaccgaatgccacataatcatagccaagtgtcataatctgattgctcttgatcggaatgtgtttctcatcaccgccgtgtgcaagcaatatctcatatttctgccgtccttccgggactgcatgatcatagaccggatcatggatttctctggaatgataactgcatccatagacagccgtctggattcggtcaagttccacacaatcgatctcctgcgaacagatcatatgcacgtgcgatgcccaggaaaatgtcctgtaataagaatttttcttaatatagtcatgattgccggcaatcatgaccacctccgtatgttccagcatctccagtatggaattcatttcttttaattctcttaacaggggttgtctgtgaaacagatctccggcaatcagcaacagatctgtcttcttctggttacagattgttatgatatcccgaaagctgtcccaaagttcctgttctctattttgactgtaggcgtttcccgcgtccggttttgcccctaaatgcaagtctgcgatgtgtatgaacttcatccttgcttccttctttctgttctgtcttttccttcgatggcaatgtcacgacaaactgcgtctgattgtcatcactttttgccagaattctgcccccatgcagctccacgatctgtttggcgattgcaagtccgagacctgcgccgccggttcccgttgatctggaaccatccacacggtagaatttttcgaatattgtctgaagcatatcacccggaatcttatctcctgcattggtaaatgtgatctcgatatccccgtcctttatctttgcttcaatccggatctccgtatttgcatagcagtaagcaattgcatttcttaagatattatcaaatactcttgcgagcttgtccggatctccgtagatcatcagatcttcttctacatccacttcacaggtcagtttcttctcctgcagaactccgtacagctcgtctgccagctgttccagcatcatcgtgagatcaatctctaccggttccaattcaatgttctgaagattatatctggtgatgtcaaagaattcgttgatcagttcacccagccggatggatttttccagggcaatatgtgtatatgcttctcgttcttcttccggcatgtccggatgatcttccagcatcgtaagatatgccacaatggaagtcagaggtgtcttcagatcatgtgccagaaaaagtaccaggtcatttttcttcttttcaccttccgttgcttccagctcctgccgtttcaatgtcgctttgatctcatttaaccggatctcgataggctttaattctgtaatcaggtggatgggatctgttgattccgagatgatattttcaattccgtgatcgatctgatccagatatttagtcatctgggaaagtgccacataaaagaaaagcgcaaaaaggatcagataaccaacgatcatatagaatgtcttgttatctccgaccagtttccaatagaggtggatcgccgtcttttcatttatattcagaaacaccagagcatctacaaaaaacctggcaaaactgtcattataaattccatcgatcacaaatttgagcagtacccctcctaccaaaacggtaagtgctgtaaccagcactgtctgcaggaggatactgaatttcaatttccgataattattcttcaaccttataacccactccccacacagtcttgataaaatcagacttgcctgtcggtgcactcatcttctcgcggagatgacggatatgcaccatcaccgtgttgttactgttcttataatatttctcatgccatactttctcaaataactcttccgagcttatgacctttccccggttctcacatagaagccagaggatgtcaaattctatcggagtcagtgtcagcggcacttcattgtatacacattcatgagacgtacggttcaaaagtaatcctccaaagtccagcacatcgccttcttccttggttccttcgttgtattgtgtatatctgcgaagctgtgctttcactctcgcaactaattccagtggattgaacggcttcggaatgtaatcatccgctcccagcgtaagtcctgtgatcttgtccatgtactccgtcttcgccgtcagcatgatcaccgggaatgtatacttctgcctaatctgcttcagtatctggaaaccgtcaatatccggaagcatgatatccaggatcgcgaggtcgatcttcatattattgatacaatccagtgcatcccggccgttataaaatttgaatactttgtactgatcattctgaagataaagttctactacatcagcgatttccttttcatcgtctactactaatatattcatactgccctcgattctatacagggacgggagatttccaaaaatcccccgtccccatatatatttttatataagtttttcaagtgtcgttatccaccattacagttcgcagttattgacagttcttgggaacggaatcacgtcacggatattacccattcctgtcaggtacattacgcatctctcaaatccaagtccgaaacctgcatgtcttgtagaaccgtatttacgaagatccatgtagaacttgtagtcttcttccttcagtcccagttcgtccattcttgatttcagcttatcgtagtcatcctctctctggcttcctccgataatctcaccgattcccggcaccagacagtctactgccgcaaccgtcttgccgtcatcattcagcttcatatagaatgctttgatctccttcggatagtccgtcacaaacaccggacgtttgaagacttcttctgtcagatatctttcgtgctctgtctgaagatctgttccccatgttactttgtactcaaatttatcgttgtgtttttcaagaagttcaacggcctctgtatatgtcactcttgcgaaatcagaagatactacattgtgcagtctctccagaagtcccttatccacaaatgaattgaagaaattcatctcttccggtgcattctccagtacataattgatgacatattttaacattgcttctgcaacaaacatattgtcgtccagatctgcaaatgccatctcaggctcgatcatccagaactctgccgcatgacgtgttgtattagagttttctgcacggaatgtcggtccgaatgtgtaaatgttacggaatgcctgtgcataagtctctccattcagctgtccgcttacggtaaggcttgtctcttttccgaagaaatctttggaataatctacgcttccgtcttcattcttcggtacattattcagatccatagtcgttacctggaacatctctcccgcaccctcacaatcacttcctgtgatcagtggtgtatgcacatatacgaatcctctctcctggaagaacttgtgaatcgcatatgccgtcagagaacgtacacggaatactgcttggaacgtattcgttctaggtcttaaatgtgcgatcgttctcagatattcaaaactgtggcgcttcttctgaagcggataatccggtgcagatgctccttcaacttctacggtatctgcctgaatctcaaatggctgctttgcctgcggtgttgctaccagcgtacctgtaacgatcactgctgccccgacatttaacttggaaatctctgcaaagttatccatcttgtcatggtatacaacctgtaaaggctcaaagaaggttccgtcatttactacgataaatccgaatgctttggatccacggatacttcttacccatcctccgattgttactttctgatccatgtatgaatctctgtttttatacaattctctgattgttgtcaattccataccaatgtttctcctttttaaaaactcacatatatttctattataccatatccccctggtttatgttatactatatttactgaatttaaaaagttaggagattatcatatgaagaacttactagttgcacagtccggcggaccaacttctgcaatcaacgcaacccttgccggagtagttgagaacgcactttccagcccatccgtagataggatttacggatcgatcaacggaatccagggagtgctgactgagaacctgatagatctgaaaactaaacttacaaatgtatccgaactggatcttctttgtcagacccctgcttctgcactcggctcctgccgtgtgaaattaaaagatcctgctgtgtgtgcagatgaatatgagaccattatctctgttcttagaaaatacaatattgactgctttatctatatcggtggaaatgattccatggatacagtggacaagctttccaaatatctgaacgccaagggaatcacagatattacggttgtcggtgctcctaagaccatcgacaatgatctctgcggaacggatcactgtcctggttttggttctgccgcaaaatatatcggaactacatttgccgagctggaacgcgactgccacgtatacgcaactaaagcagtaactatcgtagaagtcatgggccgtgacgccggatggctgactgcagcttcctgccttgcccgtacaaatggtgcgaaaggacctgacttcatctatctctgcgaagtaccattcagcattgatacattcttaaaagatgtaaaagcaaaactggaagaacaggatgccgtgatcatcgctgtcagcgaaggcgtgaagaacaaagacggccgttacatttccgaagaagtacagagctctgctgtagattcctttggtcacagctatatcgccggtgccgcaaaggttctggaagatgctgtcagaaatgagatcggatgcaaggtacgttcgatcgaactgaacctgatgcagcgctgcgccgcacatcttgcaagtgctaccgacatccaggaatccagaatgctcggaaagaccgcctgccagtatgcgctcgagggtgcaaccggtatgatggctgctgtgatccgtacttctgataagccttatgctacagaattcaaggcacttccagtatgtgatattgccaatgcgatcaagagtgtacctgcggattatattaatgatgcgggaaatgatgtgacggaaaagatggtggattatctaacgccgttgattcagggtgaaatgaatacggtgtatgagaacgggattccgaaatatctttatttgtattaaattgggatttaattcaggaaggcatgattacccggacctgcataaaaagtaggaagctgttcctgttcaggttccgtcggtgggaaatactaaagcgtcaaaattatgctaaaaacgggcttccgaaatt

SEQ ID NO: 2788 - DNA, 96265 bp, Unknown
  gut microbiota DNA sequence
acagaattatttacacactcacagccagaccgcttacctcaaagcatgtaatccagggatattccatataattgatgctgatatccccgtttacagtaaccccatcaggcagataatagacatttccaagaggactggtctcgcagacatacccctgtgcgagcatatcctctttttctttatcggtaaatcctaccgatatctccagacgcggaggggcacatcaactggtgattgtttcgatggaaagtatgatgttgcggaattcgcgtttattcatataggcaatagcattgtcgttcaggtgtaccatatgttcaattcctttcataatttaataatattacagcagtaattgtaaaacaaagtccacagatggaaagaatacctggtgtttcggcatagagtaccgctccgaataacatggcggcggcaggctcgctggaagcgagaatcgatgccttgccggcctccatatagcgcatggataaagaatatagtgcataaggcaggacggatgataccagcgcatgaataatcaggataaaaaaggtggtcctttgccctgagacaatcatgctgcttaaagagtgtatattactgaaaggcagcattgtcatgccggaaaagagtgtgccgtaaaaagtaatcgtcaggaaatgatatcctttttgtgtgacttttttgcttatgattccatatacagcatagaaaaagcttgccagaattccgcagagaattcctgttatgctccaggaaagtccattgctttccagtactccgctgaccagcacacagccaatgagggcgagcgttacacagatcagtttgtgtctggttactggttcatgaaagaagacagcagccaggaacagaacaaagaccggagacatggcaagtaatacggcagaaagcgcaagagatcctttcgtaacggaaatattataaaagacactgagggcagtcatgccgatcatgccgcttccgataaaaagccagaagtcacgccggtgtacataaaataaatgtcggttatagaatagaatccatatgccagtgatcagagctgcaagcaacatccggaaactaataatggaaaagttatcgagaccatcgtgttccagtgtacggacaaagattccggcagcaccccagcagatgccggagatgaatggcagcagccaggcgtatttggtaagtttctgattcataagtacccaatcctttgtaaatataataaattaagtatatcacaaaaacggacattgttatgagaacatgtccgttttgtgcatttttatgaatcactataatcgattggaattatctttcaaatgaatatattccgctacagatcggtcaaaagtcttgatatgctggaacagccagtctacgacattgcgctttacctgttcgataaactgatcatcaggcccttcgttttcattaagataatcatataattcctgaatggatttcttgaattcttcatgtttggcatgatgtgcggcaagttccgggtaagatacctttttctgaagttcctcttcttcctgaaaatgaaaatttgtatattcatcaaggtaatctaacattttgattgctttgatcttactgtcaccggattcgcatgctgcgacgaactgccggatgcggtcgatcagttcctgatgctgggaatcgatggtcttgttgcctgtaattaagttatcgtcaaatgtaatattcatagagaaacctcctgtctttggtacacattgaatcctcgtcccgcatagtctataatgaatcgtagaaaatgtttatcagcagagaaaaggattggattatgaagttacaacagttacagatatttcagaacctgacagaagaagaactggaaaaaagtcttgtctgttcacaggctgtagtaaagaaatatccgaaagatacctatattttccgccagggtgatgtgccgttaaaattatatttcatattggaaggaatggttgagcttggcagtatcaacttgaatggtaagattacccggagcagttacgttacggtgggtgaggagtttggcgaagtagaaatgtttctgcgccagtctgcttactccggttatgcaaaagcaaaaaatgaagtgtcggttctggaggtttcacagaatttctttggcggaagatgcgaaagaaactgtgtacatcacagtaaggttgtcttcaatatgcttcagatttttgcggaaaaagctgagaaatgtaaccgtcagatagaggttcttaccagtggaaacttacgtcagcgtgtagcggcgtacctgttggaaaactgtgatccggactatcgggtccgtttgcatatgaacagggaagatctggcagtatatctgaatactacaagaccatctctgtcgcgcatgctgcttactttgcaggatgaaggtatcatccgtcttgtggaccgtaaggtaatcgaaatcacggattatgaaagactgcagtcggaagagtaattaatcttctgcaacaaatacttcttttcctaatccgcagattggacatacccagtcatccggaagatcttcaaaggctgtgcccggtgcgattccgttatccgggtctcctacagctgggtcatattcgtagccacatggttcacatacatattttttcatagttaaaatctccttttattagaatttaattggttgttgattgttgctgcacaacttatgttgtgattatagtatatcgcttttattggagaaaaaatgtaacaaatgttacaaaaataagataaactgataattatacgtcaattcaattaaaaatttccatatacatgaggaaatagactggttgaggaaaaatttgaaattttatatccttagtacaagaaagaaaatcgcggtttcaatctgagaaattattcatgcagaatatacagaaaggaaaaaatagtatggaaacgaaagtgaaaaaaggatatggaaaaggatgggcattgattctttatgcattccttgcatattttacagcaactgcagtaggtagtgcaatgaacgcagcgtcaggaacgttgtctgaattaagaggatggaatgcagcattattaacaagctttatttcattaggatctattgcaaatgtagttgcaggatttgtttttggtaagttatcaacaaaagcttcagcgaaaaagctgagtatcatgtgtagtgtgatctggattgcagttgtagtcggaatgggagtgacaactaatctctgggcatttgcattctgcctgatcattgcaaatggtatttccagtgcgcttggatatcagctggcaccagttatgatttcaaaatggtttcctaagagaaaaggaattatcatgggaattgtaacaatgggtattccgctctgctcaggatttgcaacaatgatgtaccaggcaggatatgcagcaatgggatctctaggtggatttcttccatttattgcagtattggttgtagcgttgattgtactcgttgtattccttgcggatgatccggctgacaaaggattcaatccggataacggagcagaagcagaagcggaggaagaaaaaggaattaataaagaaagcatctggacaacacagaaacttctgtctactccacaggtatggattcatggtcttacacttggtgttcagttgttgttcgccagtggactgatggttcagttattcccaagacttctggagattggatttgatccaggaatggcaggaatgatgatgcttgcatctggtcttcttgctctgccaggctcttacttatgtggtgtgattgattctaagatcggagcaagaaaagcagcatatacttcatatgtattcggtattcttgcaatgcttctgaaccttacaggtaatacggtatgtgtatggatttcattggtatgtattggtatggttgtaggtggtgcagcaaactggccggcatcactctgtattgaagagtttggagacagcttcgcaaatggatatggtattatccagccaatgattcaggtagtcggagcagttggacctgcattcttcgcagcattttacggaatgacaggaagctataagataccatatatctgcggtgctgtattaatgtttatcggtctgattggatttgcgacactggcaaaaccaggatttgcaaaaaaagaagaagagaaatataaaaaataagggatgatatcagatgaagacatataaagtatttactgtaaatcccggttctacatcaacaaagatcgcagtgtttgatggagaaaagaaggtctactcagcaaatgtcagccatgattcaaaggtgttggaagaatataaaacactggaggatcagctggcttacagaaaagcaacaatagaaagtcttttgaaagaaaatcatatagacctggaaggtctggatgcctgcgttggtcgtggaggcggtctgcttgcaatggatggcggaacttatgaaatcgatgatcttgttttggaacattcgattcatgctaaaaacggagtagtacatccggcatgtctgggaccaagtattgcaagagaatttgcagagcagtatggtgcaaaagcatatgttgtcaatccgccggatgtagatgaactgcaagatttggcgcgtatgaccggcatcaaaggtgtatatagaaatgtacatcttcacgcattgaatttaaaagagacagctatccgtcatgccagaaatatgggaaagaaatatgaagagtgtaactttgtagtctgccatatcggaggaggtatctcggtatcggcgcatcagaaagggaaaatgattgacggatttgacattgtcggtggagaaggaccgatggcacctaccagatgtggaagtgttgcagtgtcagatgtgttgaagtattgtgaagacaaagagattaagactgtgaaacagttatgcacgaaaaatggaggatttgtcaatcatatgggaatttcagatgcactggaactgacaaaatgtgcagcagatggagataaatatgccggattactctgggataccatgatctatcagatcgcaaaatgcatcggttctatggcagtcgtgctggaaggaagtgtagacggtattctgttgggaggtggaatggtctacaatgaagatttggttgcgaagcttaaagggtattgcgaatggattgcgccgataagtgcatatcctggggaatttgaaatggaagcaatggcatccggcgcagaacgtgtgttagatggcgaggaagaagtgaagaaatatacgggagaatgtagatttcagggatttgattttataaaataatggcgatggaaaagggtgccgcacagataaaaatgtgcggcaccctttttgtaagctgacattcgtccgaaagaaactgcgagtggcaggttttgcagataccaaagtatgtaaaaggaactgacggcagcaaatcctctgcattactcatatgctttaaagaaatcaataatttcctttttagtctttagcatccgcagagtgtcaatgtcaagcttgtcattataaaaaatatgcagaagccggaacaccagagtcgcatcatccggacggaaagctcccataataatgatacggatcttataggaattccacatgatccggtgatccagtgttgtgattgataatcgtgtttcctttgcgggaatcagagaatgcaagaacagaatcccgggaccagtcgcattagtggcgatagattcccatcttaaaatatcagacagataagacgtatcggtcaggttattctgtaaaaaatcttcagccattgtctcaataatggtgaatctgtcggtgaatgattctttttcatgccagaatgcatgctccagcaaatgaccgagtgttatatcagatgcggcgcataaatgttcgatacgctgctcgttgatgtattctgacagaagcagatagtcatccggtgcgagaaatgggctgatctgtatggtatcaataccgggaaaattagtaattgatttacggacggttgataagataagatctgtattttgaaaatcataaatattcttatcattcacaggcaaaagtgccgttacattcaagtatttatcaaaagctcccagaattttccgcttaagtgcccaggcagccggcatattcatgtggcagaagatgaccgttttcatcttggtctcaggatgtatctcaaacaggaattccacagcacctgagatgcagtgagccagatagagcagttcattctgattcaggtaatatccaaggtattgctgggcgagatcctgaaacaggtatgcaatctcgaattctacattcaggattcgtttttcaagatcctgatttccctgtgtattgagaatgtgtgtaggagcctggatgaactggatgtaggataaaagcgtgatatagaaatcctcatcttcagaaaaatccagatggaatacatcctgaattctgtctatgtaagctttcgctagctggatggtaaccggaccaaaatgctgtgagatattcaatggtgtaatgtcggatacatcaggaagatgtccggaggcaatccgctgataaagatcatcccgttcttcgcggctgaaagagcaatggaactgtccttccagggcatctgccagactgtcggaagccaggctggccggagtatcaggccggagtacaggtgaagccggtggcagctgatggccggataatactcggtgatacatgatagcagcagcaagattcaaagagacaaggcttgggtcttccatagatattccgtatttatccagatgtaagggtacttcatccataatgtaatccagcacgtctttattcagaaatgtatatccgtaatacgtgttccagttgtgattataattccagtcttcatgaaataaccggttcagaacagagcggcgtttttgttcattttcttcgaatgtaagaaagtttcgcttctgttctaattttatatagggttccgacaatacatatttcattttgagactatgcagatcgtgttccagtgttgtgtggcttatgaacatttcatcttctagatcaaagagatttagatgttcatcggtcagacacagtcggaaagcaagataacggatgcgatcttctttggtaaagaatgcagtgtcaatttgatttagctgttggatgatttcggggttttctgcggtataaaggtatcctttactgcgcgcggaaagaatctttgcgtgatagggtaagatgttttgattgatttctacgatatcactgcggatcgttcgtggtgaaacacctaattgctttgcaagttcatttccggtgatataagtagtctgttcctgcatcatgtggagaagtttccgttggcgcagagatagattaagcttgtccatgataaccgtcctttcgtatatttttctgagtatattttatcaaaaagcattgccgttttaaagaggaaatatccaatttgagaaggcggaggaatgagattaagataaagttataaaaaacaggaggtcttaaagatgaaatacgaaaataccagaaaaattgttttagatgctattttagatgcagtagatatggggctgatccatggaacatcaggaaatattgccatgagagatgataaggaagatgtagttgcgatcacaccaagcggaatctcttataaagggatgacagcagatcagattgccatcgtagatatgaatggaaaatggcttgatggaccattcaaaccatcttcagaagtcccaatgcatacagcagttatgagagcaagaaaagatgtaaaagcaacggtacacacacacggaatgtttgcaacaatcgcagcaatgagcggagaattacttccaattacaccaccgcaggcagaattcgttccggtaggaattgttccatttacgatgccgggaagtaacgatgttgcggataaagtagttgaggctcttggagaagaaggaagagcagtcctgatcaaaaatcacggaatgttctgctgtgggaaagatatgaaagcagcaatggcagcaacaatttatacagaagagatggctcagacaacatactatgcaaaggttgcaggtgtatatcagccgatgccggaagaagctgttaagaaaatgaaagaactgatcgcagcagaccaggcagtgtaggaggaagaaaatgagttttaactttttcgtaaaaagcaatattacattcggaagaggtgcagtagagaaacttccggagattattgcaggatatggattgaaaaatatcatggttgtgtatgaccgaggagtaaaggcagcgggaattgcagaacgtgtgatggagcaggtaaagaaagccggagtaaaagcagttgtgtttgatggagtcattccaaacccgaccaatgaagtggtagaagaagcagcagcaattgcaaaggaagcacaggtggacggattcgtagcagccggtggcggaagcagtattgaccttgcaaaagcaatcaatgttctgatgacaaacccaggaaagattggtgaatacggcggaataggaatggtaaaaaatgcatgccttccactgattgctatcccaacaacagcaggtacatccagcgagatcacaaatgtaagtgcactgatcgatacagagaaagtaatcaaatatgtagtcattgacaacaagatcgtggcatctgacgttattgcagatccagatttcacaaagacagtaccggcaggcgtaactgctgcaaccggaatggatgcaatcacacatgcagtggaaagctacatttccaatatggcaacaccattaacagaatacaactcattaaaaggactggaaatcttacataagaaccttccgaaagttgtaaaagatggttcggatatggatgccagagaacagatgatgctgggatgtatcattacagggttcggattctccaatgccaatctcggactggttcacggtattgcacatacactgagtgcacatttcggactggctcatggaatggccaatgcaaccgtacttccttatgttatggaatacaatgcaggcagctgcccggaaaaaatggttgatcttgcaaaagcaattaaacttccggtaacaggtaatctggatgaggacaaactgcttcttgcaaaagaattgaagcgtctgacaacagaacttggaatcaagactctggaagagcagggaataaaaaaagaagacttcgatatgctggcagatgatgtgttaaaagagcctgtgcttggattcaacccacgtcagaacatcacaaaagaagatatccttgcaattcttgaaaaggcattttaatcagaaaggattaacgataaggtgagtaaaggaaagaagataaaaattattatttcaattgcagcgatctcgttcatccagggattacagtattgcgtatcgcctgtgcttgggcagatacaggaacattatccggatgtcaatatcagtctggtccagatgctgattacagcaccggcgctgctgtccatgatcgtggcagtattgtccggatggctggtcttaaagatcagcaagaagaaattacttctgtttgccagccttgtagcaggaatcaccgggttccttccgtatctgtcggatagttttggtcttctgttcttttcacgaacattttacggtgtaggactgggacttgcaacggctctgaatacagcagttgtggcagagttctttgaaggagacgagcgggtgtccgttatgggaattcaggcggcgagcgtaggtgcaggtatggttgttgtaacaaccgtcggaggaatgctgggtgccggaggatttaaaaatgcatatctaatcaatgtgatcggctttatttctctgatattgattgcatgctgccttccggataccggaaaagcgcaggcttccggctcggaaaaaattcagctgaacaaagaagtttttaagatctcatttctgggaatgcttgaatttttattcctgattacatttacaacgaatatagccatgcatctgagcggaaatctggcaggaaatacagccgtttccggaaatctgacgggcgtattttccggatcccagattgtaatcggattaatccttggtatggttacaaagattacgaagaagtatacacttccagtggcgatgttaagtttcagtatcggtggactgttactgatcctgtttccgtcgaacctgatcatgctgatggcaggagcagtgttctgtggattttctcagggcatcttcattccacaggcgatggtggatgtcgcaggggctgtaaaaccagtggcaacagcgatggcatctgcatgttttacctgtgcaatgtgtttcggtcaggtaatatcgccaacggttctgaataccatctcgaagctggtattcggcgaagtttccactacgaatgtatacatcatttccgtgattggaatgacagtagttgcagttatcacaattattatgaaaagaagaaaggaaaatatataaaatgaaaaagacattagcactttgtactccaattccggagaaacagatggagtatatcaaagaacagtgtgacattacaatctgcggtgagttaaaacacggaaaaggaaatgtcacagaagaaatgacaaaagaagaatgtatgggacatgaactggttgtattaggagacgaatatgcaggtgcagatacgattagggcatgggcagagtctggcatgaagttcatgggagttgccaagggaacacctgcaaccgtagatcacaatgcgatcaaagaagcaggtctggaattatcttatacacctggaagaaaccgtgttgcagttgcagaatttacaatcggacttatgatcgcagttgcaagaaaactgacattgagttgtacaggattatccaagggagaacatgtaggagaacctatggaagacatttatgacgtaccggatgtaaagaatgttacatttggacctctggatgagaagcatccatttgtagattacggaatcgggtttgaattatacggaaagaaacttggtgttgcaggatatggtgcgatcggacgtgaagtagccgtaagagcaaaagcattcggaatggaaatccttgcatatgatccatacatgccggcagagaagatcgaagcagacggagcaagagctgttgatctggacactatgcttgcagaaagcgacatgatcagcatccatctcccggttcttccatctacaaaggggattgtaaataaagactggttctctaagatgaagccaactgcttatgtgatcaacacagcaagagcagccgttattgatcagaaagatttcgtagaagcacttatgaacaagacaatcgcaggtgcagctgttgatgtgtactggaaagagccggtaccggcaaatcatccactgttatctatgcgtaatgtagtatgtacacctcacatggcaggacttacaacagacgtagataactggtcaggtacgatgatgggagaagagattactgcttacctgaaaggtgaaccaagaaaatatatatggaaagtaaaaaaataaaaatcagaaacaaggaataaaggaaatgtaatgggctgttcatcagcccattttcaaaaggaggatctatatgggagccaaatgttgtaaaggaaaagaaaaatacccgcatttgttttcgccaatcagaatcggtaacatccgattaaaaaaccgtattatcgcagcaccgacaagtcctagtatgattacgacagaaggacactttacaccggaaatgactgcttatctggaagagaaagctaaaggaggagttgctgttgtaacgtatggggaatcaatcgtacattctgcgacaggaaaatctcataacaaacagttacagttagattcatttggagtcaaacagggaatggcacagactgcacgtgcgatccacaatgccggagcttatgccaatatccagctgtcacacggtggaaaatacggcggactcgtcagcgtaggcggtgaccaggatggctgtgaagttgcatatggtccaagccatgagatgacaccagccggggaagtacaggagatgccgaaagagctgatcctggagatcgtggaatcttataagacaggagcaaaactgtgcaaagactgtggattcgatatggtacaggtacatgcagcacacggatggctgttctcacagttcctttcacctgtgatgaatcagagaacggatgaattcggaggctctcttgagaaccgtgcaagattccttatgatggcactggatgcagtcagagaaggtgtcggaccaagatttccgatcgagattcgtatctcaggagatgacctgacagatgtcggactgggactggaagactgtgtaaaagttgcaaaaatggtagaggataaagtagatctctttaatgtatcctgtggaaaccatgaagatcctgccatgttctgtcgtacccatccatccgcattcttcaagcgtggcgtgaatgtatatctggcagccgagatcaaaaaaaatgtaagcaagccggtagcctgtgtcggatcgttaaatgaccctgcacagatggaagagatcattgcaaccggacaggcagatatcgtagagatcggaagagcactgcttgcagacccatatcttgccaagaaagcactggaaggaaatgcagaagatatcacaccatgcctgagatgttatgaatgtttcggagagacttccaagagtgagactgtaaaatgtacagtaaatccaactatgggacagcagtatccggagaagacaagaaagcagaccgcagacacgaagaagcgtgtcctgatcgcaggcggaggtccggccggaatggaagcagcgatcacggcagctttaagaggccacgatgtaacactggtagaaaagagcggcgaacttggcggtaatctgcatccggcaggagcggcatattttaaagaagatatccgtaaattatgtaaggccctgatcagccgtgtagaaaaagcaggtgtgaaagtagttctgaatacagaggtcacaccggagtatgtagaaacatttgacccggatgcattatttgtggcaattggatcgaatgaactgcgcccgccgatcaaaggtatggatctgccacatgtgataatggcgatcgatgcagagcttcatcctgaaaaattaggaaagaaagttgcaatcatgggaggcggacttgtcggaggagaagctgcagtatccttccaccatgaaggcaaagaatgttcgatcattgagatgaagagcaagattgcaggagaagtgaattcgttctacagaggaggtctgatgccggagatcgagaaagcagccacatgctatgccgatactaaggtaaaagagatcgttccagagggagtactttgtgagaaagacggaaaagaattcgtaatagaagcagattctgttgtatgtgcactcggattccgggcaccatacgacaaagtcgatgcattatgcgataaagtggatgaatattatatcatcggtgactgcaagaacgtcggacagatctatcacgcaaccaatcaggcttattacgcagcaatgcgtttgtaaaaaaggagggaaaatggatggagaagctgaatattctgcttatcaccggaattgtaacagatgaacacactccgcttatgaacccgatgatccgctatatgttggaatcaacagagagatttaaagttaaaattacggaggaatttacggggtgtactgctgagacactgaaaaaatacgatgcagtatttattaattatgatggcaaggaatccattgagacaccgtttgtgaactggggaaagacagcagaagaggcactttatgaatatgtaaagaatggcggcggatgtgttctcttacatactgcaattatgaaccctacaggacgtgtacacgatgatgaatatgtaaagcttgtcggattcgattttgaactgaagggggctgccggcgatattaacggcgttcgtaagaatccggcattggagtatgtcattcatacgcaccgggatgcgcatgaaatcgtggctgtaaaccaggaaagctggatgacggttcaggaagacgtatttgcgaatgcaaaacaggtggatccggacattacggtactggcatcggtgacagacagactggaagactatgatcttaataagatgcaggatcatgtggcagccgtttataaaggattcgatatgagcaaacttccgggcatcaatgaggaagtaccggtggtatggacacacaactatggaaaaggacgtgtattcgtatgcgcaatctgccatggcccggacacgttatgccgtccgaatatgacttctatgctttgtcgaggtaccgaatgggctgcttcaggagaagtcacgattccatatccagatattcaaggtgaacgacgcaagaatgcatggccgttctacaacaatattacatggtctcagatgggtgagattaaaaaatggtaaccttttaaaattttattttcttttgtgggacaggtatggcttttgctgtacctgtttttttgagttaaattatattgccgtaataaagcggaaattatgaaattgtcttctgcacaagaaatatctatactgaatttaacaaataaagcatgaacatttgaagcagtgcttcgtccatggaataaaaatgcaatacaaggaggatacagtgatgaacagagaggaacttttagcaaaaattattgaattcgcagcaatggcattcaacaaagatgcagctacaatcaatgagaacacaaatatctcagaagaattaggggtggcatcttcacaacgtgtagcaatgagtgcttccattgagaatgatttcgatgtcatgattccggttgcaagatttggaaaatttgaaactatcggagatcttgttgattttgtaatggatgagatgtaaggaggaaattatggtacacaatgtaaaacttggaaaaaatatgagaagtgtatcgattgttggaatcggtgcaacaccattttttaatggcgtacagaatgaaacatacaaaggacttacgaacggggaactctttggacatgctgcactggatgcaatgaaagatgctggagtagagccaagagatgtgcagtacttcttccacggatctgcaaacccgcacgtgctgaacaactgtattacaccgaaccttcaggtggcagactggtttggaatgagaggaaaaggatcattatctcattcggaaggttgctgtaccggttacattgcactggaggaagcagtattcgcagtcgccagtggagcgtatgatgttgtgcttacaggatgcagcgaacagggaacaggaatgccagatggaaacacaccggatcatatgcgtgttccacttacttcagaagtattattcccggatctggattccatctttgaccgtgcttatggaagataccttggaggtggtcctggtatgaaccatgatgactggatcaactattatgcaaaagaaaatggactgacaccggaacagattgatgacgttcttgcacatcaggcatatcatttccgtcgtgcggcagaactgtgcccgagagcaatccgacgtacaccatttgaccagatggcaaaagaggctggatatgatgatgtatgggaatatatgagatccagtcataacccgaagatgacacagtacttaagaactgcaagtgattcctgtgttgctgacggagctgcggcatgtatcgtcgttccgacagagattgctcataagtttacagataagccaatcgaagtattagcagttggagcatctgtactggatgcaatcgttccacatcttgaaaagaaagcaactgcagaagcagcacgtcaggtatttgaggcaacaggtctgacagctgacgatatggatcttgttatggtcaacgattttatcggatcttctgcattccttgcagctgaagagattggatatcttccgaaaggagaaggatggaagtatgttcttgacggaagaatcgcttatgatggagacaaaccaatgaatacgaacggaggaagaacttcttacggacatgcattcggtgcatccggaatggcagacgtctttgaagcagttactcagatgcgtggagaagccggagaacgtcaggttaagaaacttccgaaatataccttccttagaggatttggtggagcgcagaacgttcgtgcaattattttgaaatctaatttttaaggaggtataaagatgagtccagagagaatgaaaacagaagaattttggaatccggaacatattgttgagaagttctggaatggattaaaagatggtgtgatatacggaagaaaatgtaaggaatgtggagcaatcgaatttcctcctcatcttgcatgtaatagctgcggatatcatgaaacagagtggacaacactgaccggaaagggagagttaaaaagctttgtgttcacaggtgttctgaatgcaagactggaactggaagaccgtggtctgaaatatgtatgcggtgaagtccagttagatgaaggacctgccattaatgctgttattcttggtgtaaacaagaagaaagcaagagagattgatggaaaacttccggtacgtgtccgcccggtattttacgatatgggaagatatacgacgttattttttgaattagatgagtaatacaggacaacagtaacagtatggaggaaaattccatgaacgtattagaacagatttatgcgaaagcaaaagaaaatccacagaaagtggcttttccggaggcttcgaatgagaaaatgatgcaggccgcttatgaaactggaaaagaaggatacatcattccggttcttgtgggggaagcagagaaactgaaagaacttgctgaagaaagaggctatgatccatcggtatttagttttgtagatatttatgatgagacatacacaaatgatgtgatcagaagatatgtagaacttccggatacaatttttaaagagaaggcaattggaagacgtatgcaggatccactgtattatgcaatggcaatgcagaaagtcggcgatgcagatgttacatttgccggaatcgataacacaactggtgatgtactgctcgcaggtcagatgatcattggaatgaagccgggaatcagtacaatttcaagtatcggactggcagatataccaggatatgaaggcagtgaaggctctcttctggctgtcggtgacagtgcagtgtgtacaaacccggatgctgagcagttggcaagcatcgcaatatcagcgtgtgacacggtgcaggaacttcttggctgggagccgagatgtgcgatggtatgttattctacacttggaagtggtcagggagaactgattgataaagtgacggaagctctgaaaattgcaaatgaacttcgtccggaactggcaattgatggagagtttcaattagatgcagctatcgttccggtggtagcggaaaagaaagtaaagcgcgaaagtaaagtagccggtaaagctaatattctgatctggcctgatctgaatgttggaaacacagcagtaaagctaatccaacagtttggtcatgcgaatgcatatggaccgatgctccagggatttaacagtattgtatgtgactgctcaagaggagcaccggtaagtgaaatcaaaggaaacgttgttatctcggcggtacgtgctgctgagagcaagaaacgagtttaacagaaggttcaggaccttcgtagcaaacagataaaatgtgcccatgatttaagttcgtttgataacataagatagccggatctgaacaggagacggacaatgtaccttgtacattggaaaacgtaaaagaaaaatctgtcagatccgtatcaactccaattccatattttttaacgtaggcttccttcaatgtccacaggcggtaaaaccattcccgattctcggaaaggtctgcattgtgggactgaaggaagtctttttcagattcggagagtgcacggtcaactaagacatccggataatatccgggaaattcagcatcgatcccgatcggacggtcatgaaagacgcaggcagcgagctggtcacagtgtgtaatgttaaaacaaatttccgggtggtctggcaggtatggtttgccattagcgtcggttttcagggcctgttctagttcttccggtgaaaaggaaagctggaaaagatcctgcaatccctgaagcagaagcgtatgtccaaggttgtgttcctgtgagctgatagcggaaatggagtcagaaataggtgtataataagcgtaatagatagttggcataagtgtttcctttctgatttagaaatcaaaattcaaataatacaacgataaatcttttgtatattataacccgtcggagaaagaaaatatagtgaaatcaggtgaaagagtatgatcttaaaaagagagtttggagaattatattatgaagttcgcggagagggaaagcctcttcttcttatacatggtgtgattgtggatgcaagtctgtatgaacagacggcagagatattatccaggtattataaagtgatctgttatgatcggagaggatattccagaagtaaatgtaaaaaaactccggaatttcgcatggaagatcaggtaaaggacattttggatattctaaacgagttgaaaatagatcggatcattgtaacaggtgcaagtgccggagcggtagtgggacaatattttttacagaaatatccagaaaaagtagaatatttactcatgtatgaacctgcgatgttaggaaacatgatgcaggaagaggagacatttaaaaactgggcagaagaaacagaagaattgatcagaaagcgaaagtataatatggcattactgcgtttttctaaacatatagggtatcaggatccaagaagtcctcaaaagtcagaagaggtatcgttgcgggaactggataatgtagagtatgcattcaataaagagattcctgtacttttaagatattatccagatatagataagatgaaccaacatgctgataagattacgattgcagcaggagaaaagagcgaagattctgtgtatgtgcaggcagcaatccggctggccgcgcaaataggaaagaaggttgtctattacccgggagggcataatcttccgtatgatcttccgttagagtttgcaatttgtgtaatagggacacttgctatagtgaaaaaataatctttctttttatttccgtttatatatggcaaatatgcttttgtgacaaatacagaagtctgctatcgttaaatcaacatagaaaagataggcggagggtttttttagatgtcaaaagtagaaagttatttgttgggcatggattgcggaacaacgaacttaaaagcaattatattaggagaagatggaacagttgttgcggaggcaagcagaccaagtacctttatggatctgaagtctgatatgcgggaacaggatgcaaatgaatggtggagtaatacagtagagattttcaaaagccttgtagaacaggcgggacatgatattgtaaagagaatcagaggtatttccatcagttcacatacagttaccatgcttccggtggatgcagagggaaatcccctgagaaatgggattacatgtcaggacagccgttctatagaggaattgcattatattgtagagacaataggttatgacaggtttgtgaaaattgtaggtggacggcctgcagttgcatttcttccaaataagattctatggtttaaaaagcatgaaccggaattatttgcaaagacagtgtgtttccttcaggcaagttcctttattaattacaagctgactgcgaagatgacgatggatatcgatcaagcgaccagaacacagtgcatggatatcagcacgatggaatggtccaaagagataggggatgttattggagtggatttggatgcaatgcttccaaagccgagactggtagatgaaatcatcggatttgtaacagaagaagcggcagaagaaacaggactggaagaagggataccggtcattgcaggctgcagtgatgccatggcatcaatgcatgcaacaggcatgagccgtctcggagaagcaggagaatcgtcaggaaccacatcacttgtatttgtgggaagtgatacgaagagtgcaccagatattccggttgtcacaaagccatgtactattgatggaatgccatggatctttgatgcaccgatccaagcaactggtgcatcattaaaatggtttattgaaaaaatggcagcagaagaagttgcatatgcaaaagagcatgatcttaatatctatacttatctgaatgaacttgctctggaatcaaagccgggggccggcggcttattcttcttcccatatctgctgggagaacgggcaccgctctggaatgagtatgcaagaggtatgttcattggaatgggcatggatatgaagagaagcgatctggtccgtgcggtatttgaaggaacggcttttgcactcagacatgtcatggagacggtgaaagaagccggagcgacagcagaattgctgcgtatctgcggaggcggagccaagagccgtacatggtgtcagattaaagcttctatgttgaatatgccggtatatgtgatggatgacaagtcgggagacgttccggtaggagatgcactaatcgtcggacataagctgggtgtgttcccagaacttacaaaagcagctgagaagatcgtaaaagtcaacgagattatcgaacctgttgaagaatgggtagaagcctatgacaaactgtacccatactatgtagaaatgtataagcatctggatacagatctgaaatctctgaaaaatacagttgatcaattataataatgtgaaaataaaactgccggtatagaaaaagtgtaccggcagtttatatgtcttaagtattcttaactatgcgtcacgctttacccactgtaaaatcaaaaatgcaacaaatttcgtaaaaaaatatcaccaaaatttagactgtattccaaacatttattttaacaaaattacctctttcctttttgcctgttatagagtatcatattacttgcacaacatcttgtgcagaaaagatgttaaaaaaacaatatttagtagtatttgagggtgagcacatactacatcggcaataaaaataagagagggatagacatgaacgcagaaataaagacgaacgtaattaagagaaacggcgaagaggtagccttcgacctggagaagatcattaatgcgatcaaaggtgcaaacaaggacgtcgataaactgcatcggatgaatgaatatcagattatggcagtggcggacaacgttgcaaagaaaattgaggaatccactcatgctgtcaatgtagaagatatacaggatatggtagagaccggaattatggaactgcgcggctatgaagtcgcacagaaatatgtgcgctatcgttataaaagagaactgatgagaaagacgaatacaacagataacggaattcttgcacttctggagcatatgaatgaagaggtgaatcaggagaactctaacaagaatcctgtgatcaactctacacagcgtgattatatggccggagaagtaagtaaggacttgtcaagacgtgtccttcttccggaagaggttgtacgtgcgcatgaagcgggaatcattcatttccatgattccgactatttcgcacagaaagagcataactgtgacctgatcaatcttcaggatatgcttcagaatggaactgtcattagtgagacgatgatcgagaagccgcacagcttctttacagcatgtaatgtaacgacacagatcgttgcacaggtagcaagtaaccagtacggcggacagtcatttacactggcacatctggcaccgtttgtcgatatcagccgtaagaagatccgcagaaatgtaatcgcagagcgtgaagagtgtggagagagcttagacgagacaattattaataaagtaacagaacgccgtttgagagaagaagtaaagagcggtatccagacgattcagtatcagctgatcacattgatgacatgtaacggacaggctccgtttgttacaatgttcatgtatttggatgaggtagaagaaggaagaacccgtgatgacctggctatgatcatcgaagaagtgatgatccagagaatgcagggtgtaaagaatgaaaaaggtgtatggatcacaccggcattcccaaaactgatctatgtattagatgaagataatattacagaagattccaaatactggcatctgacagaactggcagcaaaatgtacagcaaaacgtatggtgccggattacatctctgccaagattatgaaagagatgaagaacggagaagtatatccttgtatgggatgccgttcgttcttgacggtagaagacagtcagagaaatccggatggaactcataagttctacggacgtttcaatcagggggttgtaacgatcaatctggtagatgtggcatgttcttcagagggaaatatggataaattctgggctatcctggaagacagactggaactgtgccacaaagcactgagatgcagacatgagcgtcttctcggaacgatttccgatgtcgcaccgatcctgtggcagaatggtgcacttgcaagactgaaaaaaggcgagacgatcgataaattgttgtttgacggctattcaaccatttctcttggttacgcaggcctctatgagatgtgtgtacgtatgcttggcaaatcacatacagacccggacgcaagaccatttgccatgcaggtaatgcagaaattaaatgataaatgtgcagaatggagggcagctgaaaatatcagctattcggtatatggaacaccgatggaatctaccacatacaagttcgcaaaatgtctgcagaaacgattcggaatcatcaaaggtgtaaccgataagaattatattacgaacagttatcatgtacatgtatcagagccgatcgatgcattcaagaaactaaaattcgaagcagatttccagaagctttcaccgggaggagcgatcagttacatcgaagtaccgaatatgcagaataatattccggcggtactttcggttatgcagtatatttacaataatattatgtatgcagagctgaatacaaagagtgattactgtgaatgctgtggttatgacggagagatccagatcaaggaagatgaagcaggaaagctgatctgggaatgcccgaattgcggtaaccagaatcaggataagttattcgtggcaagaagaacctgtggatatatcggaacacagttctggaatcagggacgtacgcaggaaatcaaggacagagtattgcatctgtaacataaatgaagatatgtccaaagtccataacttgtgatgttgataaagattatagcaggagtatgtcgaaagatatgctccttttctaatttgtctattcttcgtgtttaaacatgaatcaaaatagtatataattaataaatagcaaatgacgcaaggggaaatataagaatggataagaaaaaaatgattggtgatatcgtgaccagcataaccgataaggaattaaaaaaagactatttttataatgcggtgccacttgcagtgattcttggaaaggatgctaaagaagggacattatgggcagcatttgcaagttatgcaccgggatgtaagatgatagaagttgcagctatatgtgataataccatacttggaagcggtaagaaggggattcttttcagtacagaaggaatctatggatctatgtttaacaagaataggaaacagggaccgatagccatgccgataaaatatgaagaactggatagtgccagaccgagcccgagagataaatcagaggtagaactggtatttaaaggtggaagagtagaaaaaatatatgtttatacctataccggatttgttattactgcattgaaccgtatcttagaagaactgaaaagagaaaaagaacgagaaaaagaagaaaaaatccgcaaaatacagcaggaaaaacaactacatacagaaatcatatatgaaacgacgaaaaatccaccgaatggaatccggaccagtttttatgggataagatttgtgattaatttcatggaggaaaaagagtgtgggcatcgcaagtataaactaatggaggttattgaagaagataatcaaatcagtaatgtacttgtaggatgggatgacagggaagaaaatcccgtgtacacgactacctatttctcatatactccaagagagggcttcatagatgtgtacaggctgagagatgagctgaaaatgctgaaactggagtttgccttccattatccggagcagcaggaagcatggaaaacactggaaaatgacgaattcatgtgggcgataggtgaaaattatcaatacgtgagaatggaagagaatgtagaatatccgattattgaggtaatacattccagagaggaataaaaggagactttacaaatcatgaattacggaaatataaaagaatgcgacatcgcagacggaccgggcgtcagagtcagcctgtttgtatccggctgccggcatcactgcaagggatgttttaatgaggagacctggaatttcaactatggacagccatacacagaagagacggaagcggaaatattgaattcgctggattctaacttcattcaaggattcactttgctcggaggggaaccgttcgagccggagaatcaggtggaactggtaaagcttttaaagaaagtaagagaaacatatccaaagaaagatatctggtgttacagtgggtatctttttgatcgcgatatgatcccgggaggctgtgtgcatacgaatgtgactgacgaaatgctgtcttatatcgatgtgctggtagacggggagtttaaggaagcattaaaggatgtgacactggtgttccggggaagccagaatcagaggattattaatgtgaaagaaagtaagaaacaaggaaaagttgtacttgaagattattgatactagtgatgagaatataaagtatcatgcaatgaaaaatattatatatagaagaaagatcatgaagatgtattattgctatgcaggaaataaaaaagcaggagattatttctcctgccagatgcgtaacatcttgatgatcttttctttttccgcaactgaaaaaccacggaatacattgagcacttcgtcatttaactggcgctctttttcatccagaggaggaagatctcttcccgcatccagaatcgtgtccacggatacgttacaaagctttgagtaataaagaagaactcttaagttaagcttagcacgattgttctcgacattgctgacgaaaggaacagtacagttcagatcttttgctacctgttcctgagtgataccgcgttcacttcttaattgtttcatttttaatccgacttttgaaaaatctacttcgttcattgctgggctcctttgaattgtaatgtataacgatattatataagtatatattattataaatcttgccaataatcaatacagaaaaatttacttttccttaaaaaaatagtataattaaaataacttatacaaaagacaggatgataagactaaaaaggaggcaaaaaatatgttgacatgtatttatgtagttgagaagattgatggtgactatgcggaactgagacgtgtggatgcgcttgcacaggatcgggaagaaaacaaggtgatggcaagagcactacttccggctgatattatggaaggaaacaaaattctatatgagaatttacagtatcgtctgatcacagagtaagatcagagcggatatatcaattttgaatgtgcgtacatataaaattgagatatacaacaaaataatgaaaagtaagaagtgtaacagcataaaagcggttacactttttttgcgcccaaaacaatagacaatcttgaaaaaatgtcgtatttcacaaagaaaacgagaggattttttcaagaagaaaatcgaagaaatcgctgttttgtagaaaaagaagggaattgaaaaataaaaattgtgcattttccttgtgaaaaaataaatggaaattggaactaccatttcggcgtggaaatttgatgagaaaaataaaaaaattaagagaaataaaagtaaaaatacacaaaaaaataatgaaaaattttgcaaaatagacagtggacaaaacgattgacattttcaaaaaatagcagtaaactagcaaaaaaattatgaaggaaggggatagtacggaaaagcttgttgaaagccttgtagaagaacttaactgtgaaaccgtatttaccatcccggtatttggaggaatcgctgttgacgaaggtgttgttgtaacttggatcattatggcggttcttactattctaagtatagtattcgtaaggaatctaagcgtagagaaaccgggaaaggtacagcttatgctggaatcagtaattggctgggcacaggatttctttgaaggtattataggaaaagaaaacaggggatatattccatatctgatgacggtagcgctttatcttgcaatatcaaatgtcatcggactgttaggatttaagcctccgacaaaggacatgaacgtaacaatcgcacttgccgttatgagtatgttcgtgatcgagtggtccggtatccatagaaatggtctggttcactggtgcaaacattttgcaaagccagtgccgatcgtagcaccaatcatgatactggagatcgtaatccgcccactgtcgctttgtatgcgattgtttggtaatatgttaggcgggtttgtagtcatggaactgatcaaacaggtcgttcctttaattgtgccgataccgtttagtttttattttgatatatttgacggattattacaggcatatgtattcgtattcttaactgcattatttatgacagaagagatggaataaggcgaatcagacatttacaacatttagtataagaaaacgtaagaaaagaaaaggagaacaaattatgagtggaacaattatcgcaattggagcaggtatcgcagtacttacaggtatcggagccggtgttggtatcggaatcgcaacaagcaaagcagtagacgctatcgcaagacagccggaagcagacggaaagatcagaacatccctgatccttggttgtgcacttgcagaggcaaccgctatctacggtttcattatcgcacttctgatcgtccttcttttgaaataatgtttgctgacgataacagattaaaagaagggaaaggcaggtagagatatatgctgagaatagattttaatctagtgctgacgatcatcaacctgatcgttctgtatctgattctcagaaagttcctgtttcgcccggtcatggacattatggaaaagcgggaaaagatgattgcagacggaatcggccacgcgaatgaggagcagaacaaagcgcatgctctgaagaagcagtatgaagatgcattgaatggagcaaaagaagaatccacaaagatgatcgaacaggcgaaactggatgcaaaacaggaatacaaccagatcctgaacgaggctaacgagaaagcagacaaggttatgaagacagcaagagaaagcctgaatcaggaaagagaacaggcctttgatgatatgaaggcacaggttgcagggctggcaatggatgctgcgaagaagatattacttgagaatgctgacaatataagcggcgtgaatgcatatgaccagtttttgaaagatgcaggtgattcccatgacagcgaagaatagaaaagaagcagagccggtattctgccaggtggcagccctccggtatgcgaaagttctgaatgaacttggtatttcgaaagaagctgtcctggaggcaggaaatattttcgaaaaatcacaggaattgaaagcagcactggttaatccagtgatcacaaaagagacaaaacacaatatcattgataaagtattttcagaagaaatgagaacatttctgaaggttgtctgcgatcatgaaaagatgatgatcgcagaacagatctttgcagcatacgaagaattacagaatcaggcagcaggagttaagacagtctatcttcgttatacagcgcttccaagtgaagaacaaaagaagcagatgggtgactttatcaagaagaaatacggtgccggagacatcaaatgggttatggcagaagacaaggcactgatcggcggatttatcctgcaggttgacggaaaagaatatgactacagtgtgcagggccgtctgaaccgtttacagcggaaattaacaaattaacatggaggtgaaggaattgagtgcaatcagctcagatgaaattatctctatattaaaagaagagataaagaattatgacgtaataagcagagatcaggaagttggtactgtcatctctgttggtgatggaatcgcctccgtatacggaatcgaccacgcaatgtatggcgagatcgtcacattggagacaggtcttaagggcatggtacaggacatcaaggaaaacgagatcagttgtatcctgttcggagatgattcagagatcaaacagggcacaaaagtgtgccgtacaggtaaaaaagcaggtattccggtaggagagggttatatcggaaggatcgtagatgctcttggagcaccaatcgacggaaaaggtgagatcaaagccgacgaatatcgtccggtagagaatgaggcaccgggaatcgttgaccgtaagtcggtaagcgttccgctagagacaggtatcctttcaatcgattccatgttcccaatcggacgtggacagagagagttgatcatcggtgacagacagacaggtaagacatccattgcaaccgatacgatcatcaaccagaagggaaaagatgtcatctgtatctatgtagccatcggacagaaagcatcaaccgtagcaagacttgtaaatgacttaaaagcacatgatgcactggattacaccacggtattctgctcaacagccagtgagtgtgcaccgcttcagtatatcgtaccttattcagcaacagcacttgcagagtatttcatgtatcagggaaaagatgtattgatcgtatacgatgatctttccaaacatgcggtagcataccgtgcaatttctctgttacttggacgttcacctggacgtgaagcttatcctggtgacgtattctacttacattcaagactgcttgagcgaagcagccgcttaagtgaagaagcaggcggaggttctatcacagcacttccgattattgagacacaggcaggagatgtatctgcatacattcctacgaacgttatttctatcacagacggacagatcttcttagagagtgacctgttcaatgccggtatgcgtccggccgttaacgttggtctttctgtatcccgtgtaggtggagccgcacagacaaaggcaatgaagaaagccagtggtagtgtccgtatcgacctggcacaggcaagagagatggaatcatttacccagttcagttcagaccttgacgatgcaacaaagaatcagctgaaatacggaagctgtctgacagaactgttaaaacagcctctgggacgtccgttaagtcttcatgagcaggtgatcacactttgtgtcgctacgaataaactgatgcttgatattgacacaaagaagatcaaagaattccagatggatatgcttgcattcttcgacagagaacataaagaaatcggcaaagcaatcgatgagaagaaagttctggatgatgaactgaaagagcagattcttgcagcagcaaaggaattcaaggaaagaagataagcgggtgtagctatggcaaatgcaaaagagattaaggaaagaatggccagcatcgaagagacgagaaagataacaaatgccatgtatctgatctcttcttcgaagatgaaacaggctaagaaaaagcttgctgacacagaacctttcttctatgccatgcaggcagagatcgccagaattttgcggcatgtgccggatatgcacagccagttctttgatggccgtgagagtatcccggctgaggaaagaaagattggctatatcgttgtaactgctgataaaggacttgccggggcatataatcataacgtgatcaaggcaactgaagaactgttaaagaaaccgggaaagcataaattattcgtacttggagaagccggaagacagtactttgccaagagggaaggaattgagatggatactcagtttcgttataccgtccagaatccaacattacacagatcgagagtcatttcttcggagatggtagaacagttcagaaatggagatctggacgagatccacatcatatacacacgtatgatcaatgctatgacagcggagactgaggaacagaagctccttcctatgaagaagacgaccttccttccggaagatatgccggctcttgtcggaaccggactgtatcaggaagatatggtgttctggccatccacgcacagtgtgatggcgaacattgttccgaactacatcaacggtatcgtatatggatgcctggtagaggcctactgcagtgagcataatgccagaatgcaggcaatgcagaatgcaacagacagtgcaacagatatgctgaacgaattaaatattacttataaccgtgtccgtcaggcagacatcacacaggaattgacagagatcatcggcggagccaatgcgcagaaacggaagtaagatacaaagttcgcaaatggcggaactgtatacagaacaaataataaccacgaaataacaaaaaagaaagtgggcagcagtaatatgacaaaaggaagaatcgtacaggtcatgggacctgtcgtagacgtagaatttaatagtagagaagaacttccatttatcaaagatgccctggaagtagacaatggcggaaaacgttgcgtcatggaagtagcccagcatgtaggtaacaacattgcacgttgtatcatgctggcttccagtgaaggtctgcagaagggaatggaagttaccgctaccggagctggtatcaaagtgccggtaggtgagaagactttgggacgtctgttcaatgtacttggagagacgatcgataacggagaaccaattaaagacagcgaagaatgggttatccacagaaaagcaccaagctttgaagaacagagcccggctgtcgaagtattagagacagggatcaaggtcattgaccttctgacaccttatgcgaaaggtggtaagatcggtctgttcggtggtgccggtgtaggtaagaccgtactgatccaggagctgatccataacatcgcaacagaacatggtggatattccatcttcaccggtgtcggagagcgttcccgtgaaggtaatgacttatggacagagatgagagaatcaggtgtacttgataagacagctttggtattcggacagatgaatgaaccacctggatctcgtatgcgtgtcgctgagacaggacttacaatggcagaatatttccgtgatgtagagcaccagaatgtgcttctcttcatcgataatatcttccgtttcgtacaggctggttcggaagtatccgcacttctcggacgtatgccgtcagccgtaggttatcagccgacactggcaaacgaaatgggtgcccttcaggaacgtatcgcttctacaaagaacggatctgtaacatccgtgcaggccgtatatgtaccagccgatgacttgacggacccggctcctgcaacaacattctcgcatttggatgcaacaaccgtactttccagaaagatcgttgaacagggtatctacccggctgtagatccactggattcgacatcccgtatcctggagcctgcagttgtaggtgaagaacattaccaggtagcacgtaaggtacaggagatccttcagaaatacaaagaattacaggacatcattgcaatccttggtatggaagaattatccgaggaggataagctgacagtagctcgtgcaagaaagatccagaaattcctgtcacagccattctcagtggctgagacatttaccggtgttcctggaaaatatgttccactgaaagagactgttcgtggattcaaagcgatcattgacggagagatggatgaatatccggaaaatgcattcttcaatgtgggtacgatcgaagacgtgatcgcgaaggcgaaagcagaaggagtggcttagtatgagcacattttcattgaaaattatatccacggataaggtcttctacgatggcaaatgtgaatatctggtgattccgactatagacggggaaaaaggtattctggctcatcatgagaacatggtcattgcagtggagatcggagaactgcgtttccgtaagccggacggtgagtgggtaacagcagttgtatccaaaggatttgcagagatcgtgaataaccgtgcttctgtactggtcaatacggcagagcgtccggaagacatcgatgtgaagcgtgcagaggaagcaaaggaacgagccgaagagcagcttcgtcagaagcagagcattcaggagtattatttgtcacaggcttcaatggcccgtgcaatgacaagactgaaagcgtccagaaacagacgcggggatatctgatctgagaaattaataaaagctatgataaaaagagctgtcgttttacgaaaatgtattcgtgaaaacgacagctctttttgcggtgatttatcttgtatgccgcctgtagcttgcaggcgtctcttcatatttttcctggaataatttataaaaatatcccttgttatgatatcctacagaatcagcaatttcctcaatactcttatcggtcgatacaagcagatgctctgcacgctcgagacggatctgctggagataagcggaataggtaagcccggtcttacgcttgatcaggcggttgaagtaatcttcctgatagtggaattcatttaccagatcctgaatggtgatatctctaaaatgtgcccggatataatctgagatctcttcgaatacgatccagttcatcgtctgcttctgctctttggaaagagaaaaatcatactgcgtacttaagatccggaatatgcggaataacaaaccttttgtgatgtatctagagccgctgtccggcgaataggattctttcaaaagcaataaaagactgtcgtccagagcttcacttgctccggctgatggacggaaatgcaggaattgctggacatccttttgctttagtaaggcagactgcaggaaagaaagaatcttctgcggggtgctgttctcgttcatgatctccgtaaacatatcattggcgattccaagaaaaagaaccactcccgactggtccgtcagacagtcctgatgcaggcagttcttgtcgatcaggcagagttctcctttttggaatacgacatctttattcagtatccgctgatgaaattccccatctacaacgtaagaaagctccagataatcatgtgtgtgaagctgcgtatattctccatccgaataagaataatggtaacagaaattctccggagacggcatcattgttgcatacagattaccaggagaatcaaagttccagcataacaggaaactacggtcctgattgagtaacggataagtcttaacttcctggacggacttggaatattccggacagacaagtcttgcgcctaatttatggttttccggaagaagccgggcatcgggccctgtgatccggcggcaaaaatcggataaattcatataaatacctccttgacagttagtatgattataccataacataggtcggaataggtaacaattttccccaaagtgcagagtttagagattgagaaagtaagtttgtatttttataatagagacataataaagctgtagacgaaacagaaaatttgaatgaaaaggagtaaaaaatatgttaaaaacaaaaaattatcagttttggttctgtacaggatcacaggatctttatggagatgagtgtcttgcacatgtagcagagcattcaaagattatcgtagatgcattaaataaatcaggaaaccttccatatgaagtcgtatggaaaccaaccatgatcacaaatgaagtaatcagaaagacattcaacgaagcgaatacagatgagaactgtgccggtgttatcacatggatgcatacattctctcctgcaaaatcatggatcttaggattacaggagtacagaaaaccattacttcacttacatacacagttcaaccgtgaaattccatatgacactatcgacatggatttcatgaatgagaaccaggcagcacatggtgacagagaatatggacacattttcagccgcttgaatatggagcgtaaagttgttgcaggatattgggaagatgaagccgttcagaaacagatcggatcatggatgcgtacagcagttggtgttgtagaaagcagccacatcagagttatgcgtgtagctgacaatatgagaaacgttgctgttacagaaggtgacaaagtagaagctcagattaaattcggatgggaagtagatgcttatcctgtaaatgagatcgttgaagctgtaaatgctgtatctcaggcagatattgatacattagtagaagaatattatgacaaatatgacatccttctggaaggaagagatgagaaagaattccgtgagcatgtagcagtgcaggctggaatcgaacttggatttgaaagatttctggatgagaagaactatcaggcaatcgtaacacacttcggagatcttggtggactgaaacagcttccgggacttgcaatccagagactgatggaaaaaggttatggatttggagcagaaggtgactggaagacagctgctatggtacgtgttatgaagatcatgactcagggaatgaaggatgctaagggaacttcattcatggaagactatacatacaaccttgtaccaggaaaagaaggcgttctggaagctcatatgcttgaggtttgcccgacaatcgcagatggaaagatcagcattaaagagcagccactcagcatgggtgacagagaagatccggcaagacttgtattcacatctaagaccggaccggctatcgcaacatctctgattgacctcggagacagattccgtctgatcatcaacgatgtagactgcaagaagacagagaaaccaatgccaaaacttcctgtagcaacagcattctggacaccacagccgaacttaaaggttggaacagaagcatggattctggcaggaggagctcatcatacagcattctcttatgacttaacagcagagcagatgggtgactgggcagcaagcatgggaatcgaagctgtatacattgataaggatacaacaatcagacagttcaagaacgaactcctgtggaacagtgttgcattccgtaaataattgaaattatcacataagcagtaacatttcattttgcaggggatatcaaatagatatttccctgcaaaaatagtataatgggtagtatataaaaagaaaacttagaaaaataatattaggaggaagcgtacaatgagtaacataaaagaaatcattgagagcggaaaagcgtttctgggaatcgaattcggttctacaagaattaaagcggtactgatcgatgaggagcacaatccaattgcatccggaagccacacatgggagaaccgttacgagaacggactgtggacttactctctggatgatatctggacaggtcttcaggacagttaccgtgacatggcagaaaatgtacagaaagagtacggagtaacaattaaaaaacttggagcgatcggattcagtgccatgatgcacggatatatggcatttgacaaagaaggaaagcttcttgcaccattccagacatggagaaacagcaatacaggaaaggcttctgaagtgctggtagatttgttccggtacaacataccactgagatggagtattgcgcatctgtatcagtgtatcctggataaagaagagcatgtaaaagatattgcatttatgacaacgcttgcgggatatatccactggcagatgacaggcgagaaggttcttggtgtaggcgacgcatccggaatgttcccaattgatatgaatacaaaagattacgatgaagagatgatccaaaagttcgataaactcatcgaaggtgagaactatccatggaaagtaaaagagatccttcctaaagttctggtagcaggagacgcagccggtatcctcacagaagaaggagcaaagaaacttgaccctacaggcaatctggaagcaggaattccactttgtcctccggaaggagatgcaggaacaggtatggtagctacaaacagcgtagcacagcgtacaagcaacatttccgcaggtacttcattcttctctatggttgtccttgagaagcctctgaaagatttgcatacagagattgacatggttacaacgcctgacggaagtctggttgctatggtgcattccaataacggaaccacagacctgaatgcatgggtaaatctgttcaaagaattcgcagattctatcggagcagacgtggatatgaaccagatgtatggaacactttacaataaagcactggaaggcgatgctgactgcggcggaatcctttcttacggcaactatgcaggagagcctatcacaaatgtagaaaaaggacgtccgatggtagtaagaacaccggagacaaaattcaatctggctaactttatgagatctcacctgtacacagcacttggtgttattaaggtcggaatggatatcttaacaaaagacgaaggtgtagagatcgatactgttctcggtcatggcggactcttcaagacaaaaggtgtcggacagaaggttttggctgatgcgatcaacacaccggtcgtagttatggagacagcaggagaaggcggaccatggggaatggctattctggctgagtacatggtaaaacgtgcagaaggtgagaaactggaagattatctgaagaataaagtattcggaagcaatgccggaagcagaattgatccggatccggaaggcgtagcaggatacgaagcatttatggagacatataagaagggacttgacgtagagcgtagagcttgtgctgatctgtaaaagctgtcatattgtgtaaaagtagaggggacacggtgatgtccccgtatctgttatgatatagaagaggtaaaggagataagaaaaatgctggaagaattgaaaaaagaagtatatgaagcaaacatgcttcttccaaaatatgatctggtaacatttacatggggaaatgtaagcgggattgaccgtgaaaaaggactttttgtcatcaaaccaagtggagtagattatgataaattaacaccggaagacatggttgttgttgatcttcagggaaacaaagtagaaggagacttaaatccatcttctgatacagcgacacacgtagaactgtacaacagattcccgaatattggcggcgttgtgcatacacattctccatgggcaacaagctgggctcaggcaggaagaggaattccttgttatggaactacacatgcagattatctgtacggaacagtaccatgtgtaagaaatcttacaaaagaagaaattgacgaagcttatgagaaaaatacaggtgtcctgatcgcagacagattcgatgaagatgatctggattatgttgcaacacctgcagtactctgcaagaatcacggaccatttacatggggcaaagatgcgcatgaagcagttcacaatgcagttgtattagaagaagttgcaaagatggcagcgagatgcgaaatgatcaacccggacgttaaacctgcaccacaggaattacaggataagcattacttcagaaaacatggagcaaatgcttattatggacagccagggaaataaatgaattggtgttaaaaaaggattacaagagacactgccagtgatgacagtgtctcttgtagtcttggtattcattaggttttatactgttgtgaacaggtcgacagactgtccggtcataactgccggtgaatctgccaaaaggtagatgattgcttttgcaacatcttttgagcttcccatcgggcagccgtcctgtcctacagagtggttgtagactctctgtcccggtgtgtccacgattccaggagatacggcattgcatttgattccgtattctttggtctggatagcagttgtcttggtcatggttacgataccgccttttgcaacagcgtatgcacccatctgagatgcaatacgacccattcttgaagatacatttacgatatctccttttccctgttttatcattacaggtacaacatttttagttacaaggaatgggattctcaagtttgttttgatgatctgatcccactgttcttctgaccattcccagatcttaattgcctgatgttcgatatttttgtagatctcttttgggtatccgcctgcattgttaacgagaatatcaattcttccgtatttatcaacaacagttttgaccatgtcggcaacctgttctccgtctgtaaggtctctggaaagtgagattgctgttccgccggcatcttcgatcatttttactgtttcatcaagatcagactgtgttcttgctactgttacgacagtggcaccttcagcagcgatagcaagtgctgcgtcacgtccgattccttttcctgatcctgttacaattgcgatttttccttctaatttacccatgatatatatcctccagaattatatttatacaagccttgctgtttcagcaaagaactgaatgtctgtagctttgatgtagctgtcaccgatttcatgaagtagtatgacgttgagattaccgttcagattcttcttgtctaaggcgatcgcttcggttaatgtcccaagagtgagaccgcattcaagaggaagtccgtaggtttttaaaacctgctggatacggtctgcagttccttttggtgttaatcctttttcctcggcaatcctggtaatctgatacatgccaatggcaacggcttcgccatgactttcccgctgataatggaaatgttgttcaatggtgtgagccagtgtgtgtccgaaattcagtaacatacgctcacctgtgtcaaactgatcattttctacaaccattcgtttgatatctacacagcgtgtgatgatggcaggcagttcttcttttaaatcttcaaaagaactgtgtgattccaaggtactaaataaatccgcatctttgatgcagccgtatttgataacctctcccataccatcgttgataaatcgttccttcagcgtgttaagtaccagtggatcgatcagcaccagtgaaggctgatagaatgcgccgaccagattcttgccttccggaaggtctactgcgacttttccaccgacagaagaatcaacctgcgccaacagtgaagttgggatctgtaccagtcttacacctcttagataactggaagaggcaaatcctgcaagatcaccgatgacaccgccgccaagagcaatgaccagatcacttctggaaatctttgcttccagcatggctttgtagactgtcggaagtgtctggaaatccttggtggcttctccgtgagggagtaccagatgatggcattcataatctgaatccagtgtacggatcagtgtatctccgtatagaggaaatacattatcgtccgaaatgatcataatgcgtttgccgtgatacatcttacggatatagttccctgcctgggacaatatattattttcaatataaataggataactgtcttttcccagattaactgtaagtttcattttaaagctcctgtaaactatgaggctgcatatattagatggattttccgactacatttgcaatctgtgcaacctgtttgagtaattcgtcgtatttcttaggttttaatgactgtgctccatcgcagagtgcagattcgggatcgttgtgtacttctatcatcagtccgtctgctccggcggctatagcagccattgccatggaatctactaaccaccattttccacctgcatgacttgggtcaacgatgatcggaagatgtgtcagtttacgaagtacaggtatactctgaagatccagagtatttcttgtatagctttcgaaagtacggattccacgttcgcagaggatgacattttcattaccggatgccatgatgtattctgctgacatgatccattcttcgtaagtagcatttagacccctttttaagaggattggacgatcaagctgtcccaattcttttaacaggtcgaagttctgcatattacgtgcaccgatctggataagatctactttttcgttaaatacatcaaggtatttgtcggacatcagttcagttacgatcggaagaccggtctcttctttaactgcggttaagatatcaagaccttcaagtccgagtccctggaatgaataagggcttgttcttggcttgaatgcacctccgcggagtaagttggctccggaagcttttgctgcccgggcaatttcaagaacctgttcgtatgattctacggaacaaggaccggcgatcattgcaagattgtctccgccgacttttacgccggatacattgataatggaatcttccggatggaatgcacggttagctaatttgtacggttcctgtacatgcataactttatcaactgcagaatcaatctcgaataatttggaatcaactttggctgtgtcaccgatacagccgatcactgtcatctccttgccttgtacaatatgtgtgtcaagacctctttttttgaccatgttctcaacacgagaaacatcatcttttgtagtatgtggttttaatacgataatcataattaatatcctccaatatgtatgatcattgtgcctgtgtgatattttctttctcgtgtgaatctgttgtggtcgcactgtaaaatattcgcactgcaaaactttaaacatttaaagcgtaatgatatattaacgcaatggaatttgattgtcaatacttttattggataaattctttcatttttttaaaagtgtgttagactaaaattgtatagtaaaaagggagtgggaaaatggtaaatgtatgggcagcagatattacaccactattaatagaagaaatatatcgtgcatattataacagggtgccaaagtggagaaaggaaaaagcggataagctgcggaatgtggcagaccgtgcaaggagtgtcggtgcatggatcttatgggagaagatacaagagatgaccggacttccggaagatgctgtattcaatctgtcgcattcgggaaagtatgtattgtgcgcctgcagtgaccgggaaggcgtgcaggtcggatgtgatgtggagatgacgggagcattaaggatgtcagtagctgaacgctatttctgcccatcagaatgtaagatcatccgtgcaggtgcggatgaaaaagaacaggcagaatggttctaccgtttctgggtattgaaagaaagctttatgaaagccaccaggaggggaatgggactggatatgcggacatatgaatttgcctggaggccggatggcataccatatatgagaaagcagccggatgaatatcccgggatctacctgtgcagggaatatgaactgaagcagggggatgcaagagctgcagtgattacgacagatgatgaaatcggggggagattacaagaagtcagacttgcttaaaaaggggtgtatgaacatgagacagttaaagacgaaatgggcagacaatataaatgaaaagaatgtattaggggaatacccaagaccattgatgcgccggaaaagttatgtgaatctgaacggtgtgtggaaatatgcaataaaagacacaaaaggatttccaaagaaaatgaacggagatatattggtcccgttttcaccggaggcagcactgtcgggagtcggaagacagttaaagccggatgagtttttatggtataaaaggagtcttccggaagagataagaccagaagcaggaagccgctggctgcttcatttcggagctgtggatcagtgtgcagttgtttatgtaaatggaaagaaacaaggaaaacatgtgggcggatatctgccgttttcattcgatgttacggatgcattgcaagaagaaagaaatatactgacaataaaagtaaaagattattccgatacatattattacagcaggggaaaacagaaattagaaaatggcgggatgttctatacggcgcaaagtggaatctggcaaacggtatggatggaaaaggttccggagtatcacatcaaaaatctgaagattacaccgctttatgatcagtcttccgttatgatacagctggaagatgccgccggaagaaaagatatcgactatgatgtgacggtaacggcaagaacgatgtggccgttaaaaactgccggcaggacagggagaccatgtatggtgagaattccgcatatgagaaactggagtccggaggatccgtttttatatgatgtgcatataaagatggggaatgattcggtagagagttattttgccatgcgtaagatagaaatgaagaatgacaaaaacggaattccgagaatctttttgaacaacaaaccatattttcaaaaaggagttctggatcagggatactggccggacggcttgtatacaccaccgtgtgatgaagcgatgatttatgatatccagaagatgaaggatctggggtttaatatgatccggaagcatatcaagatagaaccgcagagatggtattatcattgtgaccggattggcatgctggtatggcaggatatggtgaatggaggacgtgaatataagagctggtatgttacctggctggcaacagctatggaaggaacgcatatccgtgcaaaggatacaaggctgcatctgatgggacgtcaggatccgaccggacagaaacagtttgaaagtgaaatgaaagaaacgatccggcggttatataatcatccgtccgttgtgacatgggtgatatttaatgagggctggggacaattcaagacgaggaagatgacagacattgctctggcagaagatcataccagattgattgattctgcaagcggatggtttgatcagggatgtggggatatcaaaagtattcatgattatttcttcccgttgaatatcacaccggaaaagcgggtgacagcgcttaccgaattcgggggatactcgcttcagattccgaagcacagtatgtatgaaaaagatatttacggatataagatatttaaaagaaaaaaagatctcagcagagcgtatgaaaaattgataaaaaaactcgttatcccgaatatcagcagggggttaagtgcaacggtctatacgcaattatcggatatagaagaagaggtaaatggaattctttcttatgacagaaaaatagtaaaaatcgatgaaaatgtggtgagggaatggaacgaaaaacttcatttttaaccggaaattcagggaaaattgatgagttgcgtagttgacgtgatttcggtgatttgttagaatataaaagggaaaaataaagatttatcaagatagaaaattgtttacaaaaccataaaaaaacacatgaggagagtatgggagtgtaagaataattaaggaggaagaggatgttggaattaacatttggagaacaggtcaagatcattctgagccgtaaaggaatgaccatcaaagaacttgcagaaaagatagaaaaacagacaggaaaaaagatgtcgcgccagaacttgacacaacgtctcggaagagataatttccaggagcaggatatgcgtatgatcgcaaagattttggaatgcccgttctatttagatatattagaagaacatgaagaccgcacagagaaaccggtgaaagaacagaaagctgcagaaccggaacagaaagaggcacctacaagagcggaagaaagggatattacgattggagaactggtcgatattcataaagaattagatgcgattgagaagaagaaaagcaagaaaaaagcaaagaaagttgtagaagagaatccggaatatgtccaggagacgatttttgacttctttgtgaatgagaaagcagaagagccggaagtagaagcagagccggaagtggaagcagaggcggaagtagaagcggagccggaagtagaagcagagccggaagtagaagcagaggcggaagtggaagcagaggcggaagtagaaacagagccggaagtggaagcagagccagtatatgaagaagcagagccggagtatgtagaagagccggtatatgaagaagcagagccggagtatgcagaagagccggtatatgaagaagcagagccggagtatgcagaagagccggcatatgaagaagcagagccggagtatgcagaagagccggcatatgaagaagcagaaccggagtatgaggaagagtcggtatatgaagaagagccggaagtagaagaaccggaaccaaagaagactgagacagagaagaaagcacatggatggagagcatttttcggaattcataaaaaacacgaagaaccggtaaaagaagaaaaagaggaagaaaaaccggaaatccaatatcatgaatttgattattcagaagatggagaatcaggcgaacttgcagaagagtttcttccagatgaacctgaggaagcagagacatatgccgcagagacagaaacggctgcttatgaaaatgcagaacagttaaatacgaactatgatgcaggacatcagaacaggtatgcacaggagaatgaagaggatttatttacatcaacggaagaggatcttgagaaaggggaacttaacccttataccggacatgaatatgaatcgaacagtgtaagaatgcatccgaaccggatcggctatgtgcaggtatatgaccgtggaactcatcagtggacagatatgacggagtgggcgtttctcggatatcaggagcgtaagaaagcgttacttggcaaagattatgagccgccgatctatctggattaatggaaaatgaacttaagaaagtaatgctgtgaataaggtgttcagccggggatccggctggacactttttgacaaaaaggaggatgtaaaatggagtggacaagacttttatcgacaaagagacaaaggccgggcagacatcaggatgtacgttctgccgataccgatctgagaagcgaatttgaaaaggattaccacaggatcatcggaagtgcatcatttcggagacttcaggacaagacacaggtatttccattagataaaagtgattttattcggaccaggctgacccattctatggaggtatcatcgctggcaaaatcgctgggacagaatatcggcgaaagcatactggcacataagaaagatacaagtttcactccggggatgaaagaagatatttgcaatattcttcagtgtgcaggattgattcatgacattggaaatcctccgttcggacattatggggagtttgcgatcagagagtggtttgaacggaatcttccggtgttaaaatatcatggaacaccgatagaagaattgctggaagaacagatgagggaagatttttatcattttgaaggaaatgcacaggcactcaggctggtgagtaagcttcatttcctggtagatgaaaatggaatgaatcttacctatgcgcttttaaacacaattataaaatatccggtggcatctacacagatccggccaaagtccggggatatccgagaaaaaaagatgggatattattatgcggaccgggagttattcgaagatatcgtgatggagacaggggcgggaaattgcagacatcctctgacatttattctggaggcagcagatgatattgcatataaaacggcagatatcgaagatgcatttgtgaaagggttcattacttatcacagtctgcgggatgaattgcggaagcttcaaaacagggaaaagaagctggcagttccggaacaggcggaatggaatagattccggccggcagataaactggtggaattatatgaacgtgcaaagaaaaacggagtagataaccccggagattatgcagtgaaaaactggatcgtaaaggcacagggagttctgatcggatatgcaacatctggatttacttctcattacgatgagattatgaatggagtatataaaacagatttattcgcagatacaccggcggaaggacttgtaaaattacttggagagattgcatgcaaatgtgtgtttaagtcagaaacaatctaccggatggaagtgaaggaagcagtgatgcttgacaatctgatggaccgcttcatgggtgcgataattaaatatgatgatccggcacagaaactgaattctatagaagaacggctggtttcgtttgtttccaataattacaaaaaagcataccgctatcatgcggagggacagccagacatttaccggttgtatctgagattattactggttacggactatatctgcggaatgaccgacagctatgcgaagaggttgtatcaggaattgaatgcgattatggcataaaagagaatatttcagaatagattgtgataaatagccgtaaacaggagagggtattttgagacggtttattcgatatctgtatgaatacgaacaagagaagaagatgcggaatgtaggcttcgtaaaaatagaacaggatatggaacagtgtgtgatccatgtacacggaaaaggattccggatggaagaagacgcaaagggactggaagtatatttgttctggaatcaggatgaaaaatgtaccggaatcaatatgggagtgacagagccgccgtctcccggactgaattatcaattgtgttatacaccggaagatatgggggagaaagaaaattatggtctggtcaacggaattattttgaaagacataagcgggcactgttatgctgcagtgtggaatgacgatgcggtaaatatctgtcagatggaaaagtgggagatggcggaggaagagacgcatgaaaaagaaaagagtaatgcagaggcttcagaggaacaggaagtaaaggaatgtgggaaaagatacaaagtcagaaaaatccaacggaaagatatggtatgtcttccgagatgtgaatggaagcatgcgaacaatagttttctggttcatggatattataattatcatcacctgatattgacagtctgtgatggtcagttaaaattaggagtacctggagtatatcatccacaggaagcaaaagcagcagaaagttttgggtttccggaatttctgccgtttgaggagaccggacttgcgcttacggaagaagaaacgaatgacaaagagacattcggatactggtgcagagatgtccgcggatcggaagactgcgcagatatacaaagaaaaatataatcagatggagtgtggaaatgcaaagtacagatgaaaaatatatgaaagaagcaatcaaacaggcgaaaaaagcttatgcgatcggagaagtaccgatcgggtgtgtgattgtgtatcaggataagatcataggaagagggtacaaccggagaacgattgacaacaataccctggcacatgcggaactggctgcgatcagaaaagcaagcaggaaaatgaatgactggagactggaagattgtacgatgtatgtgacactggagccttgccagatgtgttccggtgcaatcgtacagtcccggatgacaagggtggtagtcggttgtatgaatccaaaagccggttgtgcgggatctatcttaaatcttctggatatgccggaatttaaccatcaggtggaattgacgacaggagtcatggaagaagaatgcagccagatgatgaaatcattttttaaagaattaagagaggcaaggaagaagaaaaagcagctggaaaaagagcagacagaggaaatataagagacaggtgaccagatgaatgaaaagacggtaggaatgctgatcggtaagaagaatgtatatgaatatctggaactttccaatgcagttacctgtatgaattatgtaaacaaagagaccgagataccgccggtactgatgatgcacggacttgcagatgacaaagcatggagatccggcattctggacagagaagaatatggatattgtggaaaaatttttgaaagtccacatggattaaggaggtacagacagtaacgaatgcgatcgtaatattgctggcagtaatatttggtataatataaaaaatatccacatgcgggaaactgcagtggatatttttaatatcagtttattttattatgtgcattgcgcttcgaacgagccttcacagacgttaccttagtagttaactcagcccaggcacccttacggcacccggaagattccacttaatgctgcttcattcctgacctgacatggttcatggagttccgtcgcgtaagacccaaacatcaacgccactttccaagggcagctctgcaaaaacaagccctctgcgcaatatcacccctgctatagcggattgcaggtgcaaggtaccgctaacaccccggctgcacagctcaacattttaacgtgttccgggcaaaaagtcaatggaaatgttgtaaaaaaggcgataccaatttataatacctagatatatgaggatttatcttatccggtatatgaccggaggggagattctgatctggaggaaaatataatgaagatattactggcagcagtcaatgcaaaatatatacattccaatctggcggtctacagcctgaaagcctatgccggggatccggcggtggagatcggagagtatacgatcaaccagcaaaaagacgatatcctgatggacatctataagagacaaccggatattctctgcctttcctgctatatctggaatttggactatatagaagaaattgtgcttgaaatcggaaagctgcgtccggatatgccaatctggcttggcggaccggaggtttcctatgatgcaaaagaagtattaagacgacttccatgtgtcaaaggagtgatgaaaggcgaaggagagaaaactttcaaagaaatctgccggatataccgaaatgaattcgaaaaaagagaaaatgtatgtggatatcaggataaaaatgtggataattcctggaagaaatcggagagtgtggataaccagttaaagggtgtggacggaatcactttccgggaagaaaaagagaaaattatcgacaatccgtggcgtccgatcatggatctgagcgaagtcccatttgtctacgatcatatggaagattttgaacataagatcatttactacgagaccagcaggggatgcccgttttcctgcagctattgtctgtcatccgtagataagcgtctgcgtttcaggaatatagaactggtgaagaaggaattgcagtttttccttgaccacaaagtaccgcaggtgaaatttgttgaccgtacattcaactgcaaacacgaccacagcattgctatctggaaatatatcatggagcatgataatggcattacgaacttccactttgagattgccgcggatattctgaatgaagaagaaatggaacttctggaacagatgcgcccgggactggtacagcttgaaatcggcgtacagtcaacgaatccgaagacaatcaaagagattcacagagttatggattttgaaaaagtatccaaaatcgtgaggagaattcaagataagggaaatgtgcacgaacatctggatctgatcgccggacttccgtacgaagatgtggaaagcttcgcacattcctttgacgatgtgtatgcattaaaaccggagcagctccagctgggattcctgaaagtgttgaaaggatcctttattcaggaacatcaggaggagtatggcattgttcataaagcacatccgccgtatgaagtactgtatacaaagtggatttcctatgaagatgtactgcgcctgaaagggattgaggagatggtggaggtctactataacagccgtcagtttacgaatacgatggaagaactggaaaaggaatacgattctgcatttaccatgtatgaccggcttgcatcttattatgaagacaatggttataacgccgttcaacacaagcggagtgccagatatgagattttactgaattatatacggctgcatcataaagaaaaagaagatctgttccgggaagtgctcacatacgattactatcttcgtgaaaatgcgaagagccgtccggaatttgccggggaatatctggtggaaaaagacgtggcgagaacattttatgaaaaagaagaagagacacacacctaccttccggattatggaaaatatgacagaaaccagatgcgtaaaatgacgcatttggaatattttaagttggcagatacctatattctgtttgattatcagaacagaaatccactgaatcaggaagccagagtctgcaaggtaaaggccgggacagggcagcggtaaagaatgaaatataaaaaggaatagaattatgaaaaaaagaacaggagaaattctcagccttctggatgcgaagtacggaaccgaattcatctgctatctgaattatgaaactccgtggcagcttctgatcgctacgatgttaagtgcgcagtgtaccgatgcaagagtcaatatcgtgacaaaagatctgttccagaagtatccgtctgtcgaagcatttgcggacacggatctgaaagaattagaacaggatatcaaaccaacgggattctatcataataaagcgaagaatatcatagcctgtatgaaagatatccgggataaatataatggagaagtcccatcagaacttgaagaccttttaagtctggcgggagtaggcagaaagacagccaatgtgattcgcggaaatatctatcacgtgccgagtgtggtcgtggatacacatgtaaagcgcatatccaatcggctgggacttacgaaaaaccaggatccggacaagattgaacaggatttgatgaaggaactgccggtagatcactggattctctggaatattcatatcattacatttggacgaacaatctgtagtgcaagaagtccgaaatgtgaggattgtttcttgcaaaaatattgtaaagagtataaaatgtagagaaatacgttgctgttcggtaaaaatatttacggagagtaacagaactatgatcaaagaaggtagaaaaatgaatttcaacaataaaaaaacaagaagaattgtatcaattgttgtgcttatcgtcatcattgccatggtggcaacgatgattattccgtatcttgcataaggcagaaatgcagaaacgatataagataaagtatcaagaaaagataagagataaaggggaacgtaatagggatgaagttagagacacagacagaacagcttataagtgaaacagttaccgtctacggattatcaccacagatcggtattcatgcacttgcacagactgtgaacgcactggcggcacagggtgcagtattttctgtctgccctgaaactaccacagaaacatccgcaggcgttactgttcagattgcctgtccggaatacatattcaaatccaggattcacaagattgaaaagcttctgaaaaaggcatgtaaaaaatacaatataaatcctgaccggatacaggcatctgtgaatcctgcagttcaggtaattgcagtgacagttacgggaatcgcaaaagcaccgaaagaagagacctggaacagggaaaccgcacgagcctgtaaggatattgtctttgtggggtatgccggaatggatggcatgctcaggatcacagaggaaaaagaacaggagcttaagacccgttttgcaccggttttcttaaagcaagtactgtcatatgagcagcacatttttgctttgagagaaatcgaagccgcaaaagccgggggcgcatttgtcgtacgtcaggtcgcagatggcgggatcttggcagcactgtggaatctggcactggaattagaacagggactggatcttgatatgaagaaaatcagtattttacaggaaacgatcgaggtatgtgaacatttccgactgaatccatatcagatgatatctacaggaagttttctggctgtgactgacaatggggaagtactggcagatgcgctgaacaatcaggggattacagcagcagtaatcggacatacaacagacaacaacgataagatcttaagaaatggagaagagatgcgttatatcgaccgtccggctccggatgagatcttgaagctatatagcggaggtatgaatgatggaagaattaagaaagcagatactcctgtatctggagaagcatagcagggtggacctcggagaactggcagttcttcttggaagcgacgaagtaaccgtagcaaatgagatttctgccatggaaagagcaaagatcatctgtggctatcatacactgatcgactgggataagacgggaacagagtatgtgaatgccctgatcgaagtaaaagtaacaccacagcgtgacacaggatttgataagacagcagaacggatctgtaattatccggaagtatcagccgtatatctgatctccggcgattttgatatgatggttctgatcgaaggcaagactttgcaggaagtgtcaaagttcgtatcaagtaaattatcaccgatcgaagatgtcacaggaaccagtacacagttcgtactgaagaaatataaggatcacggaacaattatgttcggacagaaaaaaacagaaaggatgcttgtaacaccatgatgagaaatccactatctaagaaaattacaggcatcgaaccatctggaatccggaaattctttgatctggtaagtgagatgcctgacgcaatatcccttggcgtaggagaacctgattttgacacaccgtggagaatcagagaggaaggtatctataccctggaacagggcaagactttctatacatcgaatgcaggtcttaaagatctgaagatcgagatcagcaaatatctggaacgtaagatccatgtagaatatgacccggatcatgagatcatggtgacggtcggaggaagtgaaggaatcgatgtggcactgcgcgcaatgctggatccgggagatgaagtcctgatcccgcagccgagctatgtatcgtatgtaccgtgcaccattttggcagacggtaatccggttgtgattccccttcaggaaaagaacgaattcaaactgacggcagaagagctggaggaagcgatcacgccaaagacgaaaatgctggtgatgccattcccgaacaatccgacaggatcgatcatgacaaaagaagatctggagccaattgcggaagttgtgaagagacatgacctgtatgtgctttcggatgagatttattctgaacttacatacaagacagagcatgtgtctattgcatctcttccgggaatgcaggaaagaacactggtgatcaacggattttccaaaggatttgccatgacgggatggagacttggttatatctgcggaccgtctgtgatcatagaacagatgttgaagatccatcagtttgcgatcatgtgtgcgccgaccaacagccagtacgcagccatcgaaggcttgcgtcactgcgaagatgaagtgcagcagatgagaaatgcatacaaccagagaagaagatatctggtaaatgaatttgcgaagatgaagctggaatgcttcgagccattcggtgcattctatatcttcccaagtatcaaagaattcggtatgacttccgaagaatttgcaatgcgtttcctggaagaggaaaaggttgcggtcgtaccgggaagcgcgttcggtgagagcggggaaggattcctgcgtgtatcgtatgcgtactcactggaagatctgaaagaggcgatcggaagacttggaagatttgttgagagactgagaagtcagaaataaggttgacggaagctgatttgaagagaatttaataagaaataatagaaatagaaaagccgtcagggaatgttaatgtatgaattagaattacattccctgacggcttccgtgttacctgatccggtgggatttctacaagttttccttttgaaattacttcccgaaagacttctatcccaagacaggtacagagagtatcgaatacttccgttacgcaggcctgtgtttttgagcaggcattatagacatggggtgcttttgtcaataaagtcttataatcaggaagttacttttacatttaacgtacatttttgaaaaaaatcttgacttggagtgaactccaagtgctatagtaatgaacggaaaggtggtgtctggattgacgataaaagaagtaagtgaagcatatggcatttccgctgataccctgcgttactatgaacgcatcggcatgataccggaagtaacacgtacgacaggaggaatcagagactatcaggaatcagaccttggctgggtagagcttgtaatctgtatgagaaaagcaggacttcccgtagaggcgctgatcgagtatgtaaaattatatcagcagggcgatgagacatttgaagcaagacttcagcttctttcggaagaaagagagaagttagaaaagcagaaagcgcagatagagctagcggtcaaccggctgaatcacaaaatttccaaataccaagaagcagtaaagacaggagtattaaactgggaggagaatagttcatgtatatagaaaagattaacggaccagaagacgtaaagaaattaaccgtagatgagatgaccgtaatggcaggtgagatgagaaaggcattattaaagagagccagcatccacggcggacacttcggaccaaacttcggtatggtggaagcaacgatcgcactgcattacgtgttcgagtcaccaaaagacaagatcgtatatgatgtatcacatcagacctatccgcataagatgctgacaggaagaaaggatgcatatctctatgaagagcattacgatgatgtatccggatacagcaatccaaatgaaagtgaacatgatcatttcacggtaggtcatacttctacatcggtcagccttgcatgcgggcttgcaaaagcaagagacctgaaaggagaagagggcaatgtaattgcagtgatcggtgatggttccttaagcggaggcgaagcactggaaggactggactacgcagtagaattagacgggaatctgatcatcattgtaaatgacaatgacatgtctattgcagaaaatcatggcgggttatatggcaacttaaaattactccgcgagaccaacggacgggcagaatgcaacctgttcaaggctatggggctggattacatttatgtagatcatggaaatgatgtcggagatctgatcgaagcattcaagagtgtcaaagacagcaggaaaccggtcgttgttcatattaataccttaaagggaaaaggatatgcaccggcagaaaagaacaaagaagcatggcattataatggtccgttcaagattgagacaggcaagccgttatacgaaatgacagaagaagactattcagatatttctttaaattatcttctggataagatgaaaaaagatcctgcagtggtagcaattacatccggaacaccgactgttatgggattcacagaggataagagaaaagaagccggaaagcagttcgtagatgtcggtatcgcagaagagacagccgtagcacttgcttccggaatcgccgcaaatggcggaaaaccggtttatggtgtctacagtacatttgtacagagaacttatgaccagatcgcacaggatctctgcatcaataacagccctgcaacgatcgtcacattctgtggaagcgtatatggaatgaacgatgtgacacatctcggactatatgacatcccgatgatggccaatataccgaatctggtataccttgctccaacaacgaaggaagaatatctggcaatgcttgactggagtatcgaacagaacgagcatccggtagcaatcagacttccgggtggcagcgtgatctcagccggaaaaaagattacaaaagacttcggagatctgaataaatacgaagtaacacagaatggttccaaggttgcagtgatcggacttggaacattctacggacttgggaaagaagttgcagaagagcttaagagagtaaccggaacagatgcaacagtgatcaatccatattatattacaggtattgatgcagaacttctggaagagcttaagaaagaccatgatgttgtgattactctggaagatggtatccttgacggcggattcggtgaaaagatcgcaagattctatggagattccgatatgaaagtcctgaacttcggactgaagaaagaattcctggaccgttatgatgtggcagaagttctgaaagagaatcatctgacgaaagagcagattgtggaagatgttaagagcgtactgtaaaaaagtgtattagagaggcagagatgtctctctttttggggcttgttgtgcaaagcgtcgcaaacaatgtgctgaataatgtgagaaacgttacagaaaaggtataaaatatattgaaaaacgtcgtaaaagtataatttgttggtatgccaacagctaaaatcatgtaaaataagatagaataatgctatcaacaattctaaaaatatatgcgaaaagaaagcgaggacacacacatggatcatatatatgacgtaatcatccttggcgccggtccggcgggattaagcgcaggattatatgcaggcagaagcagactggacacactgatcatcgaaaaaggtcaggccggcggccagatcattaatacagacgagattgaaaactatccgggacagatcgtagaaggcgaaacaggagtttctcttgtacgcagaatgtacgaacagacagaacagttcggagcagaacatgtccgggatacgattacaaatgtagaactggatggagatattaaagttctgacaggcgaaaaagatacttatcaggcaaagaatatcatcattgcaacaggtgcatacgcaagaccgatcggatgcaaaggtgaacaggagtataagggacgtggaatctcttactgcgcgacctgtgatgcgaacttttttacagatctggaagtttatgtagcaggcggcggggatgcggcagtggaagaagcactgtatcttacaaaatttgccagaaaagttacgatcattcacagaagggacgagctgcgtgcagcaaagtctattcaggaaaaagcatttgccaatccgaagattgcgttcctgtgggattcggtagtggaagaagtgggcggcgacggactgcttcagacaatgaccgtgaaaaatgtgaagacaggcgagcttataaagatagaagccgatccaaaagacggactgttcggtcttttcggattcatcggtatgattccgaatacgggcgtatttgcagacaaagtagagacggatgacaagggatacattaagacagatgaggacatgcataccaatgtaccgggcgtgtatgcggcaggagatgtgagagtcaagagcctgcgtcaggtagtgacggcagtggcagatggtgcgatcgcagcagtgcaggtggagagaagtatgtcggattattagaagaatatggaaaatgaggatccgccggataaaaaaatgtccggtggatttttgcgtataacgatgtattcgaagtaggtgtcagggcttcggtgttgttatagatgaaaaagtggatgcatatttggagaaaatggaataatatataatgaaatatggaaaatatacttgataaacggaataatatataataaaatatggagaacaatattagaaatatagattgttatgcgttcagaagaaggagatgagcccatgaccgttgaagagatgaaaaagaagaaatcagaattaggtttcagctgtgagcagatatcagctcgctccggggtaccgttgggaacggtgcaaaagatattcagcggaataaccaaaagaccaagatatgatacaatttgtcagttggaaaaagcatttccgatggaacctgattctaatccatatccttgtatgatgaaagaaagcgtatcggcttatctcatctatggagatggcacagatcatgaaagtgatatctggaaaagttttcgtggaaaaaagcaaggcgaatacacactaaaagagtatgaagcgattccggacgaatatagagtggaattgattgacggagtcatctacgacctgaatacgccaaccacgattcatcagcagcttgcatttgaaatcagtatcagattaagagagtacattaggcagaacaaaggattatgtatggtactgccgtcaccggtcagcgtacagctggatgaagatgaccggacgatgctgcagccggacgtcgttgtatgctgtgtcagagataaaatccttcgaagtcatgtctatggagctccggatatggtaatcgagatattatcaccatctacaagaaaaaaagatatgggattaaaactgaaaaaatatatcactgcaagagtcagagaatactggatggttgacccggataagaaaaaagttgtagtatatgacttggaacataatgagttaccggccatctatggctttgaagaccaggtaccggtgaatatatttgctggaaaatgtcagattgatttttcggaaatatacagctatatagaatttttatttgaaaaagaatagaaaaaacggaggaacacaacatgttaaacatcgtactacacgaaccagagatcccggcaaacacaggcaacatcggaagaacctgcgtagccaccaacaccagattacatttgatcgagccgctcggcttccgcttaaatgagaagaacttaaagcgtgccggcatggactactgggagcatctggatgtcagaacctatattgattacaatgatttcctggaaaagaacccgggagccaagatctacatggcaacgacaaaagcgccgaaggtatatacagaagtgaactatgaaccggactgctacatcatgttcggaaaagaaagtgccggaatcccggaagagattctggtagatcataaagaagactgcgtgcgtatcccaatggtgggagacattcgttcgctgaaccttggtaattcggttgcaattgtgctttatgaagcactcagacagaacggatttgcaggaatgaatctggagggacatcttcacgaattacattggtagaaaaagaatctgatggtataaattccatattatttagacaaaataaggatattgtccgttttcgttgagaaaatgagataatatccttattttcgtaccaggtatatgaaaaaatacaggaggcgctggcaggcgtttctacttattaataagtgcacaaatataaaacgacaaaatgataaaaatgtatcaaagtgacatacaatttacaacaaatgtaataaatgtatggtaaaattgcagaaataagattataatttaaactagattttgtatttttttgaaggagaggtggtagatgaatgatagaagaaaccattaagaccatcaaggaaacggagaatgaagcggatgagatcataagaaaagcagatgcaacgtgtaccgagatccttgaaaaagctgtcagagaggcaaaagagataaaagagcaggctgtagcaaatgcaaagaaacaggcagaagcagatcttttgcaggcgaaagaagaaggagaagtcttaaagaaacaggcttccgagaagacggaacaggagacagaagcattaaaagcactggctcagggaaaagaagaggaggcggtatccgcagtcatcaaagcattgctctgatgatatgggaagagtaagaacgtgaaaaaataaaaaaggagggatgcagttatggcagtattgcagatgcagcgaatcagtatctgcgcattgaaacatgaccggaaagcgattctggaaaaactgcagtccatgggcatgatagagatgcatcaggtcgcacaggacgaagccggattcgagaagatggatacgcagagtgcgaaatcaagctttgagaaacgggtgcagattacggaaaatgcactggatgtgttgaatcagtatactccggagaaaaagtcgatgttcgccagtctggaaggcaataagctgatcgataagaagacgatggaagcagcagcggtgaaacaggaggaggtcatggaagtggcggaacttctgattgctgatcataagagaattgcggaagcacaggccgagatcgtgaagcggaatacccagatagaggcacttgcgccgtggatgagtctggaagtggagatggattatccgggcacgaaaaagacggcaatgcttcttggaaccatggcggcggagacgacactggaaatgatctacggaaagcttgccgaagagcatccggagatcgaagccgtagatatatcggttataagtcaggataaagatgccgtgtacttaagcgtgttctgtatgaaggaccaggcagcagatgtggagaatacactccgcactgcaggattctcaagaccggttgtatcgacagagcagattccggcaaagcagaaagaagaactggaagaacagatcagacagatcgaacagacaattgcagatatccggggagagatcatatcttacgcagaggaccgggaggaactgaagatcatcggtgactattaccggatgcgtgcagaaaagtacgaagtactgggaacacttccgcagtccagacgtacatttattatcagtggttacgcagcaaaagaagcgataccggcgatccagaaaggaatcggggatgcgtatgactgtgtgatcgatgtagaagagttaaaagaagacgaagaaccaccggtgatccttaagaataacggattttcggaaagtgtggaaggagtcctggagtcttacggactgccgcataaaggagagatcgatccgaccgcgatcatgtcattcttctatgtatttttctttggaatgatgttatcagatgcagcatatggtgcgatcatcgcaatcgtgtgtctgatcgtccttaagaaatttccgcgcatgagtgccggtatgaggaaatctatgaaaatgttcatgtactgtggaatttctaccgtggtatggggaatcttattcggtggatatttcggagatgtcgtagacgtcgtatcgagcacattttttggaaaagaactgacgatcaagccgctgtggtttgcaccgttaaatgatccgatgcgacttctgatctattcaatggcattcggactggttcatctgttcgtgggtcttggaatcaaaggatatatgttgttaaaagacggaaaggtactggatttcttctgcgatatcgtattgtggtacattttcctgatcggactgatcctgatgttacttccgtcagagatatttgcttcaatcgcacagaccaagatcgtgttcccggcagcgcttgttacattgtcaaaagcactggcaatcatcggggcactcggactgttattgatgtccggaagatcgagcaagaatccggcactccggctggcacttggagcatatgatatctacaacattaccggatggttaagtgatgtattatcatactccagacttctggcactgggacttgcgacaggcgttatcgcatccgttgtcaaccagatgggaagtatgcttggtaagagtgtattcggggtcatcttatttatcgtagtatttatagtcggacatgcaatgaacctggcaatcaacctgcttggtgcatatgtccacaccaaccgacttcaatttgtggaattctttggaaaattctacgaaggcggtggaaaacctttcgaaccgtttcatgcggagacaaaatatgtagatattaaggaggaaaaatagatatgagtatttggaatgatatgggaatggtatatgcacttcttggtgcggcagtggcagtattcctggcaggtgcaggatctgcgatcggagtaggtattgcaggacaggcagcgtccggagttgtaacagaagatccaagcaaattcgcaaaagtattgatcatgcagctgcttcctggtacacagggaatctacggattgctggttggatttattacattatctaagatcggacttcttggcggcggcgcagcagatctggatccgaagaccggacttctgattcttgcagcttgccttccaatcggaattgtaggtctgatttcaggaaaagcacagggacagacagcagcggcagcaatcggaatcgtagcaaagaagccggatcagttcggtaaagcaatgctgtttcctgcaatggttgagacatatgccatccttgcacttctgatttctatcctttccgtaacagcaattcaggtatagaaggagtgtgaaggaaaatggctggattagagaagatcaaaagtcagatccttgacgaggcaaaagagacggcgaatgcaaagatcgaagatgcgaaagcgcaggcagaacagatgaagactcaggcgcaggcagaaggaaccgcacaggcagaacagatcctgaagaagtctgaaacggaagttgccgcacagaaagagcgtgtgaagtcagccatcgatcttcagagaagaacgagacttctggaagcaaagcaggagatgatcgcagagatcatcgggaaggcgtatgaaaaggttataagtcttgcgctggatgagtattaccagatgctcctgtctattctggaagcatacgtacttccgcaggagggagagatctatttctctgtaaaagatctggaaaatatgccggtaggatttggcaaagaaattgaagaaatagctctggcaaagggaggaaaacttactgtagccggagcgggcagagataatattgacaatggattcattcttgcgtacggtggaattgaagagaactgtacgatcagggcaatgttcgatgcgaagcgggatgaacttgcggacatcgttcaccggatgctctttgtatgatatggagggacaacatgagtgaacaatatacctatgcggtcgcaagaatccgtgccctggaagtagccctgttctctgacagtaccatcgaccagctgatcgcgtgccagagttatgatcaggcattgcagttcttagaagagaaaggctggggagataccgaaagcagcggggatgtggaaaagatcctgacgagagaagaagaaaagacatgggaagtagtcaaagacctgtcgatcggaatggaacatttcgatgtgctttcttatccgaagctttttcataatttaaaggcagcggtcaaggaagtctgcaccggagataagaaccggcatatctattatgaagatgttcggattcccggggaagagatgcgaaagatcgtagaagacagagatttcggaaagcttccggacagtatgcggatcgcaggagaagaagcatacgagacacttcttcataccggagacgggcagctctgtgatgtgatcatagaccgggcggcactggatgccatctatcaggccgggaaagagtcaccggataagatcatacaggattatgcagaatccacagtggcagtggcggatatcaagattgccgtccggtcacagaagaccgcaaaatcaacggaatttatgaaacgggcaatggcagaatgtgattctttaagtgtgagccagttatcgaaagcagcacttagcggtatggacgccatctgcgaatacttaagaggaacggcttatgcagaaggtgcggatgcactggcagagtcgccgtcggcatttgaaagatggtgtgacaaccggatcatccagaccatcagtccggagaaatatcatgcatttacgataggaccggtaattgcctatgtaattgcaagacagaatgagattaaaacggtacgaatcattttatccggaaagcagaatgaactgccggatgattcgatccgggaaagggtaaggaaaatgtatgtataagattgcagtattaggcgattacgacagcatcttcggattcgcagcactgggccttgatacatttgccgtccagacccgtgaggaagccgcagagaaattacatcagctggcacagggcggatatggaattatctatatcacagagaaacttgccgctgagttaacgcatgagatagaaaaatatcaggaacaggtcacaccggcgatcattcagattccgggtatcgccggtaatacaggcgccggggttgcaggtgtgaagaaatcggtggaacaggctgtcggttccgatattatatttggcagctaaaggaggttgattcgtccgtatgagtacaggaacgattaaaaaagtagcaggaccgctggtcattgcagaaggaatgcgtgacgccaacatgtttgacgtggtacgtgtaagcggccagcgtctgatcggagagatcatagagattcacggagatgaggcatccatccaggtatacgaggagacatcaggacttggacctggagagccggtagagtctatgggagtaccaatgtcagtagaacttggacccggactgatcacaagcatatacgatggaatccagagaccgctggatgacattatgaaaatctccggaaataacttaaagcgaggcgtggaagttgcttcgttaaaacgtgataagaaatgggaatttgtcccggctgcaaaagtcggcgatgaggtagaagcaggtgacgtactcggaactgtgcaggagaccatcgttgtacagcagaagatcatggttccttatggagtaaaaggaacggtaaaagagatcaaagccggaacatttaccgtagaagaagtggtagcagtgatcgctaccgaaaaaggtgacaaagaactgacgatgatgcagagatggccggtacgaaagggccgtccgtatcagaagaagctgccgccggtaaaaccactggtaaccggtcagcgtgttatcgatacattcttcccgatcgctaaaggtggtgtggcagctgttccgggacctttcggaagcggcaagacagttatccaacaccagttggctaagtgggcagaggctgatatcgtggtctatatcggatgcggagaacgtggcaatgagatgaccgacgttctgaatgaattcccggaactgaaagacccgaagaccggacagtctctgatggaaagaaccgtgctgatcgcaaatacatcggatatgccggttgcagcccgtgaggcttctatctataccggaattacgatcgcagagtatttccgtgatatgggatattccgtagcgttgatggcagactccacatcccgttgggcagaggcacttcgagagatgtcgggacgtctggaagaaatgcctggtgaagaaggttacccggcatacttaggatcccgtctggcgcagttctatgaaagagccggacatgtggtatcccttggtaaagaaggaagagaaggtgcactttccgttatcggagccgtatctcctccgggtggtgatatctccgaaccggtatcacaggcaacccttcgtattgtaaaggtattctggggactggattccgcacttgcgtataagagacatttcccagccatcaactggctgaccagttattcgctgtatgttgacaatatggcaaactggttcaatgaggaagtggcagcggactggatggaagaccgtcagaagatgatgacaatccttcaggaagaagccgagttaaatgagatcgtacagatggtaggtatggatgccctgtcaccgactgaccgtctgaagatggaagcggcaagatccatccgtgaggacttcttacatcagaactccttccatgagatcgacacttacacgccgcttcgtaagcagtatctgatgatgaaactggtactggcattttatgagaaatctgtcgacgcactgaacaagggtgcggacatgaatgcactgatcgccatgccggtaagagaaaagatcggccgttataaatatacaacagacgccgatatcgaaaacgaatataagaatgtagaagaagaactggacaaggaagttgcggctgcattcgggaaggaggacttctaattatgccaaaagaatatagaaccatacaggaagttgccggacctctgatgctggtacgcggcgttgaaaatgtagcctatgacgaattgggtgagattgagcttgcaagcggtgagaagcgccgctgcaaggttctggagatcaatggaaatgatgcactggtgcagttattcgaaagtgccacgggtatcaacttaagtaacagtaaagtacgttttctgggacgaagcatggagcttggtgtatcggaagatatgcttggacgtgtcttcgacggactgggccgcccgatcgatgggggaccggagatcctgccggatgaaagacgtgatatcaacggtctgcctatgaacccggcggcaagaagctatccggaagagtttatccagacaggtgtatcggctattgacggactgaacacattggttcgtgggcagaaacttccaatcttctcggcatccggacttccacatgccaacctggcagcacagattgcaaagcaggcaaaggtacgcggaagcaatgagaagttcgccgtagtatttgccgctatgggtatcacattcgaagagtcgaacttcttcgtagaatctttcaaagagacaggtgccatcgacagaaccgtgctgttcgtcaacctggcaaatgacccggcgatcgaacgtatttccacacctcgaatggcgctgacggcagccgagtatcttgcattcgaaaaagacatgcatgtactggtaattatgacagatattaccaactatgcagatgcactgcgtgaagtatccgccgcacgtaaggaagtaccgggacgtcgtggatatcctggatatatgtacaccgatcttgcaacgttatatgaaagagccggaagacagaatggtaagaagggaagtatcacactgattccgatcctgaccatgccggaagatgacaagacgcatccaatcccggaccttaccggatacatcaccgaaggccagatcatcttaagccgtgatttgtaccgtaaaggtatcaaaccgccgatcgatgtattgccatccctgtcccgtctgaaagataagggaatcggagaaggtaagacaagagccgaccatgcaaataccatgaaccagttatttgcggcatatgcgcgaggaaaagatgcgaaagaattaatgactatcttaggagaggcagctcttactgatattgacctggtatatgcgaaattcgcagatgcatttgaaaaagaatatgtatcacagggatacgataccgacagaccgattgaagagacactggagatcggatggaagctgttggctatgctgccaagatcagagttgaaacgaattgatgataagttcttggacgagtattatggtaagcagtaagctatgcggattcgagtcggcatggcgtccaatatataaagtatagaaaggagtgatactatggcgtcaacccaggtaacccctacccgtatggaactgaccagaactaagaagaaactggtcacagccataaaaggtcacaaacttctgaaagataaacgagacgaactgatgcgtcagttcctggatctggtaaaagtgaacatggagcttcgggaaaaggtagaagcagggattcgttcagctaataagaacttcgtcatagccaaagccggcatggatgaagcaaccctgaacacggcactgatggcaccgaagcaggaagtagatctggaagtcggacagaagaatgtcatgagtgtagacattcctgtattcgagacgaagaccagaacggcagatgcgaatgatatctattcgtatggattcgcatttacatcgagtgatctggacggagccgtaaaatctctggcagatatcctaccggatatgctaaagcttgcagagacagaaaaagcctgccagcttatggcagctgagattgagaagaccagaagacgtgtcaacgccctggagcatgtgatcattccggaggcacagaagaatatcaagtatattacgatgaaactggacgagaatgaacgaagcacccagatccgtctgatgaaggtgaaagatatgatgctggaggatgcgcatcattacaaagaaaaggagtaggaatactgagaaattctcagatgaaaaatccgcagatataagttgaaaagcttaaatctgtggatttttttatgtcagaataagccggaaaaatagttagaaacccattcttattgtacgcaaattcattgacaaaccactactgtgtgatacaatatagttaagaactactatagtatacaaggtaggtgaaaatatgtatgataaatcacaattaatgaagggaactttagaaggatgtatcttgcagattttatccgagacggttacatacggatatgagattgtaacgacattgacagagttcggatttgaagatgtaaaagagggaagtatttatccattacttgtacggttggaaaagaaaggaatgatttcttcagaattacgtccttcgccgcttggaccgaaacgaaagtattattcattaacggctgaaggagaggcatatttgcaggcgtttattaaatgctggacggaagtacaattatcagtaaatagaattttgaaaaaggaggggtaaccatgttgacaaataaaaataaaaaaatgatccggaagatgcgtaagtatataaagacgttcccgcttacggaaaaagaaataaatcagatggttgaggacattacgggaatggcagaagaagcacaggagcgcaatgaagattttgaaatcgtacttggaaagccggttcgtgaattctgtgatgatttgatctattcggtgggaggaatcagggcaccgggaggtcggaaattgcttaggggaacttcaatttattttcagatattggggctttgggggattgtaggttgcttgattaatgtctgctttttaaacggggaacgcatgcatgcgttatgggtacttgctttttcaatcggtatgtggtatctgggacattacggggagacgaactgcaataatacagaaaaaacaaagcagttaacagtagttatctctatctatatgggtattaatctgttaatgtattgcaatgaaatcattattgcaatagatgcaggaaaagcatttttgaaagagtcggattttccacttatgattgttgggattattgttaattttgtaccggcgattctctatctgattggagcaagacggaacaggccggcaggagaacaaatagaagttgaaagtagatgacaagagatggggaaacatttttctttaaaggaatagtatatgaaagtattattgaaaatattaaaaaagaatgtgcgtaatagtattgtatgttttatgagtgctattttagttgcaattatgttatttgtctttctaggagttaaagaattggttcttggaacaatgagtatggaagaaagggttcggtcgcaacaaggagttgcgattcaaacgtacatgtatatattgctgtttattggtctgattttgatcagctatacagtaagcaattatagccggataagaatcaaagattatggaatgtttatggtattcggagaagaaaagaaagatattatccggatgataattctggaatatgggattatatgtggtatttcgtggctgattgggtgtgtagtgggaacgccttttgtaattcttcttcagtctatattcagaaaagaagggattcaaacagttcaagatccatgctggtttctaaagaatattggaagtacatgtttttatatgtgtgttattttgtgcattgcagtaatcatgaatataataaaaattcaaaacaattcactggcttcgcttttgaatacggaacagaaaagggggacggttccgtctgttaaagcaagcgtgataggtgcgattgcagggctgatctgttttgtgtttgcaattattcttttttcgaaggttcctatgacatatccacgtatgaaatatggagttcttttttcgctgactggattatatctttggtttacttatttgggaaatgttatattgcgatgggtgaaaaagaaagaaaaatggtatgacagacatattcttacgctaaaaacgttgtatcacagattttcagaaaataaaaatataattttaattgtttttattattaatgtatttgtatgggtgattgtaaatatcaatattatagaatatggtaatctttcttccgagtatttatggaaatatccatataattatgtatgtatgacagaagaaaaatatacagacgaaattcataaggttataaaagaaccagatgaaaaaatagatgaatatgcgtatattccgctcataagcaatgatggaggggaatatgtaggtatttcggaggattcctataacaaacttacgaagaataagaaagagcatatcaaacagggagaggtaaaggcagttctggaaaaatcaaaacaagacgatgaaaacatgtttcaggataaacatgtttatttaaaaacagcaacaggaatgtgtaaatttgcgataaaaaaagaagtgaaagaagttttatttgttgctcaacagtcggatattatacgaattctggttatgaataatagtgattttgatatgcttagatctttgcagaaaaagaatacggttattatgacgcagcaaacagaaaaagagacggcgattgatgagggcaaattaaaagtatgtgaaaagaaatatgagataattggtttttataaaggctcattgatgaaagaagacagatcggatgacctgacaactcttatcttttacatttgtattggtgcatttttgattattagtggaataatgattttatctataaaaatatggtcagacatttctaatgtaagtatgaaatatggattcttgaaaaaaataggcatggagaccaaagaaataaagaaaaatgtgaaaaaggaactttcgctttctttatggatcgcatttatactttcgattgtaataagtggtggtgctttgagttatattacatggaacgttgattggctcttgaaaaaacaggtgttgataacattttttgcactgttattattccagaccgggtacattatcttattgagagagtatggatggagacttgctaatcagcaaattcagagtgaaagaagggaaaagatatggaagtgatcagcggagagaaaattgtgaaaagttacggtaagtttaaagtgttaaagggtattaatttgaatgtacaggatggcgaatttgtaggaattatgggaaaatcaggaagtggaaagacgacacttttgaaaattctgggactcattgaatctgtaacagatggggcgcttttatacaagaaagatgaaatatcaaaactgtcagataaagaacttgcgagaatacgaagagaagaattaggcttcgtatttcaggaattttatttgatggatagtttagatgtttttgaaaacattatgttgcctttctatatcagcaaaacagtagatgattccaaaaaggaacgagcgagagtgttaatggataaattcggaattaggactttggaaaaaaagatgccggccgaactgtcaggaggtgaaaggcagagagttgcaatttgcagagcattaataaatgatccagagattattttcgcagatgagcctacaggaaaccttgattcaaagtctggaaaaatcgtgattgatgcattgaaggatattaatgaacatatgggaaagacaatcattatggttacacatgacccacagatggcaagctattgcagccggttgattctgctgaaagatggtgtgatattggaagatttggaaaagaatagaaatcaagaatcattttatcaggagattcttggaaagatgaaagagttgtagaaaattcaccagattcacaaaaatttagcatttccaaactgcgcattgaaaataaaaatcaggcatgttattctggaaacacgcagataaattctagtatctgcactgtatctatatttaccaatgcatttacttcagatgtaaaaggctactctatttcaggaggtataatatgccaaagaataataaaattaaaatattatgtctgctcataattggaatcgtatttttgtatatatatggaccaattgcattcatgaaagatgggttagtaacgagacagagtgtaaattcttttgatgaattatacgagttaggaccagcacgccggcataaatgtgaaaatggtacacgcatttatattgtatattttggatggtctgctccaaaagttaaaaaagaaatagtatatcaaaagaatgaagaaacacaaaagcaaatagtggatgttgatacgcaaaagattatcccggggttttattatatttcatgggatacaaaaaattctgtatatagaattgaaacaagaaaaaaatattatcttgtaataccgtattgttaagttttttaattacatgtcataataaaagatggaaaatatattgattaatatttatctgtgtgttaacatataccaaagcatatttcaaaaattccaaggtatataaaaataaacatataccatctatgatctaattacatttcagaaatctatgcttttataccaatcaattgtaaaaaaagcaggagatgactgaaagagtaaaaagacatcctcctgcatacaggagggaactgaatatggcgaaaagaaagaatcaaaagagacggagcaagaagtatcaggtaaataaccggcagctaaaggcaaaaaggatgtctctttagaagaagcagttacgagagcagttgacgaatgcatagaagaaggaatcctggcagagtttttattgaagaataagactgaggtgatcaaagtgagcatctatgaatatgacaaagagtttgaagaaaagaaactgcggaaagcagagtatgaggctggaagacaggatggaatcgagattggaagacaggatggaatcgagattggaagacaggacggaatcgagattggaagacaggatggaatcgaaattggaaagcggatactcttagaaaaaataataaagaagaaattgaaaaaaggaaaatcaacagaacagatagcagatgaattagaagaagatataaacataattcaaaaagtggttgagaaactaaaaagccaaatatagaatttgtcaaaagaattccctgaagtgaataataaaacttcagggaatttatcatttgctcactaccggtattattctgtagtatcacgtcggatcaatacaggcgtaatctgcttatgaaccggctcttttaaaggagttggttttctttttttcatttcattcatctggagaaccagaagctccatggcagtctgtgcaattttctcaatttgctgtccaacggttgtgattggaaggatagcttcgcttgcaataggagaatcatcgaatccgacaatctgataatccttcggaagttttccgtatttctggaatatcaggttcaggaacatactggcataagtgtcattcgcaagaaagactccctttttttgtgccggatatttctcttcaatttcattaaatatattctttagctgagctaaagtttcctgataagtgtttcccatatttctttggatcagttcgtgagtaatatgatgctcattacagatatcttcaaatccctgaatacgcccataagtcgggagggtatcagaaaatatggaattgatatgtaaaatgacatcacagttattacgtatcaacaaactggttgcctgaacaccacccagatagttgtctgtagacacgctgcagacatggtcacattcccgctcaatcgtgacaaccgggagtttataagaagcaagttcttcagacgaaatggtattgcttaagacaataagtccctcaatcttataagccatcagttcatgaatatatttttcttcaatctcttttttattatttccaatgaatacaagaaatttataattatacttttcgtaagtagaaagtaactggtttaacatctcagagtaatagtgaagatacaggttggggatgataattccaacaaattcactttttccattagccagtactttggcgagcttattttcctggtatccaaggacatccagtgcatgagtgattttttcctgattttcaagagtaagagaatccggattattaaaatatctggaaatggtagtttttgaaaagcctgtataagcggctatatctgcaaaagttacttttttctgtttcatgtaaatcctcttccttataatgtatattatcagtatagcaagtgcattgaaaaaaatcaaacaaaaaataactagttaagtaaccggtaacttttttctttgaaatctattgacaagtaagattctggatagtattatgaacatacaaagtaaccggttacttaactggttacgcaatcgtgaatctgaaaggagaaagctatgaagaaacgaacagtaggggtactgctggcagcattctttgcaatggcattgacggggtgtggagataaacagccgcaaccaggagaagtaaagggatatgacaaaggcgaagaatatctttctatctgggtacattcaatcgaagacacagaagaaggacagtgctacaggaaatctgtagatgcatttaataagaaatatgatgggaaatattttgcagatattgaatttattccacgaaatgacagtggtggaggctattcggataagatcaatgcatccgtgatgtcaggagatctgccggatgtgcttactgttgatggccctaatatagcggcatatgcagagaacggaattatccagccgcttgcaaaattaacagacgaagaaaagagtgtgtatctggattccattattcagcagggaacatataataacaagctctatgcgcttggagcaatggaatccagcgtgggactttattataacaaagatattctcgcagaagcgggtgtagaagttccagatgcagatcacccatggacatggagtgaattcacagaggtgttaaagaaagtacagccggtagtagagaagaaaaaaggttatgcgctggatatgactttcccgacaggagaagctacgatttattattatgcaccgtttttctggtcaaatggcggtgactttgtaagtaaagatggactgaaggtgaacggtgtattcaattcaaaagagaatctgaaaacggtgaattattttaaatcgtttttggataatggatatatgtctaaagtacagatcacagacctgttcgaaagcggaagagcagcatttaagttcgacggggcatgggaagtaaatacaatctataataactatccggatgtaaaccttggagttgcaccatatgtagtatccgataactgggatggcggaagatatacaccaaccggttcctgggcatttgcggcatcatcaaagacgaagaaactaaaaggtgcgacaaagctggtacagtggatgagtggtgtagaaagtggaaagcgtctgtgggatgaaagtaagagtttcccatctacatatgaagcgtttgagagcagtccgatttttgaagaagatgagaattataaagccttatatcagcagctgagtaaatatggacatccaagatcaaaaacacctgtatatccacaggttagtgcatcggtacaggaagtattggaaaattcggtacttaccgataatgatgcgaagacagaactggataaatctgtagaaaggattaacgcaaaattaaagcgttatgtgatgaaataatgaagaaaagaacagaatccattatgggaatggcgttttttggaccggcacttgtgttacttacgatatttttattcctgccgatgatcctgacattgattttcagttttactgatttctttgctttaaatccgggactgacgcattttgtcggactggacaactatattcagatttttaaagatgatgtgttttcacaggcattttttaataccgtaaagtttgtgatcattattgttccgctgcagggaattggagcgcttgtgctggcacttctgattaataaagtgacgcattgtaagaagtatttcaaagtagcattctttgttccggtggtcatgtcacttgctgttgtgtcaacactgtggatccagatctacagcccggaaggaattatgaatgcaatcctttctttctttggaattgatgcacagccattcatcaacagtgccagtcaggcacttccatccatcgcgatcatgagtgcatggcagggaatgggatatcagatgatcatcttcctgggaggaatccaggcaatcaatccggcactttatgaagcggccgagatggaccatgcaacaccgtggcagaaattcaaggacattaccctgccggaattgaaaccattgtgtgtgttcgttttaattacgattacgatcggagcattccgtatgttggtacagccaatggttatgaccggaggaggaccatcgaattcaacgtatacggttgtgtatgatatatatgaaacaggtactgttaactgggaaattggactggcatctacaatggctattgtattcgcattctttgtaatgatactgaccgtgatccagacaatcgcaacaagagataaggaggatcagaatgttaacaaaaaagcaaaaaagaaataattggatactgacggtcgtacttctgatcgtatcattgttgttcctgttcccggttatctggatgctggcaaattcattcaaaccagacgcggcaatcactgctgatatgaacagtatggcggcattcattccaccggcattgaacggcaatttctttgaaaattatgtatctgtattaacaaatacaggatttgtacgatacatgtgtaataccttgttctatgcagcaatattgatcgtacttggcgtaattgtaaatggactggcaggatatgcattggctaagattaattttccattcagagaacgctggcttctgatcattatgcttctgatgatcgtaccgatggagacgatcattacgatacatttcctgatcattgcaaaacttggacttctgaatacggtgcttggatatgtacttccaatgatcgtgaatccgtttaacattttcctgttccgccaggtattcctgggacttccggatgatgtatatgaggcagcacagttagatcactgtggaccggtaaaatacttttttactatggttcttccaatgtcaaagagtgtagtggcaacggttagtgtatttacattcctgaatgtatggaatgattatctgtggccgtcacttgtatttacatccagtgatcttctgactgcacagattggtctgaatgcgattacatcaaatgataacacaacaacaggacagacccttgcagttatcacaatggtaacaattccggtcattattatctattcactcttctcaaaacagatcgtagagggtgtaatatcaacaggttccaaggagggctaaaagatgagctttatcgaatttaaaaatatatgtaaaaaatatgcaggaaacgacaagaattccgtgacagactttaacttagatatagaagaaaaagaatttatcgcatttgtcggaccatccggatgtggtaaatccacaacactccgaatgatcgcaggatttgaagagattacaagtggagacctttttattgatggaaaacgtgtgaaggaggttgcaccggcggatcgaggaatctctatggtgttccagaactatgcactgtatccacatatgacggtagaaaaaaatatttcttatggattgaagaacatgaaggttccggcagatgagatcaagaaaaaagtagactgggcaattgatatcctgggacttgaagaatatcgttaccgtaagcctaagaatttatcaggtggacaaagacagagagtggcacttggaagagcgattgtaaaagaccagaaagtctttctgatggatgagcccctttctaacctggatgcaaaactgcgtgtcagcatgagaaatgagatcagcaagttacatagaaatcttggaagtacaaccatctatgttacacatgaccaggtagaagccatgacaatggcagaccgcattgtaatcatgaaagatggcgtgatccagcaggtcggaaaaccgatggatctgtacgaacatccggtgaataaatttgtggcaggatttatcggttctccgcagatgaacttctatgatgtaaaaatagacggaagaaatctgatcttcaaagatggaaataagattgaacttccggaagcaatcgccaatcgtattgccggttattcagaagttatcatgggaatcagaggagaagatatcaagtttgatacaactaatctggatgtctatggaagtcatcagaaagcagttattgacaatacggagattatgggaaatgagaataatctgtattttgacttcggaggaagcgtaacgattgcaagagtatcaaaatatgaagtaagccaggtgggagatgaggtggaatttacctttatgccacataagatgcatttctttgataaggaaacagagcaggtgatcggagcagaataatttagaataaaagaggaagaacgtatgcttgaaaaagccaatgaatatatcaaacggaatcacatagatgaaaaagaaaaatcattattccatgtgacaccggaaacaggatggatgaatgacccgaatggtttctctgtatatcagggaaaagtacatttattctatcagttctatccatataaaacagaatggggaccgatgcactgggggcatcaagtgaccgaagatctggtaaaatgggaagcatatccggtagctatggcacctgatcaggattatgatcacattggatgtttctcgggaagtgcaatagaagctgatggaaagcatgtgctgctttatacaggagtaagccagaaagacggaaaagaaatccagaatcagtgtattgccattggagatgggaagacttatgaaaaatggcaggataatccagttataaaaggagatatcatgccggagaaatttgacagaaaagacttccgtgatccgaagatatggaaaaaggatggcagatattattgcgttgtaggcaatcgctatgaggaaaattgcgggcaaatagtcttatttagcagtgtggactataaaaactggcggtatgaaaaagtccttttgagaaatgacggaaagaatggagatatgttagagtgtccggattatctggaagtagacgggtatcctgtaatcatttgttctccgcagaatatgcacgcccaaaagtacgaatttcataacggtcataattccatttatattattggagatgcagaaaaagaaatatcggattttgcatgggagaaaaagagaagcctagattatggactggacttttatgcaccacagacaacagaacttccggatggcaggcggatcatggtcgcatggatgaagtcgtgggatgcacgtgtcatgacaaaaggacagaaatggcagggaatgatgacactcccaagagaattaaaaatcaaagatgggaaaatctggcaaagtccggtgagagaattggaaaagtataagaaaaatccaatcatctatacagaacagaaaattagcggacagatgtctttggatggtatcaatggccgggtgattgacatgacggtagaacttacgaatgtagaaggccgggagttcaaggtagatgtggcacataatgaagaatatacaacaacatttacatattatccggaaaaacatcagattgaaattgaccggacctacagtggtgtaaatgcagatgttgtctgtgtgagaaagatagaaattgcggaaaaacatcatgcgccgaaactacattttatcatggacagatattctgtggaattatttattaatgatggagagcagacggcaagtgtggtcattcctacgccattggaagcaaatgaaattatatttactagtgatgaagcggcaaccgttaatattgaaaaatatgagataacattcaattagaagagatcgtttctcattcaccgattgatgtccccgtgcatatcttaatacagatagaaccgccaaggagcaatcaggattatggagaataaattaccgttctatatggcttatccggttccgctgctgtataatgatgaccggaatgcgagaagagactatgactatatgaaaagcatttacccggatacggcgaagagagtacttccttatatggaagaggaatgtgacagaatggaatatgacggaagcatgatgtatgatgaatatccggaccgcctgcagcttcgtctgatgtgccgcaggatctatgataaggcggagaaggaagaagagaacccgggtgcctggcttatggatctgatcgaggttatgacatatcaggaactttgcaggagacgtgtggaacatagagagatacgtaaaaaaatatattgatctacaagagggcatctggaaaaaaacttccacttcgccctcttgtatgttatactatgcggtgataaatgaatgttttcagatgaaaaagtcagaacataacatacaggagggcacatcatggcagataataacattatttttatcggaatgccggcagtcgggaaaagtacagttggtgtggtaattgcaaagagactgggatacagatttgtagacacggatattctgatccaggaatcagaaggaaaacttctgaaagatattattgctgacgttggaccggatggcttcctgaaagtagaagaccgggtcaatgcacaggtgaaagcggaacgtaccgttatctcgccgggaggcagcgtagtatattgtgaaaatgcgatgaaacattataaagaaatcggaaaagtcgtatatttacaggcatcctttgagacaataaacggcagacttaaaaacgccaaaggccgtggagtggtactgcgtgacggacagacgctcaaagatctgtatgatgaaagagtaaagctttttgaaaagtatgcagatattacagtgtgtgaagataatcagaagctggaagatacgattgaatcggtattagatgcattaggggagtaaaagtgcacaagtatagatagaacaattgaaatatgttacaataaaattacataactgtaaaaaatattttacaattgagaaatttgtgctataataggcgcgaacccttttggggttatattgtgatgcagaaatttatgtacaatttgagatagttataaatattgaacaaaagatttattgtaattagagattcatataaatattaatgaggtgtaattaatggaacagtatattattaagggcggtcatccgcttgtgggagaagtggaaatcggcggtgccaagaacgcggcacttgcaattcttgcagcagcaattatgacagatgagaccgtattaatcgataacttaccagatgtgaatgacattaacgtactgatcgatgcaatcgaggggattggagcgaaggtacaccgtgtcgaccgtcatacagtaaagattaatggagccagtatcaagaacgtagatattgagtatgattatattaagaagatccgtgcttcctattatcttcttggcgcattacttggaaagtataaacgtgccgaagttgcacttccgggaggatgtaatatcggaagcagaccaatcgaccagcatctcaaaggattccgcgcgttaggtgcagatgtagatattgaacatggcaagatcgttgcagaggcagaccgtcttgtcggaaagcatatttatttcgacgtggtaagtgttggagcaacgattaacgttatgatggcagcagctatggcagaaggacttaccattctggaaaatgtcgcaaaagagccacatgttgtagatgttgcgaacttcctgaacagcatgggagccaacatcaggggagcaggtacagatgtgatcaagatccgtggtgtacagcgccttcacagaacagaatattctgtgatcccggatcagatcgaagcaggaacattcatgttcgcagcagcagcaacaaagggagatgtaacggtactgaatgttattccgaagcatctggaggctacgatcgcaaaactggtagaaatcggatgtgaagtggaagaattcgatgatgctgtacgtgtcgtatcaaaaggagatcttacaagcacacatgtgaagacccttccgtatcctggattcccgacagatatgcagccgcagatcggcgtaacactggctttatgtaaggggacaagtatcattacagagagtatttttgaaaaccgtttcaaatatctggatgagcttgcaagaatgggtgcaaatgtgaaagtagaaggtaattctgcaacgattgaaggcgtgacagaattttcgggagccagagtgagcgcaccggatcttcgtgcaggagcagcactctgtatagctggtctggcagctgacggaatcacaatcgtagacgatatcgtatatatccagagaggatatgaaagattcgaagagaagctccgtggtatcggcggaatcatcgaaaaagtagattccgaaaaagcaatccagaaattcaaattaaaagtaggctagatgatacattttcttagatatgtctattgacagtatgtgtaaaatagagtaaagtcttagtcgtaccagaaatataataaaagcaaactttctcttattcagagcagtggagatacaaaggatctatgaaactgcggcaaccccatatatggaaggtgccagcctgagcgagtgatcgaacaataagaggattggtttatgaagatatcaaaccgtccacttatgtaagtggacggtttttcagttcggtaaaacaggggaatctacaaaaaactgccggcaatcctgggagaaagaatgcaggaatgttttaagaaaaaaggagagaagaacgtggaaagaagattatttacgtcagaatcagtaacagagggacatccggataaaatgtgtgatcagatttctgatgccattctggatgcattgatggcacaggatcctatgagccgtgtcgcatgcgagacagcaactacaacaggtatggtacttgttatgggtgagatcacaacgaatgcatacgttgatatccagaagatcgtacgtgacacgatcaaagaaatcggatatacaagaggaaaattcggattcgatgcagagacttgcggtgtgatcacagcaatcgatgagcagtcgtctgatattgctatgggtgttgataaagcgctggaagcaaaagaacatacaatgtccgaagaagagatcgatgcgatcggagccggagatcagggaatgatgtttggttatgcttctgatgagacaccggaatatatgccatacccgatcgcactggcacacaagctctcaagaaagcttacagaagtaagaaagaacggaacacttccgtacttaagaccggatggaaagacacaggttacggttgaatatgatgagaatggtgttccggcacgtctggatgcagtcgtactttcgacacagcatgatccggaagtgacacaggatcagatccataaagatattaagaaatatgtattcgatgcaatcattccggagggcatggtagatgagaagacaaagttcttcatcaacccgacaggacgttttgtaatcggcggaccacacggagacagtggacttacaggacgtaagatcatcgtagatacttacggtggaatggcacgtcacggcggcggggctttctctggaaaagactgtacaaaggttgaccgttctgcagcttatgcagcacgttacgttgcaaagaacatcgttgcagcaggacttgccaagaaatgtgagatccagttatcttatgcaatcggtgttgcacatccgacatctatcatggtagatacattcggaacaggtgtgttagaagatgacaaactggtagaaatcatccgcgagaattttgatctccgcccggcaggaatcattcagatgcttgatcttagaagatcaatctacaaacagacagcggcttacggacatttcggacgtacagatattgatcttccatgggagaaactggacaaagtagaagatctgaaaaaatatttatagaaattttataaaagtttatgggtgctttggtgtgaagcacccatttttcatgctataattttttttagtggaggacagatacatgaagctgaaaacgcgattagttatagcattttttacgattatcattataccggtccttatggcagccatgatggtttcaatggtatgccactatcagatcggagtggtggagaagaattatgggattacaggaacgacgatttctgattttacgaattccatgcaggtacttgcacgtgttacggagaagccgtatcatgaactgaaggttatgtcagggcaggcatctgagatggaagatgcgacagaactggatcagtttaataaaaaactggagaataagaatgcatatctgctggtgagaaaagacggaacaatcgtatatacgggcagcgatgatgatcgtgtaaaagcggtgatcgaacaattgccgggatatggagatacagatacaacatcggagaacggaatttatcttggcggagatgcagaagcattggtaaaacaggtagatttcagatatgatgacggcaataagggaagtgcgttcattgtgtcagatgtatccaatgtaattccggaggttggacattttttctacgaaatcctgattggaattgtagtgatactgatacttacttcggcagctcttattatatggatttaccgtgcggttatggggccgatcggcaagatgcagacagcggcgcagaatatcaaggatgggaatctggattttgagttgaaaccggaggctgacgatgaacttggaaaactctgccagaacctggaagagatgagaggacgcctgaaggaaagtgccgaagaaaaattgaaatatgacaaagaaagtaaagaactgataagtaacatttcacatgatctgaagacacctgtgacaacgatcaaaggttatgccgaaggaattatagatggtgttgcagatacaccggagaagatagaccggtatgtcagaacaatctacaataaagcgacagagatgaatacgctgatcaatgagctgacattatattctaagatcgatacgaataagatcccttacaattttaatatcgtgtcggcgaatgaatatttcaacgactgtgcggatgacctgtcggttgaactggcagcacagaatgtaggatttggttattttaattatgtagagaagaatgtacggatcattgcagacccggagcaggtaaaacgtgtgattcacaatattgtcaacaattcgttgaaatatatggacaaaccaaagggaatgatcaatctgcgtgtcaaagatgtaggagattttgtacagattgaactggaagacaacggaaaaggaattgcggcaaaagacctgccgaatatctttgaccggttttaccgtaccgacgcatcaagaaattcttccaccggaggaagtggaatcggtttgtctgtagtaaagaagattgtagaagaacacggcggtaagatctgggcaacgagcagagaagagaccggaacgacaatgtattttgtactaagaaagtatcaggaggtaccagtcaatgagtaagatattaatagtagaagacgaagaagcaattgcagatctggaacgggattatctggaactgagcgggttcaccgtagaggttgcaaatgacggagatacaggacttcagaaagcactgaacgaagattatgatcttctgatcctggatctgatgctgccgggaacggacggattcgatatctgccgtcaggtgcgtgatgtgaagaatacaccgatcgtgatggtatctgcgaagaaagatgatatcgataagatcaggggactgggactcggtgcggatgattatatgacaaagccgtttagtccaagtgaactggtggcgagagtaaaagcgcatctggcaagatacgaccgtctgaccggaagtgcggcagagaagaataaagtgatcgagatcagaggactgaagattgatacaactgcaagacgtgtgtgggtgaacggagaagaacgtacatttacgacgaaggaattcgatctgctgacattccttgcgagccatccgaaccacgtatattcgaaagaagagttattccgtgagatctgggatatggagtccatcggggatatcgcaacggtaacggtgcatattaagaagatccgtgagaaagtagaagtggatacatccaacccgcagtatatcgagacgatatggggcgttggatatcggtttaaggtgtaagtaaaaatatagcaaaatattttgagatgcaaaatcctccggaggtctggtacacctccggggggtttttattcaatggaggatatgatatgataatgtaaataaataagaaacacgaggaacaatatatatgattacaagcacatccaacgccagaatcaaacgtctggtgaatttaaagaagaagagaaaattaagagacgaagaaagcgtcttcctggtagaaggaatccgcatgttcagggaagtgccgctcgacaagttaaaagaagtctatgtatccgaatccttttacaaaaaagaaaaagataccgtaaaagaagtcctgaaagactctaaagtaagagtggaagaactgacagatactgtattcgcccatgcatcagataccaagacccctcaaggaatcctgtgcgtggtggaacagatgaaccatgaaatcaacgaactgacttcggcaaaatgcccgctgatcatggtattagaccatctgcaggatccgggcaatcttggaaccatcctgcgtacagcagaaggagccggcgtgaccggcatcctcatggacagagaatgcgtcgatgtttataatccgaagacaatccgctcaacgatgggatcgatataccgcatgccgttcgtatatgtggaagatcttggcaaaggaatacaggatttaaaagacaaaggtatcaccacttatgctgcacatctggaaggaacgaattcctatgatgaggaagacctgacgaatccatgtgcattcctgatcgggaacgaggggaatggcctgagacgcgagatcgcagacatggcagactgctatgtcaagatcccgatgcttggacaggtagagtcattgaatgcggcaatcgcttcttcggtgttgatgttcgaagccgcaagacagagaaggaaagtgtaattaaatgagatacaatccactcattttacagaagaaaattgctttctttatcagagtatagtaatatagtgaacaagaaataatatatacggaaaagaggggacggcttatgagagtgatctattggctggcaatattcattgtactgttgatcattgaaattgcgacaatgggacttaccacgatctggttcgcaggaggcgcactgatcgcattctgtgcaggacttgtcggttttgggctgggagtgcagatcggagtatttgttatagtttccattctgcttctgattctgacaagaccgatcgcggtgaagttcttcaatcaggagagacagaagacgaacgcagagagtctgatcggacagcatgcactggtgacagaagatattgatacgataaaggcaaaagggcaggtagagatctgcggtcagatatggtcggctaagacggatgagccggacggaaagattccaaagaacacagttgttgtagtaaatggtattcagggcgtgaaactgatcgtgcatgccagagaggagtagagtatgatttttggattgattttattagcgattattatctgcgtggtgatttcctgtgtaaaggtagtcagacaggcgcaggcattggttattgaaagactgggggcatatcaggcaacatggggaaccggacttcactttaagattccgatttttgaccgtgtggcaagaagagtggatctgaaagagcaggtagtggattttgcaccgcagccggttatcacaaaagataacgtaacgatgagaattgataccgttgtattttatcagatcacggatccgaagatgttctgttatggtgtggcgaatccgatcatggcgatcgagaacctgacagcgacaacacttcgtaacatcatcggtgatctggagttggatcagacactgacatccagagagacgatcaacacgaagatgagagcatctctggatgtggcaaccgatccttggggaatcaaggtaaaccgcgtggaacttaagaacattatcccaccggcagcaatccaggatgcaatggagaagcagatgaaggcagaacgtgaacgccgtgaagcaatcttacgtgcagaaggtgagaagaaatctacaatccttgtggcagaaggccacaaagagtctgcaattctggatgcggaagctgagaagcaggcggctatcctgaaagcagaagcacagaaagaagccacgatccgtgaggctgaaggtaaggcagaagctatcatgaaagtacagcaggcaaatgccgatggaattcgtttcctgaaagaagcaggagccgatgaggctgttcttaccatgaaaagtctggaagcatttgcaaaagctgctgatggaaaagcaacgaagatcatcatcccgtcagagatccagagcattgcaggtctggtaaaatctgttacagagattggcgcagatgataaaaaagaagaaaagtagacaaaagacataagataaaagtcaaagaataaaaacgaggtacaaaacaatggatttaaaaggcagaaatttcctgacactgaaagatttcacaccggaagagatcacatatctgcttgatctttccgcagaattaaaagaaaaaaagaaaaaaggaattccggttgataaatacagaggaatgaatgtggcattgatctttgaaaagaccagtaccagaacccgctgttctttcgaagtagctgctcacgatatgggtatgggaacgacttaccttgatccttcaggttcacagatcgggaagaaagaaagtatcgaagatacagcaagagttctcggaagaatgtttgatggaatcgagtatcgtggatttggacaggagattgtggaggaactggccaaatatgcaggcgttccggtatggaacggactgacgaatgagtatcatccgacacagatgctggcggatatgctgacgatccgtgaacatttcggacatctgaaaggtatcaaactggtatacatgggtgatgcaagatacaatatgggcaattccctgatgatcgcatgtgccaaattaggtatgcatttcgtggcatgtacgtctaagaactattttccgaatgaggaactggtagagacttgcaaaggatatgcaaaagagacaggagcaaccatcacactgacagaagatatcgaaagcggaaccaaagatgcagacgttatctgtacggatgtatgggtatccatgggtgagccggacgaagtatgggaagaacgtatccgtgaactgtccccatacaaggtgacaaagaaagtaatggaaaatgcaggagaacaggctatcttcttacactgcctgccggcattccatgatctgaagacgaagatcggcaaacagattcatgacaaattcggcctggacgatatggaagttacagatgaagtattcgagtctccgcagtcaaaggtatttgacgaggctgagaaccgtatgcatacgatcaaggctgtcatggtggcaacacttggtgaaagagagtaggcaagagcagacagagtatgaaatcagaaatattacgtttgttaaaagagaatgatacatatatttccggacaacagctgtgcgaacagttccaggtgtccagaacagccatctggaaagtgattgatcagcttaagaaggaaggctatcagatagaggcggtgcgtaacaaaggctaccgccttatcgaaagtccggatgttatgtcaaaagcagagatcgacagtctggtagatacaaagtgggcaggaaagaacgtcatatattatgatgagactgattccacaaataaccgggcaaaggaagccggaaataataaggaacctcatgggacattatttgttgcagatatgcagatggcagggaaagggcgaaggggccgcgtctggaaatcgccatccgggagcagtatctatatgacgatattgttgtatccggatattccgcctgtaaaagcgccacagcttacactgatcatggcgattgccgtggcagaaggaatccgggaggttaccggtcttgagacaaagattaagtggccgaatgatatcgttgtgaatggaaagaaaatctgtggtatcctaacagagatgagtacagagatcgattacatcaatcatgtagtgatcggagtgggaattaatgtgaatcaggatacgttccctgatgatattaaggaaactgcctcatcacttaagatggaactcggaaagcgcataaagcgttccgggctgatcgcagcagtaatgaaaatctttgaaaaatattatgagatctttcaggagacagaagatctgtcaggattgcaggaactttataattccatgttggtgaataaggaccgggaggtcaaggtcctggaaccggggaatgaatataaagcatatgctatcggcatcaatcagaccggagaactgattgtaagaacgccggatggaaaagagaaagaaatctatgccggagaggtatcagttagaggagtatatggatatgtatgatggaaaagtagtgctttgcggtgctaattcatatgaagaaaagtattatctgaatccggattttgaacagcttccggatgatgtgaagaatgaactgaagattatgtgcgtattgtatgtgcatgacgtagggggaatccttacgctggtgtttgaagaagacggagaattatgctttgaggtatcgaccgaggaattcgatccgatgttcgatgagatcggaagccagcttaagatcaagcagctgcagagagagaaacaggatcttctgcaggcattgcagttatattataaagtattcttcctgggcgaagagataaacagcgaagagtaaccagaaggcagcagacaaaacaggaggagaaagatgcttcttgtaatcgatgtaggaaacaccaatattacacttggtgtgtttgataaagaagaattatttggtacattccgtatgaagacaaagcagccgagaacatcggatgaatatggaattactttacaggaactcgtagaaagacatgggattgaaagttccaagatcaatgcagtgatcattgcatccgtagtaccagatgtgatgcattcactcggcagtgcgatcatcaaatacttcggcgtaaagccggtggtcgtatctgctggaattaagaccggaatccgcattgtcacagagaatccgagacaggtcggtccggaccgcattgtagatgcagtcggtgcgtatactttatacggaggtccaacaattgttgtggattttggaacagcaacaacatttgacgtgatcggtccggacggaacatttgaagcaggtgtgatcgcaccgggaatcaggacttcggcacagtctctctggggagaggcagacatgcttccggcaatagaaatccgcaaaccgaaatcaattcttgcaaaagagacaattacggcaatgcaggccggtcttgtatacggacaaatcggtcagacggaatatattatcagacgaatgaaagaagaatccggatatccgaatgcgaaagtagtggcaaccggcggacttggcaagataattgcaaatgagaccgatatgatcgatgtgtacgattcacagcttacgttaaagggacttcggttcatttacgaaaaaaataaaaaaaataaataatctgcagtgttgacagtgtagacttgcaaagaaatatgcagcactatatatcaagaaagcttcgtttatgaatgttaggggctgtcttatctgatatatagtgctgtgtgtttcttgaaaaaattacaggtaattgtaatctgagtgtgataacaggagtagaaaaatgaaaatcgggaatgttaatctggcaaatccatatatactcgcaccgatggcgggagtaacggatctgcctttcagacttttatgtaaagaacagggagcagggcttctctgcatggaaatgatcagtgcaaaagctttgcaatataagaataaaaatacaaaagcattactggcgatccatccggatgagtatccggtgtcattgcagctttttggatcggatccgaagattatgagcgagatggcaaagatgatagaagaactgccatttcagattttggatattaatatgggatgcccggtgccaaaagtagtgcggaatggagagggatccgcacttatgaagaacccagagctggtacatgagattgtatcggcagtatcaaaggcaattaaaaagccggtaacggtgaaaataagaaaagggttcgacgatgataatatcaatgctgtggagatcgcaaagattatcgaagatgcaggaggtgcagcggtcgcagtacacggacggacaagagaacaatactattccggaaaagcagactgggatatcatccgtcaggtcaaggaggctgtatccattccggtgattggaaacggtgatgtgatttccggagagatggcacttcagatgagaagagaaacaggatgtgatggtgtgatgatcggaagaggtgcacaggggaatccatggatattccacgaactccaggaatacgaaaggaccggtgttgttccgccgagaccgactccggagaagatcaaagagacgatgctaagacatgcaaaactgcagattgaattcaaaggagacttcatcggaatcagggagatgcgtaagcatgtcgcctggtatacaaaaggaatgaaaggttctgcaaaactcagggatgcgatcaatcaggtggaatcttatgaggaactggaagtacttctggacaaagcaatcgtataatgtacaaaaatgctgaaaataaaggaaaaacgggtacttgcagctgataaaaagattgacataaaacatgcatttatgtataataatgaaattgtgaaagtatcattattctatgacagattaattattcagatagatgattcaggcataaaaatgtcagagtaatatggaacagaaaaaggagcaggagacagatggaagcaaagaaaaaattacttacttatgctggtttaaaagcactggaagatgaacttgagaacctcaaggttgtaaaacgtagagagattgcccagaagatcaaagaagcaagagaacagggagacttatcagagaatgcagagtacgatgcagcaaaagatgaacagagagacattgaagcacgtatcgaagaactggaagcaattcttaagaatgcagaagttgtagtagaagacgaggtcgattttgataagatcaatatcggatgtacggtaaaagtattcgacatcacatttgatgaagagatggaattcaaactggttggttctacagaagcgaacagtctggaaggaaagatttccaatgaatcaccggttggccaggcattgatgggaaaacagatcggagatgtcgtaactgtagagacacaggctggagtaatggagtacaaggtactggacatcagccgttcattataagagacaggcagatacccgtcgaagaataacaaggacacaagactcaggcctctctcacacgggaggtctgaattcagataaggaaggagaataaaaaagtggctaagcagcagaacaatggacaggaacaggacgtgaaccagttaagaaaggttcgacgtgagaaattagcagaccttcagcagaatggaaaagatccatttcagattacaaaattcaatcagacacatcactcattggaagtgaagagtctgtatgaagcacatgaagcagaacttttaaaagaccaccagacaccagacgtagagggaatgaatgaagagcaggcgaaagaggttctgaagaaagattatgaagagagaagaagtatcatggatgccaatccgattcatgtatctatcgcaggacgtatgatgttcaagagagttatgggtaaggcttctttctgcaacattcaggatctgcagggaagtatccaggtatatgttgcaagagatgcgatcggaacagactcttacacagattttaaacgttctgatattggtgacattttcggattagaaggatttgcgttcagaacaagaacaggagagatttctatccatgcagagaagatgacacttctttctaagagtttacagatccttccggagaagttccatggattaacagataccgatacacgttaccgtcagagatatgtagatctgatcatgaatccagagtcaaaagagacatttatcaaacgttctaagatcatcaaagagatccgtaacttcttagatggacgtggatttatggaagtagagactccgatgctggtaagcaatgcaggtggagcggcagcaagaccattcgagacacattacaatgcgctgaatgaggatgtgaaactccgtatttctctggaattgtacctgaagagactgatcgtcggaggacttgagagagtatatgagatcggacgagtattccgtaatgaaggtgtagatacacgtcacaatccggaattcacactgatggaattatatcaggcatatacagactatgagggaatgatggaactgactgagagtatgttccgttacctcgcagaaaaagtgtgcggaagcgcagttatcagctacaacggaacagttattgatatggcaaaaccattcgaaagaatttctatgatcgatgctgttaagaagtatgcaggtgttgattttgcagaagttaagacagacgaagaagctaaagcattagcagatgagcatcatgtagaatatgaagaacgtcacaagaagggtgacatcctgaacctcttctttgatgagttctgtgaagagaagatgattcagccaacatttgtaacagatcatccaatcgagatttcaccactgacaaagaagaatccggaagatccgaattatgtagagcgttttgagttgtatgtatacggacgtgagatgtgtaatgcatactcagagttaaatgatccgattgatcagagagaacgttttgcagcacaggaagaagcatttgcagccggtgatgaagaggcaaaccacacagatgaagatttcctgaatgcactggaaatcggtatgccgccaacaggtggaatcggatacggaatcgacagactggtaatgctgctgacagatgctcaggctattcgtgatgtgttattattcccgacaatgaagagcatgggagccgcaaagaatgaagctaataatgctgcacagtctgcgccggttgaaaaaacagtggaaaaagcaatcgctgaagtgaaagaaacatatgatttctctaatgtagaagtggaaccattattcaaagatatggttgattttgacacattcagcaagtcagatttccgtgctgtaaaggtaaaagaatgtgaagcagttccaaaatctaagaagcttctgaagttcgtattagacgacggaagtggcgtagatcgtgtgattttaagcggaattcacgattactatgagcctgaattcttagtaggaaagacattacttgcaattacaaaccttccaccacgtaagatgatgggaattgattcttgcggtatgattatctccgctacacatcttgtagaaggaa

SEQ ID NO: 2789 - DNA, 4850 bp, Unknown
  gut microbiota DNA sequence
actttacaacatcgcaatgacatttatagtgcgttttatgaatcagatggatgtggatggaatgaatgttacggcacgctcatatgctgtacagattgcaaatttctcgtattgtgtgggagctgcccttgctcaggcaaatgcaattatgacaggctggagaattggagcaaaagagtttgaggaatgtaacagggggacgagaaaagctgcgatatacggtatcatcacagcgacatgcttttctgtaacatttgcattggccgggcattttatagtgcatatatttaccgatgatatacagatgacaaatcttgtggtaaagttgttaatagtagatatatttcttgaatttggaagggtaacaaaccttgtatatggtcaggcattaaaaacgagtggagatgcagtttttccggttatgttaggtgcggtatttatgtatttatttgcagttggcggaacatattttctcggaatacacatgggacttctggctgtgggagcatatattgctatggcaggtgacgaatgtgcgagagctgtgggaatggtacttagatggaagagtggaaaatggaagagtaaaagtcttgtggaattatcggatgtgtcgtaaatcctctgttttagctgtagggaatattaaaggagagattatgtactttgaattaaaggaaaataaaccacacggtacaaaggatgatccgtttagtatatatcatataaaaaacgggggacgatcatttcagataccggtacattggcatgatgaactggaaattatatatgtaaaaagtggttttctgactgtaagtatatcaggagaaaattatattggaacccccggggatgcttttgtagtgtcgccgggtaatctgcatttcatgggttcacagattggtacagtagattattttactttcctttttccggtagaatacatatctttttgcataaatgatatgttagatgataaattactgaagccgttaaaaaatggtcatctgatgataggcccaagagtaaaagatacagcaaaagaactgtgtgagcagttggttgagacatatatggcaaaaaataagaaaattgagtctgaaataactgctcagataaagacaaaaagaattcttttacaatttattcttgaaatgtgggagaagggcttagtaatcgaaaatgataaaagcgggagaaatactgtagaaaaagaaatgatttcatatatacagcagaattttaaagaaaagatatcgttgaaagaatttggtgagcagtttcatctttcggaaaaatatatatcgcgatattttaaggaacattttcatattacactttcacaatatataacacatttacgattagagtatgcaaaacagctgttacaagatacggatactcctgttacagagattgcaatgcagagtggatatcagaatgtaagctattttatcagaatcttcaaaaaaacatatggagtttctccgttaaaatataaaaaaataagccaggtacatggttggaatagggtttgaaaaagtataaaagatgctataaaaaaggggtcagggaacaatcgaaagagagtttcctggccctttttgtataaaaataaccagataaatattatggcacaggtacttcccctgtagatttccgttcaattagctgcgcatgcaataaaaatgtgctgattggaatgttgttaagtaggcttgatagtgcaaagaacccgctttttccgagttcaagccgatcttgtctgattgtagtcaatggaggagatgtatatgctgcaatcggaatatcatcaaatccaataatactgatatcttcaggaatcctgtagcctagttgctgacactggataagggctgcattggcaagagtgtcttgattacagatgatagcagtcattcctttttccagaaaccgaggcaggtgcttttccatgcattcagacaaataataagagcagccagtagaatcagaagaggttttcagtccatgctggtgcatggcacggagaaaggcttcatgtcgtatctgaagaatttgagagccaagagaactgctgagataggcaatcttacgatgaccaagtccggcaagataagagacagcaagttccattccctcattattatcaatacctacataagcagtagaaggattcccaataatatagttatcgaaaagtacggcaggtgtatggctggttttaaagtcacggatccatggatcattcagagaaaagccaagtgcaaatgcgcccacataatcatgttccaacataaaaacatcataatgttggttgcgttgcatctgaacatcaacaggtacaatttcaacatcaaaacaggccggttcagccatctggcgaaaaccgatcagaatgtcataggcaaaatgatggggttcttcatacatgatattctctttttctattataatgcagattttctttacaggctttttataacgccgcagtttagtataaccaagtgctacagcagtttccaaaacctgtttccgtaaagtttcgctgatatcaggtgcatcgttgagagctttggatacagtactcttagaaatccccattttatcagcaatatcttggattgtagtcataatttgcaaacctttcatagagtagaaaataattcttcttttattatatacaatagcatgataaaaatcaatgaactataggaaaaaataaatgtttagttaagttttgtaaaagaaaaaacaagaaataatgcacaaaaataaatacaataaattatgcaaaactaacgaaaaaataacgattgaatggaaaatgattgacgaaaaaacaataaagacgtatattgggtttaacgaaacaatacgaaaaaaatggatgaaaggaagaaatatgatgaaaagaggactggcagcatttctaacaggaattatgactgtaaccctgatggcagcagggcttaccggatgcggaagcaatacggcagataaagagactgaaaaagttagactgatggtatggtctccatcggaagaccagtcgaaagacagcggtgaatggctccagacaatgtgcaataattttgcaaaagagcacccggagtggaacattacatttgtctatggagtagctgatgaagcaagtgcagcagatcaggtggcacaggacccggaagcaagcgcagatgtatttatgtatgcaaatgacaggattacatcgcttacagatgcggatgcagtagcaaaattgggtggaaaatataaagaagagattgaatcaaccaactccgaggaacttttagattcgctaaaggttgatggagagctttacggggttccgtttacaaccaatacctggtatatgttttatgataagtcagtgttttcagaagaagatgtgaaaaatctggatacgatgctgcaaaaaggaacagtatccttcccatttactaattcatggtatcttccggcattctatctgggaaatggatgcaccttgtttggagatggaacagacgagtcaaaaggagttgattttgcaggagaaaaagcagtggatgcaactaattatgcaattgatctagcatcaaatcccaattttataattgatgcagacggatctgctcttgcaggacttcgtgatggcagtgtaaaggcaatgtttaccggatcgtgggatgcaaatgcgattaaagaagcacttggagataacgtgggagttacatctcttccaacttatacaattaacggagaggaaaagcagatgcttgcatacgctggttcaaaggcaatcggagttaatgcgcatagtgaatatatggaacaggcagttgcgcttgccgtttatctgggtggaagtgatgcacagagagcacactacaagatgagaaccgtgattccatgtaatacagaacttttgaaagaaaaagatattgcatccgatccgcttgttcaggcacagaatgatacctttaacaatacatcgatacttcagccgttcgtggcatccatgacgaattgctggacaccggtcgagaatatgggaaaaggaattcgtaacaagagtgtgacacatgaaaatgctgaagaacagacagaagcaatgaatgaagcaatgaacagcaatggaatcaattaagaggtgagtggaatgagtatatttaagaaaaaaatcaatgaatttccaacgccatatacctgcaaaaatgcagtaaaaaagggtggattagagactaagctttccatggccctgatgggatttggaaatatcgtacatggtcagattatcaaaggtcttttgtatctggcaattgaaattgcctacatcgtctttatggcggtaaatggaatcggatttatcggcggtcttcggacacttggaactgtaaagcagcaagaggtgtgggatgaagcaaagcaaatttatctttacacgaaaggggatcagtcggttctgattctactttatggggtgacgacaatcctgctgacgattcttatgattttggtatggagaggagccctgaaaagtgcatataaagcagagtgtcttcagaaaaaaggaatgcatgtgaatacatttgcagaagatttaaagtctcttctgcatgagaatctgtatcgtttgtttatgacaccaccgacagcattcatctttgtatttactgtacttccgttggtattcatgatctgtatggcgtttactaattacagccgtattggaaatcatctgatgctgtttgactgggtggggcttgataacttcaagacattatttgattcgggaagtattctgggaagtactttctggtcggttcttggatggacgattgtctggg

SEQ ID NO: 2790 - DNA, 2808 bp, Unknown
  gut microbiota DNA sequence
tctttctttccaaatcttgcatatgccccaagcggaatctccaacccggagattcttacaggtgcttcatccaatcttaccgtctccgaagcattttcaagcatatggattccgcatgctgtcagtgccttcttatatccttcataagactgttcatacttatccggcagttctttcagcttctgttcatgattaccattcgcacagtagaccgggcagattgccggaagtttttccagaaagcgtaccgtcctgtcataggaattgccatcctttctgaccaacatatcccctccgatcaggatcagatccggatgttggtttttgatgctttccagtaagcgctcattttcttttccgtacatccggttgtgcagatcactcagaaatacaatcttctttgtccccctgattccatttaacttcggcgaacaaatccggtacttcgtcaggcggaaatcccgcagttctcttgccgtttctatcatacagtataaaatgaaaaccgccataattatcagaattatttttatcaattttaatttctcctttacatattgatttattatataattctttctgttcattttcaattaattgtgctaaaattcattcttgtaggttattcaattcattataaggaggtttttgttatgaatataccagaacgaatctccgctcttcgcacattaatggaagaacgaggatatgatgtctacatggttcctaccgatgattttcatcagagtgaatatgtcggcgatcattttaaagtaagagaatatatcacaggatttacaggttctgccggaactgctgtcttcacaaaggatgaagcaggcctctggactgacggaagatattttcttcaggctgaccagcagttagccggaacaggcgtaaagctctataagatgggcgagcctggcgttcctacagtagaagaatttattgcttctgcattaccggaaggtggtacactcggattcgacggacgtgtcgttgccatcgaagagggagctgcactggaagaagccgttgcttctaaagatgccaagatcaactattccgaagatcttgtcggagaagtatgggcagaccgtcctgcgctttctgaaaagccggctttcgcactcggcgaagaatacacaggtgaaagtacagagagcaaacttgcacgtgtccgtgaggctatgaaaaaggcaggtgccgatgtacatgttatcgctgcacttgacgatgtatgctggatcacgaatttacgtggagatgatgtagatttcttcccattattactttcttatgcagtcatcacaatggacgaaatgaagctttacatcgatgaacgcaaattaaatgacgatatgaaagctgatcttgcaaagaacaacatcaccatccatccgtataatgcaatctatgaggacatcaagaacttagacaccgcatctactgttctggtagacccgaaccgtctgaactatgcattgttcaacaacattcctggcggcacaaaggttgttcagcaggtgaacccgacgattgcaatgaaggcaaagaaaaatgatgtcgagatcagaaacatcatcaacgctcataaaaaagatgccgtagccatgacaaaatggatgtactggctgaagacaaatgtcggcaagatcgagatcacagagctcagtgctgctgccaaactggaaacattgcgtaaagaacaggaaggttacttatggcagagctttgaaccaatctgcgcttccgctgagcatgctgcgatcgttcactatgaaccgactccggagaccgatgttcctctgacacagaacggattattcctgaccgatacaggcggaggatacttagaaggttctaccgatatcagccgtacttttgcatttggtgaactcacacagcagatgaaagaagatttcacaactgtattacagtgtaacttcaatcttgcacatgccgtgttccttgaaggaactaccggatacaacctggatgttctggccagaatgccggcatggagacgtggcatcaactttaaccacggtaccggacatgatgtcggatatctgatgaacatccacgaagcttcctgcggattccgctgcgcaatccgtgaaaaagagcaggctcctctgatggacggacttgtcatcacagacgaacctggtatctatatcgaaggcagccacggagtccgtacagagaacgaacttctggtaagaaaaggtcctaagaatgaatatggacagttcctgtactttgaacctatcacatacgtaccgatcgatctggatgcgattattcctgaaatgttaaccgatcaggagcgcgagcagttaaatgagtatcataagaaagtttatgagattgttgctccgcatcttagtgatgaggaacgtgagtggttgaaggaatatacccgggctatttaaatttagttgggatttaatttagaaggcatgactacccggacctgcataaaaagtaggaagccgttcctgttcaggttccgtcggtgggaaatactaaagcgtcaaaattatgctaaaaacgggcttccgaaatttgcaactcgccattcggctcaaacaggcaaatttcgaaaacccaacgcataattttgacgcttaactatttccaacaccttcttcacattcactggaacggctttctactttttattccgtgggtgtcaaatgccttaccaattaaatggcaattgcgtagcggttgtgacagcggaaggttacagtaatcagctgtcattagcggattttcaaggcttttgacaagattgtg

SEQ ID NO: 2791 - DNA, 179 bp, Unknown
  gut microbiota DNA sequence
cggttgtgacagcggaaggttacagtaatcagctgtcattagcggattttcaaggcttttgacaagattgtgtaccgtagtggactacaccaggttatagttccgggtatttcatttcttaacatccgcagccagtcacgacttgaagaaaacagtataaagtggttctggtgaatgtg

SEQ ID NO: 2792 - DNA, 79292 bp, Unknown
  gut microbiota DNA sequence
gcctgtggagatagtaggttacgaggtctgcgaagcaggaagcccattggctttagacaatgggtagttcactattgcagaaaaccattttaaagtcatcttgtcgaatgaactgatcctggattatgcagacggaagattccggatgcattttataagtcaggacaagatttctgtatctgcaggacgaagcatgcgttacgtggaagtggatgaagtgaaggatctgaagattctggctgacagatcatcggtagaagtatttgtgaatgatggagagtatgtattttcgacaagatattatccggaaaatcataaattactggcagaagctgtggaagcacagattagattgtcagaaattatgtaacgaaatatgaatttaagatacgaatcattatagaaagaaaatcaccatatatcaaaaggaaaaatttcagtagagaaattttatcgggatatatggtgatttttcttaatgcaagagatataaatatttttcgaagttaactccttcatttacagggacctgttcttttacggaatcagctaatgctttttcgagaaaagatccggcagtctgcatcatttctgtaagggaagttccgcgggcaagtccacctgtgatacaggaggcaaagagatcgccggtaccggaatagcttccatcgcagcagggaaatgccgacagaaaatgcgaagagccgtctaacaggagattcccaatcttagggattccatcatctgtagtaaagcgaattcctgtgataaggatctttttcgcacgttctgctgttaataatgtatggcttgcatctttgaggcatgaaatgagctgatgcagggacaaagaggagttctgcagggtattgtaatccatatctgtcagcagacagaactctgtaatatttggagtgataacatctgcacgtgcggtcagttccttcatggcggacaggaattcggaagtatacatatcataggtcatgccgtcatcacccattacaggatcaaccagaagaaaagtatctggtgtctggaacgtatccagaaaatgaaaaatctcttcaatctgaggtacactggcaatgtaaccggtgtagattccagaaaagcaagtgccgagtttcttccattcctgacggaaataatccatcttatcggtaaaatcatagcagtagtagcttggatattctgtttgagaacttaagatggctgtcgggagcggacaggtctgaatgcccatcgcagataatacagagatggcggcagtcagggagcatcgtccaagaccggacagatcattgattacagcaactttttttgtcattgtcataaagaaatcctcgtttcctaatatatttacaaacatgtattgattatatcatagttgggtttttttgccttaacaaaagaagaaagaaatcttccgggtaaaaaataataaaaaagtttgaaaaagttgttgacagatggaatacattgcgctatacttaatttcgttgctgaggtacaaaaactccagaaacaataaaatgaatatgtgcgcgtagctcagctggatagagcgtctggctacggaccagaaggtcgggagttcgaatcttctcgcgcacgtaggagaaacccttgtttgatataaagtcaaacgagggttttttgctgtcacatgtccggtgagtcatattttttatacatggtttcgtacacggtagaccgggcagtattgacacagattgggcaactgtggtaaggttacaaggtaaattaaatcatgattgtgtgaggtgtcagtcaggatatcaaggataatttacgggaattattttatagaaagaatgatctgactggtgaaaagggaaacaggtgagaatcctgtacgaactcgtcaccgtattttgcgagcggaagctgcatacccactgggatgaccgggaagggagctgaagcgccagagcaataagccgggagacctgcctttcgcagtacaggaacgtaaaagttcaggccacgaggaattggcagtacgaaataagtcacagaactgtatgtgatatgtagatattatgtaatacagttttattttcgttgtcttcgtttcctggcggaggctttttttgatattatgtgtccggaaggaaccgccggtggcagagatcttgtatctcatgtattgacaatcaaaaaacaggaggtagaaagaaatgaaaaagaaactggtagtagtattattatcagcagctatgtgtgtagcggcatttggcggatgtggagcaaaatcagacagctccgacagcagcagtaacaagaagacagagacttcttcaaaaaaggaagatcagaaagcagcggatgcagttgcaaaaaagattgatgcgatctacgttcaggaaagaacagacaagacggatgaacagtgtaaagcagcaaaagaagcgtgggataaattgacagatgcgcagaaagaactggtagaaggagacaatgcagatccggattacttcggaagagatacaggagatgcttcccaggatgacccgttaaatggagatgatatcggagaaaaggaacttctggtagtaagtttcggtacttcttttaatgcgagccgcgcagctgatatcggtggagtagagaaagcacttcaggcagcaaatccggactggtctgtaagaagagcatttacagctcagatcatcattaaccatgtacaggcgagagatggcgagaagattgataatgtggatcaggctttagatcgtgccgtaaaaaatggtgtcaaggaactggttatacagccaacacacttaatgcatggtgcagaatataaagagttgacagaagcagtggagagttacaaagataaatttgaatctgtcaggatcgcagagccgcttctcggagaagtcggatcagatgcaacagtgatcaatgcagataaagctgcagtagcagaagcaattacagcagaagctgttaagacagcagaatatgacagccttgatgcagccgcagcagacagtacagcatttgtattcatgggacacggaacatcagatgaagcaaagatcagctattctcagatgcagacacagatggaaacactgggatataagaatgtatttatcggaacagtagaaggagaaccggaggaaacttcgtgtgaatctgttatcgcaaaagtaaaagatgccggatataagaatgtcattcttcgtccactgatggttgtggcaggtgatcatgcgaacaatgacatggccggagatgatgatgattcatggctgagccagttcgaggcatctaagaactttgacagtgtgaagacacagatcgcaggtcttggagaaatcgatgcaatccagcagttatatgcagctcatacaaaagcagccatggatgcacagtaaaaaaatattaaagggagagaacaatgttaagaaaaagactgatgacgcttgcattagcggtagtgatgaccgtgtctgtatttacaggatgcggcagtaaagatgacagtaagacatctaggtcagagagcaaaaagacagaacagcagaagtctgatgcgaaaaaagagaaagcagcagaaaaggaagagacaaaagctccgattgaagatggaacctatacagcagagtttaaaacggacagttccatgtttcatgtaaatgatgcatatgatgataaggggacattgacggtaaaagacggaaagatgacgattcatatcagtcttgtatcaaaaaatattgtaaatctgtttcctggtacaataaaagatgccaagaaaaaaggagcgaaacttttacagccaacgacggataccataacagatgaaaatggcaatgctgtaataggtatagatggtaagccgaaagaagtctatggtttcgatgttccggtgccggcactggacgaagaatttgatctggcactgatcggaacaaaaggaaagtggtacaatcataaagtaagtgtttccaatcctgtaaaagctgaataaatatcaattgatcataaaatctcttgtctttcatattattgtataaagtatagatgtgaaggataagagattttttattcatttgaaatagtgaaaatgcataaaaaatataatatttactagacttttatgttaaaatatactaatattaaatcaacagcaaaatgtaataaaaacaggaaggaaacaagcgaatgaaaggaaatgtaatagtaggacaatctgggggaccaactgcagcgatcaacgcgagtcttgccggtgtataccggacagcaaaagaccgtggagcgaataaagtgtacggaatgcttcatggaattcagggattattaaaggaaaaatatattgatctgtcagatcacatcaagacagagctggatgcagagttattaaagagaacaccggctgcatttttaggttcctgccggtataaacttccggagatacatgagaaccgggaagtttatgataagatttttgaaattctggataaactggatattgaagcatttatttatatcggcggaaatgattctatggatacgattaaaaagttatcggattatgcaattgtgtttggacattccatccggttcataggatgtccgaagacaattgataatgatcttgcgttgacagatcatacaccgggatacggaagtgcggcaaaatatatcggaacatcaatgaaagagattatccgtgacagcttctgcctggaatatgaaaagggcgtagtatctattgtagagatcatgggaagaaatgcaggatggctgacaggttccacagcactgtcacagggagaggattgtgaaggtccggatcttatttatctgccggagctgccgtttgatcttcagttattcggggaaaaaatcaggcagttattacaggaaaagacatccatcgtagttgcggtatcagaaggaatccgtacagcagatggtacatatgtatgtgaacttggcaacagtattgattttgtggatgcattcggacacaaacagctatcaggaactgcatcttatctggcgagttatattgcaggtgagatcggatgtaagacacgtgcgattgaattaagtacattgcagagagctgcatcgcatgcggcttcaagagtagatattctggaggcatatcaggttggaggagctgcagtaaaagcagcagacgaaggagataccggaaagatggttgtcttaaaacgtctgtccgatgatccgtatcagtgtggaacggaagtgaaagatgtacataagattgccaatgatgagaagctggttccaagaagctgggtaaacaaagaaggcacttatgtaacaaatgagtttatttcatatgtacgtccgttgatccagggagatgtatcaccggttatggtagatggaattccaagacatctgtatacaccgaaagaactcagccacagataatccatttaaaatcagagagaagataaaagaacgtcttgtcatgaggatatctcatgtcaggacgtttttttatcgggacgtctgatcttctgcgataaaaaagtgcatgaaaagtaaaaaaagtcttgaaattttgaaaataatcaggtagtatatgcttaatctatattttcaagatagattcggttaatcaatctataaagattctataacctgtgtgagggttcaaaaaattaccatttgtaaaaaactgaagaatagaattgaggtggaatgcattgcagcaaaaggaaagctatgatgtactgcgtctgatcgaacatggacagatctgttatatcagttctgaaaatgtacagggaagaacacttgccagatatttgaagtatcatccggtaatggagaagaaggaaatgttcctgttgttaaaggcaattgcagaacagctggaactgatccacagatgcagagggaatccatgctatcagtatgtgaatccatacagtattattctggcggaggacggcagggtctattttctggatatgaaagccgagacaaacatgaaacaggtagtatttatgcaaaggagggacatgcgggaatattttctccctccggaagagaattattatcaaaatgccagtaaagagctggacatatatggattgggaaagacatttcaatatattctcgcttcgtcagaaacagaaccgcatctgaaccggtgggaagaacacagacttcagagtatcatttcaaaaacaatgggaacaaaagggtcttattatcaaagcgtttcagaaattcaaaaacaaatcccaaaatggaaagaaaaagttaataaagaaagttcgggagacaaaggaaaacgcaggtggaagatatatatcgcattatttttcgcagtggtggcggcagggtacatgttgatacagcaaagaaaaaatgtacctgacggaatcataaaggaacaacagaaagcaaccagtaatgccaatacagaattacgcacagacagtcaggagaatgagaaacgggacgaagaatatctggaactggcacttgcgtatttcttaaatgtcgggaatgtggagaaaagccgtatttgtctgaatgaactgaccaataaagaacttgcggagaatctgaaaatgttgatcggtgcatatgaaaaacaggaatgtccggaagatgtaagaaaatataaagagagtcttgcatatctggaaaaggtatggaaaaaaaggagcaagatatccgaggagaagcaaaaacaggaaatccagtgcctgatcagaggatatggacttctggatgacgaggacagtgtagaaaaggtattagaactggtaaagagggggatgcagacggattatctgaatgatccggtaaaaaaagaaatgttagaataccaggcggccgcctgtgaaaaaaagaagacggaggaggaagcggcaaagatatatacagagctattggagatggagcaggaggacggaaacagagaaatgttgtataaaaaaattgcacaattatatgaagcagcaggcaggtgcgatatggcaatggatatctgtattcagggaatcggagaattgaaggaatctcaggagttaaaactgatgcatatccgattcatgtgtgcagatccgtccgtcagcagggaagaatgttccatgaagatcaaagagtatgtaagagatgacggacaactgccggatcaggaggaatttaaaaagctgcagaaagaatatgcgatcaagatggaaggagaagaggtatgggtaggaagataaaaaaagcaatcacggttgtaatagcaggaatgatcataggctcacagtttgcagatatgtcagcagttggaagcattgtacaggcagaggctggagatcacagagaagcagaaaaagaaacagatccggaagaagacaaagatgagaataaaaatccggaagaagacaaggatccggaagaagacaagaatccggaagaagacaaggatgagaataaggatccggataaagactctgaaaaagaggataaagatccggaagaagactctgaaaaagaagcgataaaaccttatcagattgtatataacgaaccagatggggaaaacggatactatattcatcgtccggatggaagaattacgcatatgagcaaaagagggacaacaagatatctcttcaaaaatggaaataatgaacagcaggaaggaatattggacagacaaaatgaaagcttcctgttgaaacaattgaattttacagacggtggaaatgaattgaggatatggatggaagatgaaaaaggacaccgggtagaaaattcagaaagtcaaaaagaattctggctggatagcagtaaacctgtagtacattatgaaataacaggaggttcggagatatggcacaaagatattgcggaagtccgggtagaatcttccgatgggctaaatggaagtcagattgcggaaattatctgtaaaacaggagaaaaagtaattggaaaaagcaataaagaaacagaaatatttcgaatggaagaagaatcgaagaatggtgaaggaattcctgtaacttttattgtaaaagatgttgcaggaaataagacgatagtgacagataaggtctatattgacaggaatgttccggaggcagttatacaaggagtgcaggattatatgatcaccagtaaaccggttaaagtgaactatctggcagaagaggaaaatatatttcaggttgtgcaggcacatatttcgaaggaagatatcaccggaagaaaagaagaaacagagatcacagagtggcggataggaaagtcggatgagtcaggaaagatgagaaaagaaagcagtcagacacttacagaagacggaatatataaactgagaatgaatgcagctgatatggcaggacatgaaaatcaggtggagcgacaggtgattattgacaaagaaaatccagtgattgttcatgtggatgaactcgatggaaaatatttaaaatacttccgatgggattattcggccggagaatcggtcaaagattttaccagttatacgtacaccatgaaattagatgatacagtataccgtccgggagagaagatcgaaaaagaaggcatgcatacactggttgtggaagcggtagattctgcaggcaataagagtgatgcaaaggcaaggtttacaattgatcataccccgccggtgatcagatttgaaaatatcagagaaggagaaagctatgaaaaggaaagaaaattttatatccgaacggaaaatccggaagatcagattgaatacattaagattaatggagcgaagcaaaagagtgaaaagcaaaagggactttatgaatgtaaagtagatgaagcaaaagcatatgaagttgaagtaaaggcaaaagatcttgcgggcaatgaacagatctcacggattggatttcagatagagcaggaaaaaacattattacagaagataacagagcctgtaaagaaatatattttttatggaaatgagaaagcggtaaaaaaagaagagcagttaaaagaagaacagatgaacaaaagaaatggtaaaagtatattatgttcaggtattatgctcacgggtatgttaacgggaattggcttctggaagagagaaagattggggaatatattgaaaaaaatgcagccagacaacaaaaacaagtagaatctttccataaaagggaggatgccgggtaaccgctttcgcgattcccggcatgtattatgaaaaagtttattccaaatagtatttacatactagataatgtcttgtgtatttctttgatgattatagtataaaaaagacctatgaagaaagaatgttaaagtagtgaaagaattttgaaggataaatgaacaaattgtgaacacgggattttacaaagattttgttggaaaacagaggaaaatagattatactaatagaagtcaattttgaagaaagaggagaaaagaagaatgaaatatatttcttttgccattccgtgttacaattcacaggactatatggcgcatgcgatagaaagtattcttccgggtggagaagacgttgaaattattatcgtaaatgacggatcaaaagacagaacatcagagattgctcacgactatatggaaaaatatcctacaattgttaaagtagtagacaaggaaaatggtggacacggagatgctgtaaactccggactgacacatgccaccggcaaatattttaaggttgtagacagtgatgactgggtggatgaagatgcacttcataaaattctggaagtattgcgtcatatggaagaagatgccatggaattggatatgctgattgccaactacgtatatgagaaagttggagcagcacacaagaaagtaatccattaccgtaatgtactgccgcaggatgagattttccgttgggatgatatgggacattttcatctggatcagtatattctgatgcattcagttatctatcgcaccgatatgttgaaattaatccagcttcatctgccgaagcatacattctatgtggacaatatttatgtatattatccacttccacatgtgcgaaagatttactatatggatgtagatttttacagatattttatcggacgcgaggatcagtcggttaatgagaaagtaatgatcaaaaggctggatcagcagatatttgtcacaaagacaatgattgatatgtatcagttgaaaaacatcggaagtaagaaattaagacagtatatgttgaattatctggcaatcatgatgacagtttcttctattctttgtatccgttccaagaataaagaaaatctggagaagaaaaaggaattatggcggtatctgaagaagaaagatctgcgcagttttataaagatccgctatggaattctcggacagactatgaatattccgggaaaatcaggacgtaagatatcatcgctggcgtatacagttgcaagacgtctgatcgggtttaattaattttctatttaatgcattatggcggctatcaccgatcggaataaacttacaaggtccgtatgcacaggataggaccttgtaagtttattcctgcggtttcgcatgccataataattaaatggagaactgtaatcttttattacggttcggggatttggcttagtgaattaaatagaaatctcccctaaaataattctcaatagtactttatccaacataatcgtccggttccaaggattgatgatgatgccctgaatgttatcagctgtaatggcagaattaaataactgtttcatgtcagtaagaaatgtagacattacgcttccggaacctttgagttcttcatcgaagctggtaaatgccgcccaccatttgcggccgtcatcggtctggattgcctgtacctggaggccggaggcagcggaagagggatctactgcaatgatcagttcgccatgttcattcatgcgtctgcggatgaccgtcagaacgtgagccagcatttcctgagacggttcctgttgaagagctgcaatggctgattcaatcttgtcattgccctgtaaagttttgtcggtatgtgtatgttcagtcatgatgtacaaaatcctttctatataaataatgggtacagaaaaactgttattggcagcttttcttgcatactttggtataaaaaatatacggacagccggagggcaatccgtatattaatataaagtatttcaggtggaagagcaagttaattgaactccagcggagaaatatatttattaggagaataagcacatccattattgtatttcaccgtaacatataaagaatcatcaccatcaaccagtttcacatagcagatattatctttgttgaatttgtgtgtgatatcgatggactgatttttgtaatacaggatgacggaaccatctttttcatattctatatccggagcatttagttcttccataatttcttcttctgtaaggctgcgctcggatccatccgggttaaatgcaacgccgcctccgccaaattctttttgtttgccatctttatcggcataagttccattataagaaccatcagaactgatctttaaagtggcagttgtttgatctccgtggatccagagctggactttccgctgaattccgccaagatcggaagcgtaggctgttccggttccggctgttacgatcaggcatgtggcaactgtggcggcaattgtttttaatttgtgctttctatttaagatactcattttatctacctccagggaaaaattgtcggaggcggaaagtgtatcaaaagcctgcttgtatttttctttattcgtcatcgttccattcctcctttaaggtttctttgagaagagcacgtccgcgggaaagccgggtctttacattgctgacagaaagatgcaggatatcactgatctcttgtgttgtataatcttcatagtaaaagagatgcaggacaattcggtatttttcaggaagtttcattactgtgtcaaacagagtttctgattccggtgtttcgaaggttaatgtttccatatattcttctaagttgcatttatttctgtgccagaatgagcgggtgatattctttgctttattgatcgcaacccggatcagccaggcacggatatgttcttctgtatcaaactcttttttatatgtgtgatactgaataaatgtatcctgaacgacatcttctgcatcttgttggttcctgcatatattaaatgcaatcgcatacagatgcttttgatatcgttcgattaaaacttgtgttgctggtttcatgagtactcctttttggtgttagtgggaaaacagatgttcatttcttaaggcctttcacttataatacaaatgaaaatatggaaaggttacaaatggaggtaagaatatatgttttaactatatcttactatcgagcataagcattttacattttaaaatatacgttgtaaactatattatgaaaaaataacttcgaaataagaggtgaaagataaaatgtatctggtatcggtatattttgatgataaaagcaataaaataatttctgattatatcaataagattgcacaaaagacaggaaatacttttatgacggacaatcacgttcctcctcatctgacgataatgtcagtagaggcaagggaggaagataaattgacagaggtgatgggaaagttggagagatatctgacaaaaggacagatccagctggtctctgtcggagtgttattgccatatgtactgtatgtgacaccggtcctgaatctgtatctggaagatatgatcgaacaggtacatgatatggtaaagaatattccggaagtcaggatgagccggtattatcagccaatgcagtggcttcctcatatcacactgggaaagaagctttccaaagagcagatgcaggaagcatttgcagttatacaggaacaattcgtaccgatggaagttacggtatcggagatcgggctggcgaagaccaatccacatcaggatcttgtaagaatagaattaaatgattaattgcggtggaaaataaaatgattaacagagaagatatgctggcactgaccagaagaatgacagtaaagcgaacatccatgacaagaattgccggaggatatctggaccgggatggatatatagacggaacatttaataccggatttttgaaattgagtccggatgacaaagaaaaaaatttacagatagcaaaattcattccatttgcagatacgaataaaaatctgaaagaatatgcattttccgatgagaagacgaaaggcgacagtatgtggaaaatgttaatgggaatgcgtgcgtgcggtctgaaaaatgatgcactgatggagactttttatgaaattgttggtgaacgatatcagtcagagggagactatgccattttcgtatttcatgaccgatacgatattccggcaaaagggaaagatcatgtccgtcagggtgaatctgaagaaatgtttgaatacttaatctgtgccatttgtccggtaagtggagattacgaaccgggagaaccggaatgtggattcttatttccggcatatatggacggcggggcggtcatgaattatgtggatgtatatcagaagaatcaggaatatccgcatacagagcttttgaaattacttggagtatgatgagatagagaaaatttcttataaaggtgtttaatggtttcaaattcatctgggatatcttataatataaaggattgagtttagaggaaaaggtaggaatatacaatgcatacaatgaaaaaattcattcggtattatgccccgtataaggcggtattctttctggatctgatctgtgcggcagtcataagtttggtggatcttgcatttccacagattttacgtacgcttacgaagacgttgtttacagaatcagcagatcacatactgcatgccttgcttccgattggggcaggattgcttgcaatttatatattacaggcgctttgtaaatattatgtaagctatcagggacatatgatgggagccaatatggaacgcgatatgaggcagcagctttttgatcactatgaaaaactgtcattctcatattatgaccagaataattccgggcagatgatgagcaagctggtatcggacctttttgatatctcagagtttgcacatcacggaccggagaacttatttatttcgctgattaaaattatcggttcgttcatattcctgtttctgattaactggagactggcaataccgcttctggttctggtagtgttcatgttgttcttctcgtacgggcagaataagaagatgcaggcgacattcatggacaaccggcgtaagatcggggatgttaattcgagtcttcaggatacgctggccgggatccgtgttgtacagtcctttgcaaatgaagagattgaacgggagaagttccgaaaaagcaaccagggatttctgcgttccaaggatgccaattataaatgtatgggaagctttatgagcggcaacctgttctttcaggggatgatgtatctggtaacgctggtattcggaggatggctgatcgcacatgggaagatggaggcagcggatcttgcgatgtacgcactctatattgggatctttatcagcccgatacagattctggtcgagcttactgagatgatgcagaaaggactgtccggattccgcagatttctggatgtggtagagaccgagccggagatcgtgaatgcaccggacgcagaatcaatagatgaagtaaacggacacgtttcttatgaaaatgtatcgtttcattatagcgacgatgatacaccggtgctttctaatgttacattcgacattccggcaggaaaatccgtggctttagtcggaccttcgggaagtggtaagacgacgatctgctctctgcttccgagattctatgatgtaacaggcggacgtgttaggatcgacggaaaagatgtccgggatctgacactggaaagtctgcgtaatcagatcggactggtacagcaggatgtgtatctgttctgtggaagtattaaagagaatatcgcatatgggaagccgggagcatctatggaagagattgaagacgcagcaaggaaagcgaacattcatgattttattatggaactgccggacggatatgatacatttgttggtgaacgtggaacaagactttccggcggacagaaacagagaatctcgattgcaagagtatttcttaagaatccgtcaatcctgattctggatgaggcgacaagtgcactggataatgagagcgaacgctggatccagaagagtctggaagagcttgcaaagaaccggacaacgattacgatcgcgcatcgattatcaacaatccgcaatgcggatgagatccttgtagtggcagataatggaatcgcagagcgtggaacacatgaagaactgttaaaacagggcggaatctatgcgcattataatgagatgggataggcagaagataagaaaaacggaagttgcgctgtgagtagaaacataaaaattatcaataaagaaatttgcaaaagaaaaagattgtcgtgaaaagaatatatgatataatttacaaagatatcagcggcagaaaagacagtgcaaaactgtaaaggaacagtagaaatgattgatatcagtgaataaaaacggccacagaataaggcggcaaatcataagaaacagaggtagaattatgggaaaaatcagaattggtatcgttggatacggtaacatcggacgcggagtagagcagtctatcaagcgtaatgatgatatggaattaaaagcagtatttacaagaagagatcctgcaagtgtaaagatccagacagaaggggcagaagtaaagcactttgatgatatggaagctatgaaagatgatatcgatgtaatgatcctctgcggcggatcagcaacagaccttccggtaatcggaccgaaggtagcagcatcattcaataccattgacagctttgatacacatgctaagatccctgagtattttgcaaatgtagataaagcagcaaaagaaggaaagaatgtaagtattatctcagtaggctgggatccgggaatgttctctctgaatcgtctgtatgcagagtctatcctggtacagggaagcacttatacattctggggaaaaggggtcagccagggacactctgatgcaatccgccgtatcgaaggtgtgaagaacggaatccagtatacggtaccgatcgaagcagcggttgaccaggtaagaagcggaagcgaaccggagttgacaacaagacagaaacatttaagagagtgttatgtagtagcagaagaaggagcagataaagcagccattgaagaggcaatcaagacaatgccgaactactttgatgaatatgatacaacggtaacatttatcacagaagaagaattaaaagaaaaccacagcaagatgcctcacggtggattcgtgatccgtaccggtgagacaggatgcgaaggcaacaagcatgtgatcgaatattctctgagactggattccaatccggaattcacaggaagtgttctggtggcttatgcacgcgcagcatacagactttcacagaaaggtgaatcaggagcaagaagcgtattcgatatcgcaccggctatgttgtctcagatgacaccggaagagttaagagcacatatgctgtaataccaatggggacaggaaaaatggtttttttcctgtccctgttggctttaagaagagcgtaaataaattctataaaatgaaagattttacgtacaataccggaatgtatgatccgtcaaaattctagcaaatataagtcccagcggcaacatcacaatgatcatgatcgcagaagtaaaccacgaaaccgcatccgtcagagacataatcccgaaattataaatcgcacggtacagataaagccccggaaccatgattacgatagaagggacagtaagcgagattcgaggatatccgtttccttttttaataaaagaagcaagtaatccagcagtcagagccccgataaatgcagcggcagccggaggcatgctggtgaaattaacaagttcaagtctgagcgtattagcgatagcaccgataaaagcggccgttgcggccatagagtaagaactgttgaacatgatcgagaaaccgaatactccgcaaaagcttgtaattacacggaagataagacaggcagcagcgctcagatgcagtgccgtaaaatcggccggttccagatgcagaagtaaagccatgatccatgcaaataaagtggcaaccataacgataatgattgcataagtaagccgctccagtcccgaacgcagatctagctttgcaaggtcgatcccgcttgtaataaatggaaatcccgggatgatgaacagcatcgagcagatataaccagcttcatgaaattccggaatgtgaaagacaagttccgcaagtttcagaaagactgcataggtaaaacatgctgctgaaacagagactgctatattcaaaaacagtgtgtaatggtgtttgatcagtttcgtccggatcaaattaccaatcccggcggcaataaaagcaagagccatctcaaccggtccgccaccgagtaaaaaagtaaaaccgcaacaggcaagagctgcggcaagccccagctttgcaggtgaataaagagcatggatttcttcaatttcatccagtcgtttatggatatcttcaccggtcatatgtgcttcttcttccggaaaatgatctacaaactgttccatgcggtaaagcttggaggtattcactcccgtattggcaatactcaacgactgggaaatacaatcgtttccatcgaaacagttaaatacaatggacatcaatcccacgtctaccgtacaggttacaccaagctctttggaaagccggttcatggaagtccgtacacgccatgcgccggttccacaggagagcatgattaacccaacacggccgatgacagaagctttctcgatcagtccggcttctgcaatcaacacattactgtcatcattggcgtagtcatgccatggaatctccatatgatttttttccataatatcaataaagtcagaattagttgtctgcataaatgatcgcctctgctttggaaacgtggcgttccagattttttaagaaatgtgaattcggaaggaaaactccgatctcatcataacgggtattatcttcaacaagagaatcctgtccatagaatacataggacataggaagctctttctgaagttttatgacaatatccagaatagcagaataagcttctgcttcggtttcttttaattttacggtatccggtaattcacggatcaacagtacaccgttactcttttccagaatgttttgttccggttccatatcgtcagatgtataagaatggctgtagcggtatgcctgtgccagaaaaatattctttggagctccgagatctgtatatacctcatggaaatgacggtattcccgttcatgaatcgatctcttatattcaggaagtaacattccgttttcatctgtcatgatcatcggattctgttttccgtccgcattgaaccgatagggaatcaggaatgcatttcttaaaagatcaaagactgtattctgacagatagccatcagaaacgcagataaatcccgattgcgataagaattaaaaagagcctgtgcaaattctgtagaagacggagaatcgggaagatcgacaccatcattactgaacagataactgcagaatgtttccatcagtttttcacatgcccatttatcttcggatattttcttaaataagatttctgatttttcttctctgggaaaaagtgttttttcctccataataaagcgcttcctttcatattttcatccgaataaattatacaactgtgataaaaataagtgaaaactataattgatataatggatatatgattatggtatgccggagaagttatcggtggcagcttctgtagatagtcggttgatgatttgaaagggatatttgatatagtttaaaactatgacaaatacacatttttttgtattatacaagtttatcaaaacaaattataataaatctatcgattgagaacatcatcaagaatatgaaaaatataaaagaaagccatcaaggacaacaaaaaagacagaaaacataagtccctggcggcaaggaggaaataatcatgaatacaccatttcgttacgactttgtaggaagttttttacgcccacagaaattaaaagacgcaagaaagaatttcgaagaagggacaatctcacaggaaaaactgaccgcagtagaagatgaatgcatcctggaactggtggcaaagattaaggaacttggatatcatgtgatcacggacggagaattcagaagatcgacatggcatctggatttcatgtggggatttgaaggtatcgagcatcagaagacagtagaggggaatacaacatttgacgcagaagctgcaatgattgatgatacatacatgacgggaaagatttcagtaaagaatcatccttttgtagagcatttcaaattcatcaaagcattagaagatgaaaatactgtcgcaaaacagactatcccgtcaccgggacagttctatgcatactttaccggggtacagcttctgaatacaacattagaaatctatggatcggaagaagcatttgccgaggatgtgattaaggcatacggtgaattcgtgcaggaaatctatgcagcaggctgccgtaaccttcagtttgatgactgcgtatggggcggaatggtagatgtgaagatggcagttgcattgaccggaagaacaggacagagactggaagattacaagaaactccttctggaactgaataaccaggtagtagcacaggcaccggaagatctggtgatcaatacacatgtatgccgtggaaattatcattctacattcttcagttccggagcatatgattccgtagcggatttgttattcggagaagaaaatgtaaatgcatattatctggaatatgacgacaagagatccggcggatttgcaccacttgcaaaggtatccggcgataagaaggtcgtacttggacttataacaaccaagacaccggaactggaagacaaagaaaaagtaatctcaagaatccacgaagcagcaaaatatgttccgcttgaccgcttatacttaagtccgcagtgcggatttgcatcctgcgagatcggtaataagctgacagaagaagaacagtgggcaaagcttaagcttgtaaaagagattgccgacgaagtctggtcagacagataagccagaacagattggccataagccagccgatactggtagcaatggcaggggctgccagcccgaaatgagggaagaagaaccaggttaagattacgcgaagtgcaatctggagcgtacttccggctaacgtcagaaccattttcccaagtccgttataagtaccggtgaaggttccgccggcaggaaaatttctggaatttatcagaacagaaggtctgatgtcataaacgtacaattcgttatggagacaataaaaatcgttctgtcatctggaagtatgatatactgataacaagacctgcaaaaaaagatggaggtggactacatggatgttgcaacgatggtagcgattaataacctgaatatggttacggtgatggcagtacaggcggcaaataatgtaatcacgatcgtaaatggagaaaggatggaagaagatatggatggttcaatgttagatcagtatatgggaaaagattgtacggtaagtctgttcaacgaagtaggagcaatcaaaggaaaactcatggacgcagatatacagtgggtaaaggttgataccaagaagggaacacagctgattaacagaaatatggtacggaatattacttttgataataaatagaatgaataaaaatagttgtttcgaaaaaagtcagaaatcagtaaaaatgagttgacatttcgtgcaagtgtttctatacttaaacatgtggataaaacacggggagcttgtgtaccaggctgagaggaagttaagaacttcgacccatatacctgatttggataatgccaacgtaggaatgtatgacgtagattttaggagagatgcattgagttggtatctctcttttttgttgctatgtgacgtaaatcaggaacaatagaatatcggataagttgagagtgaacgagagttcacgaaggggtgcaccaccacgggtgtatttacttcgtgaactctttttttatctgacaagtacttttgaaagtatgatccgggaaaggagaacgcatgattatcgtaaatggaaaagaaatcaatttgacagaggatacgactgttgcagaatatctggaacagaatcagtatcaggtaaaaagaatcgctgtagagttaaatggagatattcttccgaaatacagctattccgataccatgttaaaagacggcgaccgtctggaagttgtgacattcgtgggaggaggctaacattcatggaagaaaccggattagaaaatatgacggagaatacagagaaagaaaaagtacttagtaaagaagcgattgtggcagcattaaatgagagacattctccggagaaacagaaacttctgtcagcggggagggttgcaatcgccgggcttggcggattggggtcaaacgtggcatatgcacttgcaagaatcggagtcggccatctgcatctgattgattttgatgtggtggatatcacgaatctgaaccggcagcagtattttatggagcatatcgggatgtataagacagatgcgctgaaatcattattgttaaagatcaatccatatctggatatcgatacagattgcgtaaaagtcacagaaaaaaatcttacaaaattattttgtgacgacctgattgtgtgtgaagcattcgataatccagaagcgaaagcaatgttggtaaatggaatactggaacattttccggaaaagaaactggtatcggcaaccggtatggcaggatacggaagcagtaatacgattcgcacacagaagttaatgaagaacttttacctgtgcggagaccgcgagacggcaccaacgtatggaaatggcctgatggcaccaagagtggccatctgtgcagcgcatgaagcaaatatgatcacacgtctgattcttggggaagaggatgtgtaggaaaacaggtaagaaacataagattcatgccgcaaaaaaagatagataaataagaaagcatgagcagaaaataataggaaagaaggtcctgattatggataaaaaagaaataaaaaatacagatacatttacacttggaggaaaagagtttacttctcgttttatattaggttcaggaaaattttcactggatttggtgaaagcatgtgtggaaaaagcaggggcacagattatcacactggcactccgtcgtgcaaatgaaggaggtctggcaaatattctggattatattccggaagatgtgacacttcttccgaatacatcaggagccagaaatgtagaagaagcggtacgtattgccagactttccagagaagtcggatgtggcaatttcgtcaaagtggaagtggtaagagattcgaaatatctccttccggataattatgagacgatcaaagctacagaaattcttgcaaaagaaggattcgtggttatgccgtacatgtatccagatctgaatgctgcaagagatcttgcaaatgccggtgcagcatgtatcatgccgcttggcgcaccgatcggatcaaataaagggcttagcacaaaagactttattcagatcctgatcgatgagattgatctgccgatcatcgtagatgccggaatcggacgtccgtcccaggcatgcgaggcaatggagatgggggcagccgcagtgatggcaaatacggcaatcgcaacagcaggagatgtaccggcgatggcagaagcatttaagaaagcaatcgaagcgggcagaagtgcatacctttccggacttggaagagcgatcgagcgcggtgcaagtgcttcgtcacctctgacaggatttttgcaggattaggaggaatgactaatggaaacaaatcatgaagatacacatattaatgaaagtattttaagcgaggagattctggaagaccagaagaagaaccggattgatcacatgacttatcttccgggtatggaggatatcggatcagagatcctcgaccaggtcgtaacagcgatggaagcttacgattataatacatatacagcagaagatgtaaaacgtgcactggcacatgcagagcgcacaccggaagattttcaggcgttattgtcaccggcagcactgccatttctggaggaaatagcgcaggcagcgcagatcgagacgagaaaacattttggtaacagtgtctatatgttcacaccaatctatatcgcaaattattgcgagaactattgcatttactgtggttttaattgccataacaaaatcaaccgtgcacagttaaatgcggaagagatcgaaaaagagatggcggcgatcgcagagacaggtctgcaggaaatcctgattctgacaggagaaagccgtaacaaatctacagtagaatacatcggtgaagcatgtaagatcgccagaaaatattttaaagttattggtctggaggtttatccggtaaattcagacgaatacgcatatctgcatgaatgtggggcagattatgtaacggtatttcaggagacatataactcagataaatatgagacacttcatcttgcagggcataagagaatctacccgtatcgtgtaaatgcacaggaaagagcattgaaaggcggtatgcgcggagttggattcggagcacttctggggctggatgatttcagaaaagatgcatttgcgaccggatatcatgcttacttattacagagaaaatatccacatgcagagatcgcattttcttgtccgagacttcgtccgatcatcaataatgatcggatcaatccgatggatgtgcatgagccgcaacttctgcaggtagtgtgtgcataccgcctgtttatgccatttgcaagcatcacggtttcgacaagagagtgtgaaagagtccgcgataatctggtgagtattgctgcaacgaagatatctgcaggcgtaagtaccggtatcggaagtcatgtagaagatatcgaagacaagggtgacgatcagtttgaaatctcggatggacgttcggtggatgaggtctatcaggcacttctgaaacacaatcttcaaccggtgatgagtgattatatttatgtgtaacagggagcatcttgtgttaaaaacatgccgaatacagctgaaaggagttgtcagtgataaaatctgtaaacaatcaggactttaaaatcattgcagtcagcaatcggaaattatgcaatcgcccgtttttagagcagatagaaagagtctgcaagatacatccggaagctgtgatcttaagagaaaaagatctgacagaagaggaatatgggacattggcaaaagaagtaatgaatatttgcagccgttatcaggtgtcttgtattcttcataatttctggaagactgcactagaactgggatgtacatctgtacatctgccacttccgattttgcaaaaaacaactgataaagaaaagaaaaaatttacaaagattggaatttctatacattctgtagaagaagcgaaagaagcagagcgattgggagcttcctatcttacggcagggcatatctatgcgacagattgtaagaggggattaccgccaagaggattgggattcttaaaagaagtttgccgggaagtcagcattccggtgtatggaataggcggaataaagttcgatgaagaacagtggaatgatatgaaaaaatgtggagcagttggaggatgtattatgtccggaatgatggaaatatagtaatcgaaataaaacagctcatttttaaaagagcaggaaagccttctgagtcggtactcggaaggcttttgctttgcactggcatataagtgcatatcagatagtactttacaaaattatttctaagtgttatattaatacaaaaatgaatagttcaaaaatgaaataaaaaggagacctacatatatgaacacaggaatcgaatttgcagaaaagctgtcaaaggcatacagtgagacctgcaaaccgttatgccatgagctgaatattccacagaccgcatttgacatcttacttttcctggcgaacaacccagaatacaaaactgccagagacatcgtagaaatacgaaaaattaaagccaatcttgtatcggtaaatgtggataaacttgtgaatgaaggctatctggagcggaaaagtgtagaaggtgaccgaagaaaagtcaatctgatctgtacagaaaagtcaaaagagattatccaagaaggacagaaacttcagcagtcgttcgttgaaaaactatttgaaggaatggatgaagatacaagaaaagcacttcaaaaaggaatggcgcatatggaagcgaatatagagaagatgttggaggaaaagaactagatgaatacaatattaatgattatcgtaacatttttcgcggggatgggagctggactcggaaccggatttgcaggaatgagtgcggcggcagtgatcagtccgatgctgatcacatttcttggaatggatccatatatggcagtcggaattgcactttcatcagatgtacttgcaagcgcagtatctgcctatacatatggaaagaataagaatctggatgtgaagaatggtctgatcatgatggtcagcgtacttgcctttaccgttgtgggaagttatgtgtccagtctggtaccatctacaacgatgggaaatttctcggtatttatgacattcttgctcggcattaagttcatcgtaaaacctgtcatgacaacaaaagaagccatggaaaaagtatcgacgaagaaacgtgcagtgcagtcgttaatctgtggtgtcatgatcggattaatctgtggatttatcggtgccggaggcggtatgatgatgcttttgatcctgacctctgtcctgggctatgagcttaagacggcggtaggaacgagtgtgttcatcatgacatttactgcctttaccggtgcagtttcgcatttcgcaatcgggggaatgccaaatatagcggtgtggatcttatgtattgtgttcacactgttgtgggcaaggattgcggcagtatttgcgaataaggcaacaccgaagacattgaatcgggcgacgggtgtgatattagtggttcttgggattgtggttatggcgttttctattttaaattaatagagagcaggaagaaattaatattataggagagaataaaaggtattaatagaaaaataatatgatgttttgtttattatgcattctacagggactgccggtggcaggtcctgtagaaagaaaaacattgcttatgattctttaatatttcccttctctatattttctttgagtatctggtctgttactttatataaagtctcagatcccagctgcgttttccgttgtcttccgtatacctgttcggaagtaacctgatgctcacgccagtcgccaccgccgttactgttattgagaagcaatggctgcaggttatccagagaatgtgcaaatttggattccggtgtctggtaattttcgaattcatcaaagagtgcagtcagttcttttttctgatcttctggtaacagtgagaagatccgttctttggcagcatcttcacgtgctttctgcgtctttaatccttctgtatcgtaggcataagtatctccggcgtcaatttccacaatgtcatggattaggcacatgatcataacttttgcgatatcgacgggttcattggcataatcttttaacaggtatgccatgattgccatatgccaggcatgctctgcatcattttcgcgccttccgtgtccggagaggtgggtctgtcgtaatatattcttttctttatcaatttcgagaatgaaatcaagttgttgttttaatctttcctccatgataattcctccttgtgcgttcagtacgaataaactataagatagtataacataaaagaaagcataatgaaaagcaaaaacacataaaacatataaaacatattgacttaatatggaaatggtgttaaactccagttattaaaagataaaagagagaaaagctcagaaggcaggtgcaggaagtaatgaaacagatattatgctttggggattcgaatacatgggggttagacggagagaccggaaagcgcttttcatgggaagaacgatggaccggaatcttacaggaaaaactggtggaccgagatattagaattgttgaggaaggtctgtgtggaagaacgacaatatttgaagatccgcttcgcctgggaagacggggaacagaattgcttccgacattattggagacgcacacgccggatgcagtcgtgttgatgcttggaacgaatgactgcaaaactatattcggagcgtcagcagaaatcattggaaaaggaattgccaggttactggagcagatcaatcagtatgcagataagatgaaggttcttgtgatatctccgatctatctgggagaaaaggtatggcaggacggatatgatcaggaattttcgacagaatccgtagaagtatcaaagaaattagaaccggtatatgaaaaagtggccggaaagtatggcaaacgattcatgcgggcagcagattatgcgggtccgtcggaagcagatcaggagcatatggatggacagagtcataagattcttgcagatgcgatttatagaaaattagaagcagagattttatagaaaagataaaaatccgttgtcagtcaatggtatgtcctgttttactggagttccggtaaagggaacatatcaggataagacaacggattttctgctatcttttggatgtaacttctgcaacggattttccggtgattaattccattaccgtacttttggcatcaatagcggtaaacactcctgcaagaatgaaaatggccccgagatatcccatctccgtgagcttctcatgcaggaagatgaaggaaaaaatcgctgcaaagatcggttccagggagaacaggaatccggtattctccggtgttgtatattgctgtacaacagtttgtacaacgaatccgtaagctgaggacaagagagcaagtccaagaacggagatccagtccaacgtggtgctcggaaatattggggatccgaacaccagcagaccgattatggaataaagacaggtaaagccctgctggtagactccgagtgcaagtggatctacctgtctggtaaaataactgtttaatacaatattgattgaataactgaaagccgaaagcatacaaagcagcgttccgggcttgacagcaaatatatcaccgccgttgatcagtaccattccgattaatacgataatgattccaagcctgacatgatgctccggaagtctccgggaaataactgcatgaatgaccggaacaagcacaacggtggtgctgaggatgaatccactctgagaagcagtgattgtatttaatccgtaaaggattggcgtaaggtttgtaaaaagcagaaagccggtgatggcactgtagagtaaaagtcttttattaactttcagtaaccttttgaaaaatataagtaccagaatcagaaatgcgattcctgtacgcagagccatcagcatcagaggggaaagtccctcaattccaagtttcataaatatataagaagttccccatgccatagagcaggttgtaagaatcagattggctttttttgtcgacataatcggcgattcctcctatgtaatagttttcttgttttttattatatagtagaatagaatagatgccaatggggacgtgaaaaaatggctttttcagtgtcccctatggcttacaaagcacatatattaataacaaaagcatctggagttaatgtatgaccagtcagaaactagaaaatcttttaaatcttgcactgaattccgcggaagatgagcgggaaaaatccttgaatttaaatgttggatatgatccgcttgaccgggaatgggatctgatcatcaaatattccgtaaatctggaccgagtcaggaagatagcatccaaagtaacagaacttcaaaatgaatatgcagtcatccgaattacagaatccagaatcgacatcttatcgggaattccggaagttgaatatgtagaaaaaccaaaacggctgttctttcaggcggcagaaggaaggcgtgtgtcttgtatcaatgcggtacaggatacacgcctttctctgtatggacagggaatattggttgcaatcatagattcgggaatcgattatgcgaatatagattttcgaaatgcggacggaagcacgaggattcggtatctgtgggatcagtctctgaatccggcagatggggaaacagcaccggttggatacagcatcggtgtggagtatacgaaaggacaaatagatgaagcattaaatgcacaaactgtatcagaacagagaaggcttgtgagaagccaggacatctccggacacggtacggcagtggcgggagtagcagcaggaaatggaagcaacagtggaggacgttatgccggagttgccatgcagagtgaattgatcgttgtaaaacttggtaatcccatacaggaaggattcccaagaacgacagagctaatgatggggatcgattatataataagaaaggcactggagcttcggatgcctgtagctgtgaatatcagttttggaaatacatacggcggacatgacgggacgacacttctggagcgctatatcgatgatgtgtcaaatatatggaagagtgtattttgcatcggaaccggaaatgaagcggcaagtgccgggcatacttccggtagaattatttcagaaggagaagagacaatccagcttgcaattcagagcagacagtcatcgatcagtatccagatatggaaagaatatacggatcaaatagagatttcgatcatcaatccatcgggagtgcgggtcggaccggtaccggagatattgggaccacatcgtttccgaatcggtcagacagaaatactgctttattatggggaaccaagtccttacagcatttcccaggaaatctatatagatctgcttccggtagaaagttatctgacagaaggaatatggagaattgttctaagtgccgggaagatcgtgacaggacaatatgaaatgtggcttccaagcgacaatgtattgaaccgtggaacaggattcttgtttccaacagatgctacgacgctcacaattccatcttctgccagccgtgcaatatccgtaggagcatatgacgcaaggacatttgcatatgcggatttttcgggaaaaggatttaccagacttacaaatatggtgaaaccggatcttgtggcaccgggagtggaagttatgacaacaacagtgggcggaggatatgcggcatttacaggaacatcctttgccacgccatttgtgacaggaagtgcagcgcttttgatggaatgggggattgtgagaggaaacgatccatatctatatggggaaaaggtgaaggcgtatctgagacgtggagcgaaaaaagtaccgggatttgacgagtatccgaatgaggaagtggggtatggggccttatgtacagcacaaagtatccccaaaatatgaaaacggctgatctgaaaaagtaaatttcagtgccagagtaataaggataaaaggtacatttttttagtaggataatgtttccaaaagtgctaaaataaaattatcatacataagcgaggcgtaaaacaatgaaaaaaatcaagtggggcgttataggaactgccggaattgccagaagttgtaccattccgggaatgatacaggcatacaactgcgaattatatgcaattgccggaagaagcatagacaaagctgaacaatttaaagaaaaattcggatttgagaaagcctatggaagttataaagaattgttggatgatccggaagtggaagcggtatatattgcgctgccaaatactttacattatgagtggggcgtgaaagctatgaaaagcggcaaacatgtattgtgtgagaagccgcttgcaccgtgtgaaaagcaggtaaaagaattatttgacacggcaaaagagaatcatgtatatcttatggaagcttttgcgtatcagcacagtccatatatcactgcaattaagaaagagatagaagatggaacgataggagaagtttgttatatagattccgcatttatcacatcggattataataaggaaaatatccggatgagacgggagactcttggagggtgtacatacgatcttggagtatacaacacaagcctgacgttaggacttctgaatgaagaaccagaaaaagtcgaggcttccgcaatcttttcggaagaaaagatcgataagctgacttctgtagtcatggaattcgcagatggaaagaaagcagcatttacctgtggcatgacgcttgcaacgaatcaggacaggagaatggactgtctggagatagatggaacgaagggaagtattaccggaaccaaatttgcattcaatggtgatggagaattaagctatacgattcgtacggctgaggggcaggaagaagtaaagacggtagaagttccacagaattatcgcctggaggtagaacaattcggcagatgcatcgatgaaaatgagattccggcggttacggaagaattttcgctgaaaaatgcgagacttgttgagaagattctggaggaaatcggatattaagatgaaaaagaatgaaaagatcaggacgccgttaggaatcatttctgttttcaagaatgaaatacctgaaagatatcattgtgtagtggaaccggagattttacgtatcagtgagacgcatataaggattctgacaatagatcaggccgtatcctggggagaagaagtgtattcaccaagacttcatcagaactgtatgaatcctgaaaatattacactatatccactggagattgagtggaatggggataaagttacggtttcagatcattatgggatgaaaaagtggataaccggggaaaagttaccggaaattcaagactggaatttaaaactgaaaaaattaagatgtaatccttgcagaaactgtggaagatgttagaaagcgaaagaaaagaggaaaaaatatgaattattcagaatgtatagaaaatgcaagaacacgtattggaaattattgtaaggcctgtccggagtgtaatggacgcgcctgcaagaatcagatgcctggacctggggcaaagggaatcggagatacagctatccgtaattatgataaatggaaagaaatccgtgtccaaatggacacaattgcagaaaacaaaccggtggatacatccctggagctcttcggaaagaagtttttatatccattttttgcaggaccggttggtgcagtgggattacattacggcgactgtctggatgatgtgagatacaatgatattcttgtgtcagcatgtgcaaaatacgggattgccgcatttacaggagatggtctcgacagtaatgtgatggttgctgcgacaaaagcaatcgggaaaacagacggaatcggaatcccgaccgtgaaaccatggaacatagataccgttgcagaaaagatgaagatggttcaggaatcaaaggcatttgcagtggcaatggatgttgatgcagcaggacttccatttcttaagaacatggagccgccggcaggaagtaagacagtggaggaacttggagagatcgcaaagattgcaggaataccatttattgtaaaaggtgttatgacagtcagaggagccctgaaggcaaaagaggccggggcatctgcaattgtagtatcgaatcatggaggacgtgtgctggatcagtgcccggcgacagcagaggtgctggaagagatcgccagggcagtaggggattccatgaagatatttgtagatggcggaatccggagtggtgtagacgtattcaaggccctggcactcggagcagatgcagtcatcattgcaagaccatttgtgactgccgtttatggaggtgcggaagaaggcgtaaagtcttatatagataagattgaaacagagctggaagacacgatgaaaatgtgcggggtaacgagtctcaaagagatcaccagagcgtctgtctggatgaaataattaccagattcccatgatatgctgcattccgagacttacgatggtaattccgatccagcagcatccaccgagcataagtggttttccgccggatttaatcaatttcacaacattgctgttaagtccgatcgcagccatagccataatgataaagaatttcgacaattcttttaacggagcaaatacgtctgcactgacccccatagtcatacatacagttgtgatcacagctgcaatgatgaagtataagatgaacataggaaatgctctctttaagctgaatttgtttgatgctgagtcagcatttccggattttgcagcagattttgcacggatcagggataataccagtgtgatcggaataattgccagtgtacgtgtaagctttacggtcacggctgtattcagtgtttcacttccgagcttccacatactgtcccaggtagaggcggcagcggtgaccgaagaagtatcattaatagcggttccggcaaataatccgaaggagcttccacttgtagtgtcaaagccaagtgcacttccaagcacagggaaaagtacggcagcgataacattaaagaagaagattacagagattgcctgtgcaacttcagtatcatctgcatcgatgaccggtgcagtggcagcgatcgcagatcctccgcagatggacgagccgacccctacgagaatcgaagtattcgatgggacattcatgatcttgcggagaacccacgcaatgatcagagaagtacttatcgtacatacgatgatcggaagggattgctttccagtctgtagaataacaccaagattcattccaaatccaagcagtacaacagctgtctgtaaaataatcttagaagtccatttgatacctgattcggcttttcctttattggtccatactagtgtaatcagcattccggccaggatcgcgatgacaggtccgccgataaccgggaaagcctttccaagaagccatgatggaatcgcaatcacaaaacaaaccagtataccgtttaggtttttgttaaaaaaattcatgttttttcctctttctcattcttttattggttcatacgggttttcactagagattataacactggataacaataataaataattatataatattatcgaatgataataaaaaattattaaaaaatcaaattgacaatgaaaggaaaaagattatgctggattttagaacagatacattccttgcggtatgtgatacaatgaatttcacagaggcagcaagaaggttacatattacgcaaccggcagtttcgcaacatattcatttctttgaaaaggaatatgatgtcaaattgttttcttattgtaataaacagttgtatctgactcaggaaggagagatacttagaaaacggctgatgacaatgaaaaatgatcagctggcaattatgaatgagataagaaatgaatcccataagatggaatcactttccataggagttacgatgacgattggagaatatgcaattgtagataaaatagcagatttcctgatcagccatccggagataaacctgcatatacattatggaaatacaacgcagctgttgacattgcttgatgaaggaaggattaatcttgcgcttgtagagggcaattatccgaaggaaaattatgaacataaaaattacagtacggaagagtatatagcagtttgtgccagagatcacacattcaaagaaaaatttccagaaacaatgcaggaactggtgaaggagcgcctgcttgtacgtgaaccgggatccgggacaagaaatattttagaggagttacttcttgcaagaggaatggggataaaagattttctccattatacagaagtagaaaatatgcatacaattatcgggcttttaaaaagagattgtgggatttcgtttatgtataagattgcagtagcggatgaacttaagaatggaacattgaaagaaatcagactttcagattttaaaatgcagcatgcttttgattttatctgggaaaagggcagtatttatacagaaaaatatattggaatatgtgaggaacttctgaaaaaagagaatatcatatattgattagttgtacttatcgataatgaaagaaagtataaatcaggaaggatgggaatcatatgatgacaagagaagaagcattagcatacggaatgtcttttgacaatgtatatgaagaaaagccattccgtgatccaaactggcagctggtgcggatcaaaggaagtaaaaaaacatttctgtggatctatgaacgggaaggctatatcaatctgaatgtcaaagtgaatccggagtggagagacttctggcgctcgacgtatgagtcagtgacggccgggtatcatctgaataaagaacactggaatacgatcattctggatgggactgttccggaaaaagagattaaaagaatgatcgcagaaagctatgatctggttacggacagtccgacaaagagaatttacgaagcagtgaagcgtattccaaaagggcatgtggcaacttatgggaagatcgcagagatggcgggagaccccagaatggcaagagccgtgggcaatgcactgcataagaatccggatccggaacatattccatgcttccgtgtggtcaatgcgaaaggagaactggccggggcatttgcgtttggtggagaggatgtgcaggcagaacttcttcgggcggatggagttgaagtgataaatggaagggtagatttggaaaaatatggaattagattatctggatctgtattactgccaccttgtggattcggagctgcaggtaaaataaaaaaagaaaagaaaagaagataaaaatgaaacagattgcaaagaaaataacagaatatgtaaagaaaagtaaaagagcaaagctatatggagtatttggtctgatatatttgattgcagtcatatttgtcatgaatgacgcatggctgtatcagacaccaattgcaaagctgacaaaagtagagacaagcgtggcaggagaaagcaaaagtacccgtggaacacaagaaattaaatataagcaaaagatccggggggtgatattaaatggaacgaataaagggaaaatcgttgatttttctaatgaatatacctatacaggaatgttaaagcagaaatatcacaaaggggataaggtattgctgaacgggtctgaaaataatgtgggatccagtatacagtgtgtaaaaagagatacggaacttattattttgcttggtcttttaatattggtattgatgatgattgcgggaaagaaaggcttgcttacaattgtgacagtgggaatcaatattgtgatatttacagcaggattcctaaaaagcggtgatgatgcggatgttgtagcaatctgtaataaaatggtaatcttttttgcaattgctacattgatcggattaaatggaattcacaggaaaacatgggcggcattattgtcaactatatgtgtattggcaatgatcatgggaatatttgatgtggtgatcagtcatagtgctgaattggattattctactatggaatatttggggagcattgataatccggatgagatttttcatgcagagattttgctatcaggacttggagcaatcatggatgttgcagtggcaattgctgtcgcattgagtgaaattgttacgaagcggccagaagttacatttcgggagttattccgatccggaagagagataggatatgatattatgggaacgatgatcaatgtattattgttcgtgtttggttgtggcttgattccgatgtgcgtgatcaggatgaataacagtgtccggtttatgacgattataaaattacatattccgtgtgaattatgcagattcttcatagagagtattggaattgtactggcaataccagtatctatactgatcacatctgtgatgatgaaattaacgataaggaaggtgaagaagacatgttgatgatactgggattgattctgttatttttgatcatgattattggcggggacagaggtgtgatatcattgatagcactggttggaaatatgttgctgcttagcctggctatctggctgatggcagcgggagcaccggtacttctggttacgatcggaatgggaatcatcatttcatgtgtaacattattttatcaaaatggtaccaatgaaaagacgaagagtgcatttgcagcagtattgattacaatgacggtcctgtttttctttatctatatggtggtgtggagaagtgagacaggaggactgaatgaaatccaggctgcggaagatgatgtattatattataatatgaatctggacattaatatgagaaatgttgcgacagccgtgatcatactcagtacgttgggagctgtgttagatatggcacttacggttacaacttccgtttacgaggtcagtattcacaaaccggagatgaaactgacagaacttgtagaaagtggaatgcagattggaagagaagtaatcgggacaacggtgaatacattgctatttgcgtatcttggagaatcactattattattttcttatctgaagatgcaggattatacactggaaacattattaaattcgaaaatattatttcagaactgtgtatctatgatatttggtgcgattgcctgtgtggtggtgatgccggttgcggcggtattggttggcaggcatttgcccgggtataatcattaactgattatatccggagcattattttggcagaaaaaataccatcttcataggtaaagtcacaggcaccgccgtttttggcggtaatgtggcggacagattcgattcctatgccgtttccggagcgtttggaggattggaaaatattgttttcttgctgtattttaccatcgaaggtattctccacatgaatcagaagcaggtgattatggtggggataaacctccgcattaatctttctgcgggcgggctctgttttcacacttgcctggatggcattttccagtagattggaaaatacaaggcacagattaatctcatctatggaaagatcagtgggcagggaaaccagtgcatgaaaaggaatattttctttttgggcaagggtggaataatatccgaaaacactgtcaacagcctgattttcacagaaatggaggttatagtcagaaattttttcggttgtagcggatagatattttttaatcttttccatgtcaccctgctctgccagagaggacagttggacaaaatgatgacggatgtcgtgacgcgcctgttttgcttcttcaatggccatacagagattctcgtatctttcctgctgaagggaaagaaaatggttctcctgctgaagtctggcatttctgttcaggctgaccgccatcatgagaaacatgacataaaacaggagcaggattatgagcagtacaagacttaaaacaatataacactgcaggacccgcccggtatataaagtgctgcggtatttaggaatcataaaaagattcactccgatgaagattaccggaaggatccagaatacataccaggtttgggcaaagttttcgtctgcgatcattgtctgaacacagtggcgggcaggataccaggctgccagaacaaacagcaggcagatgacgttatagaaaattccggcactggtacgaaaccacagctcattttctgtaatatgcaggtcagcagtaataagtgcattgactgcccgggaaagactattgacacatgcaaaaacggcaaagactgccagaaaaatactgacggatttccagacagagatttttaacgttttatgataaataagcataataacaggcaacagaggaaacaggatccatctggtgggaaagtggaaggtacagcaaactgctcctccgaaaatacagattcccaggagaagaggaaaaagccacgctgtcagcttaagcggtgtctgtcgcagatagctttttacaggcagatatgacagcagtatgccgggaatgattacggaaagttcaagtacagggcgaagtatgtcagtcatttcaagacctcctttggaacagaaattccataaatgtctgtctggcgtttttgagcagcttccggctgaccgggacattgcttccgttatcaaggcaaaaacctgatccgtcaaaatcaacggcatgctccagattgatcacgacacctcggttacactgatagaaacgtgcgtccattttcagggaggttatgaaggaatcaaaggactggcgggtgaccagctccctttcaccggcagtgtggatgtgaatcatgtgagaaaaatgctctgcgtagattatttcctggaaaggaatctgaatattactgccgtttaccttaacatctatgtattttccggaatccgggatgcgggaaaggatttcatctgccagcgcggaaatatcattttcactgtagggctttacaagatagtgcagagcccggacctgaaatccctctaaagcatggtcagtggaagttgttgtaaagatcagcagacagtctgtgtctgatctgcgaagttcttttgcgatatcaattccattggctccattcatataaatatccagaaacactacagtgaaagggcattctttcgctgaagtgaggaatgtttctccattttcatattcaaatatatctgtatggacattgcgtctggaaaactgagattccagtctgtttcgcagcagtgtccgttcgtctgaaatatcatcaacaattgcaattttcatagtagatcttccttatatatatttataaaattccgcttgctgagactttttcatctgtgtaatctatagccgcagacaggcaagtggagtagttatttcaaaaacgctctggtaacagtatatcacaaaacaatatcacggagttacaattcgtgctattttctgtcgcttcgtgacagaattgttgaaatgatttctgcctttcttataatgagaataacaaatgaaactagcttaaatggaaaggaaggggagtgttgtcttgtattgtattgccatattgaccgaccaggaacaggaaggacaaaaaagtgcggaatatatcaggaattactgtacagagaagcatgtctttccactgattgaaatttatcagaagcaggaacaattttttgcacagacattgaaaacagtaccgacagtggtgtttctcgcattaccgggtgtgtccggcctgaatgcagcagaacaccttcgttctctgtatccgaaatgtggaattatctggtgcagtgaccttgatttttcgcttcatgcgttcaggctgcggatagaatatttttttatgaaacctgtggaagagcagaaaataaaagaaggtctttccatctggtttgaatgtaaaaaaggagggggctatgaaagaaaagaaagtaattgattataccagaacctatcgaagaattgaggcagataaaaagaaatgtattctgtatattgtcatactgatcctgcttggctttctgcttatgtggactcagattgatgatctgaccaggatgatctgtaagatatgtgccggtgttttaaagaaatatgaaccgcatatgtatgttggaatccgttcagaaacgtatcctctgtttggaaaaatcagctatctcagtgcagaaaccgtatatccgggaatacagataagccttataaatgcaggaatttctcttggaataatcattctgctggcgtgccttccatggaagggtcgccctcttgctatatatctgattctgtgcagtgcgattcatctgataaacagtctatggtttgtgtttggggaaaaatattttccgtatactttaaccgtttattcaaaattatatatgcttcaggaaatatcatagcagggcgtcttttttcaccattttgcatggctggcagcgttcacaaattctttacaaaaaattagcactcacctcttgacagtgctaacaaaaagatgtaatgttatattgcaaatagaacaagagcaaaaaggaggttgtctatatgaatataaataaatttacacaaaaatcactgcaggctgtacagaactgtgaacgtattgcaatggactatggcaaccaggagattgcacaggagcatctgctctatgcattgctgacacaggatgacagtttgattgcgaaattgatggaaaagatggggctggataagaatctcatcattaacagagtagaagaagccattcagaaacggccaaaagttcagggcggacagcagtatgtcggacaggatctgaataaagcattgattcatggtgaagatgaagccaaagcaatgggagatgaatatgtatcggtagagcatctcttcctttctattatgaaatatgcaggcaaagaagtaaaagcacttttccgtgagatgggcatttcaagagaaggattcttacaggcactttcaaccgtcagaggcaatcagaaagtgaccagtgataacccggaagatacctatgatacattgaataaatatggtacagatctggtagaaagagcaagagaacagaagatggacccggtcatcggacgtgattccgagatccggaatgtgattagaatcctttcccgtaagacaaagaataatccggtcctcatcggagaacccggtgtaggtaagactgccgttgtcgaagggttggcacagcgtattgtacgtggtgatgtaccggaaggcttgaaagagaagacaatcttctccctggatatgggagcgctggtagccggtgcaaaatatcgtggtgaattcgaggaacgtctgaaagcagtactggaagaagtgaagaacagtgacggaaggatcatcctgttcattgatgaattacacacaattgtcggagcaggtaagacagacggagctatggatgccggtaatatgttaaaacctatgctggcaagaggagaattgcactgtatcggcgcaacgacactggatgaataccgtcagtatattgaaaaagatgcagctcttgagagacgtttccagccggttatggtagaagaaccaaccgttgaagataccatctcaatccttcgtggactgaaagagcgttatgaagtgttccacggtgtaaagattacagacggtgcattggtagcagctgcaaccttatctgatcgttacatttctgaccgttttcttccggataaggccatcgaccttgtagatgaggcatgtgcactggttaaaacagaactggattctatgccggcagagatggatgaattgaatcgtaagattatgcagatggagattgaggaaactgcattgaagaaagaagatgacagattaagtaaagaacgtctggaacatttacagcaggaactggcagaactcagagatgaatttgcaggaaagaaagcacaatgggataatgaaaaagtcggtatcgagcgtgttcagaaactccgtgaagcgattgaacaggttaataaagatatagaaaaggcaaagcattcttatgatctggaaaaggctgcagaacttcagtatggtaaactgccacaactccagaaacacttagaggatgaagaagccaaagtaaaagatgaagatctctcactggtacatgaaagtgtcaatgatgaagagatcggaagaatcgtatcccgttggactggaattcctgttgcaaaattaaatgaaagcgaaagaagcaagactttacatttgggtgatgaactgcataagagagttattggacaggatgaagcggtagaactggtaacagaagccatcatccgttccaaagcaggaatcaaagatccgaccaaaccaatcggctcgttcctgttccttggacctaccggtgtaggtaagacagagcttgcaaaagcactggcagagaatctgtttgatgatgagaataacatggtacgtatcgatatgagtgagtatatggagaaatattccgtgtcccgtctgatcggagcgcctccgggatatgtcggatacgatgaaggtggtcagcttacagaagcagtcagaagaagaccatattctgtcgtattgtttgatgaagtggaaaaggcacatccggatgtattcaatattctgttacaggtattagacgatggacgtatcaccgattcacagggacgtaccgtagattttaagaatacgatactgatcatgacatctaatatcggatcacagtatttgctggatggtatggacgaaaatggcaacatcagccaggagagccagaatgcggtaatggaagacttaagagcacacttcagaccagagttcctgaaccgtctggatgagacgatcatgttcaaaccattgacgaaagacaatatttatgacattattgacttattagtagctgatgtcaacaaacgtctggctgatcgtgagatttctattttcctgactgacgatgcgaagaaatatgtcgtagacggaggatatgatccgaattatggtgcaagaccactgaagcgattcctccagaaacacgtcgatacactggcagcaaaactgatgctgcagggcgacgtaggcgcacaggatacgatcatcatagatgtggaagacggtaagcttgtggcaaggagtcagagcgtgtgcgaataatatttcacatagatgtcaattcagcttatcttagctggactgcagtagaacaactaaagaatggagcgaaagtggatatccggacgataccggcgatcattggcggcgaccagaagtcccgccacggtatcgttctggcaaaatccattccggcaaaaaaatatggcattcgtacaggggaacctgttgcgaatgcctttcgtaagtgtccgaatctgaaaagttatccgccggatcaccagatgtaccgcgaatacagccggagacttatggatttcctgcgtacttacacgacacatatagaacaggtcagtgtggatgaatgttacatggattttacagaaatcgcagaccggttcacatctcctgtggaaggtgcgaatgaaattaaagatgaggtgtataaaaggttcggattcacggtaaatgtggggatatcttccagaaaagttctggcaaagatggcatccgactttgaaaaaccgaataaagtgcacacgctgttcccggaagaagttccggtgaaaatgtggccgctgccaatcggagagttatttatggcaggccgttccagtgtagagacgatgaagaagctggaaatctatacgattggagatctggcgaatacagatccggcgattctggaattacatctgaaaagtcatggaagaaagttatgggaatttgccaacgggctcgatgattcggaagtagaaagcgtccgggcagaagcaaaaggagtcggtaattctacgacactgccaaaagatctgacaacagaggaagaggcattgccggtgttaaaagatctggctgcaagcgtgggacgacgattgcgaaaagccgggcagaaagccggaatggtcagcgtggagatcaagtatcacacttttaatcaggtgtcccatcagatgcagatggagaaagcgtcgaaccaggatcaggatatttaccggagcgctattgaattattccgtgaattgtggaacggagaacctatcagacttcttggaatccggacgtctaaattatcggaagaaagcgaaccggagcagttgagtctgttcgatatgaagttcgaatccgaagagacgaggaagaaaaagaagaatctgaaagaggcgttgaagaaattagaaggaaaatatggggacgggattgtaaaaaaaggatggtaacaattccgatacgtcattaaaaatgtatgaaaaagacgaaaacaagtccttaaaaatattgtaatacaataatattaccgcatgaaaaatgttgatgaagaattgaaagaatggaaggacatccattattccgttatataatattgacagaattaaagagtatctggaacaatagttgttgacagccataatgaaatttgctatagttatagccataagagcagttgcgaattatatttacatataatttgtggctgcctttttgtgttgttatgagatgtaagtccgcagaaagtataaaataaatctaggaggaatggaaatgaaaaatgtaaattggaaagaattattcatagatattatcattgatatcgtagcaggtatgatcatcgcagttggtatttacaactttgcgctgaatgcagatttcccggtagctggattttccggtatcgcgatcattctgtatcacttattcgggttgccggtcggtgccggaaccatcatcttgaacgtacctgttgcaatcttctgttataaatttttaggaaaagaatttttcttaaagtccatgaaatcgatgatcatttcatcattactgatggactacgtagcaccgctgttcccggtttatgacggaagcagactgctggcagctctgtgtatgggggtattatgcggaatcggatatgccatgatcttcatgagaggttcttcaacaggcggacaggatttcatcagcgtggcgatcaagaaagtcaaaccacatattacgcttggaattataacatttgtccttgatatctgcacgatcattcttggaacagcactggtattcaaggatatagacggtctgatctatggtgtcgttgttacttatctgatggcaatggtaatggacagaatcatgtacggtatcgatgaaggtaagatgaccctgatcgtaaccgacaaaggtgctgagattgcagaacagatcgacgcttactcaggaagaggatcaacaatattaaaaggaatcggaagctactctaagaaagacaaagatgtcgtaatgtgcgcctgcaataacaagcagatgtataccattaagaagatggtacataccatcgatccgaaagcatttactattatcgtagaatcgaacgaagtagtaggagaaggattcaaggaagaacttccggatattgaactgtaaaataagacagtaaaaaattagaagagacataaaagagtaagaagaccagccgattaccggcaggtcttcttgctttaaaaagaaaatctttacattgcatacaatttcacaagctctgtaacaacatccacactcttatccataccctcaactgtaatatgttcgtaaggaccgtgataagcatgtccgcctgttccgagattcgggcaaggcagccccttgaagcttaactgacagccgtctgtgccgccgcggatcggaagtacaagtggtgccacatctgcattctcacacgcttttttcgcattgtcgatcaggtgcatacaggtagcaatgatctctgccatgttgcggtactgctcggaaattgtaagcgctacagtgccttcgccccatttttcattcatatctttctcgattaatttcaaagtttttttctttgcttcaaagagatctttgtcatggtctcttacaatataatgaagctcagcttccgcaacttctccggacatgctcatcagatgatagaatccttcataatcctctgttccgcgaggtgtctccatagatggaagagcattattgatctccatagcaaccagacttgcgttgatcatagtatctttggaagaaccaggatgtacgttaaatcctttgatcacgaaatccgctttgcatgcgttgaagttctcgtactggatctcgccttcggtatcaccgtccagtgtatagccgtagtcagcaccgaactgctctacgttgaagtgagaagcaccggtaccaatctcttcatccggtgtaaatgctacgcacagaggtccgtgaggaatcttttcttcctgaacgcgttcgatcattgtcatgatctctgcgattccggctttgtcatcagctccgagaacggttgtgccgtcagaagtgatcagtgtacgtcctttcagacctgccagatgcgggaagttcttaggacttaaaatagtatcacttgttccgagtctgagttcaccaccgtcataattttcagtaacaattggtttgatatcatggtcacagaagtctgatacggtatccatgtgtgcgatgaatccgatcgccggcttgtcttccaggccttcggtagccggaagctttccgtacaggtagcactggtcatccagaataacatctgtaagccccagttccttcatctccgcttccagaagtcttgcaagatcgaactggcatgcggaagatggtacagtttcgctgttttcgtcacttggtgtgcggacaacaacataattcagtaatcgttcataagctttcataagttacattccccttttctatattttcaaaatattctaactactactataacataatttttcctttgctgcatgggaaaatgatggtatacttatgatattgtaggaaaataggaggcaatcagatgaaattaacccagttactggaacgtttagaatatgaagtagtacagggagatgaccagattgaagttactgaactgatcaatgattccagaaaagtatcagaaggcagcgtatttgtatgtatcagcggagcagtgtctgatggacatacatatatagagcaggttgcagaaaaaggtgcagcagctgtcattgtagaaaaggatgtagaagcaccggaaggactgacagtaattaaagtaaaggatacccgttatgcgctggcaatgacatcggcagcatatttcggatatccggcagaaaaactgaaagtcatcggaatcacaggaaccaaaggcaagacaacaacaacatacatggtcaaatctatcctggaagaagtcggtatcagagtcggactgatcggtacgatcgaggcaatcatcggagacaagagcattccggcgaataatacaacaccggaatcttatactattcagaaatattttgcagagatggtagaagcaggatgcgaatgcgttgtcatggaagtgtcttcacagggactgaagcttgaccgtacagctggcattccgtttgagatcggaatctttacgaaccttggcgaagatcacatcggaccgaacgaacacaaagactttgacgagtataagtattgcaagagcctgttgtttaaacagagcaagatcggaatcggcaatgtggatgataaatggttcaaagacattttcaaagatgcgacatgcgaagttgagacattcggattttctgataaagcagatatccgtgccacagatgtaaaacatatctccagaccaggatatctgggagtacagtatcatgtggcaggtcttatggattttgacgtagagattgatattccgggagatttcagcgtatataactcactgacagcaatcgcagtatgcagacattttggtgtgccggtagaagatatcaagaaggctctgaaagttgcaagagttaaaggccgtattgagatgatcaaggtatctgacgacttcacattgatgattgactatgcacacaatgcgatggcactggaaagtcttcttgatacattaagagactatcatccggaaagaatcgtgaccgtattcggctgcggtggcaacagatctaagacaagacgttatgagatgggcgaagtatccggtaaattatcggactttacgatcatcacatcggacaacccgagatttgaagagccgcaggcaatcattgatgatattgtagtcggtatgaaaaagacagatggtaaatatatcaccatctgtgacagaaaagaagcaattaaatatgcaatcgaacatggccggccgggagatgtcattatcctggcaggaaaaggacatgagacatatcaggaaatcaagggtgtcaagtatgatatggatgaacgtgttctgattaaggaagtattagaggaattaaagaaatagatgtacgctgatattatcatcgatattacgcatgaaaaattagataaagtctttcaataccgcatcccctctcatctggaggggatgcttaaggttggaacagaagttgtggttccgtttggtaaaggaaataaagaaatcaacggctatgtgacaggattctctgagcgtgcggagtatgcaccggagaagatcaaggagatcttaaggattgccgaagaaagtgtagcgatcgagagcagactggttgcattggcagcctggatgaaagagtcttatggcggaacaatgatccaggcgctgaagaccgtccttcctatcaagaagaaggaacgtgcgaaagaaaagcagaaggtaaggttgcttttgacagagtcagaaggaaaagaaaagctggagctgtacctgcataagaaccagagagcgcgtgcaagacttctggcagcgcttctggatcagccggaacaggactatgattttctgatccataagctgaatctgacaagaagtgtgataaaggcactggaagaacaaaaagttcttatactggaatcggaacaggtataccgtaatccggtaatctgtcagcagaaagagcaaaaagagatcatttatacagaagaacagcggacggcaatccagacattttcaagggattatgaacagggacttcgtaagacctatctgttatatggtgtgactggaagcggtaagacggaagtatatatggagatgatcgccaaagtcttaagtgaaggcagacaggcgattgtactgattccggagatcgcactgacatatcagacggtgatgcggttttatacaagattcggagaacgtgtctctattctgaattccagaatgtcccagggagaacgctatgatcagatggaacgtgtgaaaaaaggtgaggttgatatcatgatcggtccgagatctgcacttttcaccccatttgagaaactgggactgatcgtgattgatgaggaacatgaaccgacttataagagcgaacaggtaccgagatttcatgcaagagagacagcaatcgagcgggcacggatggaaggcgccagtgtggtactgggttcggcaactccctcactggaagcattttatgcatgtgaatgcggaagatatcagatgttacggcttaagatgcgtaccgggaaacaggaacttccgcaggtatatgtggcagatatgcgggaagaattaaagcatgggaaccggtcaatcttaagtgaccgactcgaagaattgatgcaggatcgtctggataagaaggagcagatgatgcttttccttaaccggaggggatatgcaggttttgtttcttgcagagcctgtggatatgtagtaaaatgtcctcactgtgatgtgtctttgtcggtacacagaggtggtaagatggtctgtcattactgtggctatgagacacagaccgttcgcaattgtccatcttgcggttcaacgtatatcggtggtttcagggcaggaacacagcagattgaagaaatagtgaagcgcaagtttccgcaggcaagggttcttaggatggatatggataccacaaaaaacaaaggagggcatgagaagatcctgtcgaagtttgcagatgaagaagcagacattatgatcggaacacagatgatcgtaaaaggacatgattttccgaatgtgactttggttggggttctggcagcagatatgtctctgtattcggatgattaccgttcgggggaacgtacgtttcagctgctgacacaggcggcagggcgtgcaggacggggaagaagtcccggggaagtagtgatacagacttacagtccggagcattacagtatacaaatggctgcaagacaggattatgaaggcttttatgaaaaagaaatgaactaccgggatctgatgggatatccgcctgcgtcacaactgatggcagttttgatgacaggagctgatgaggtcaggcttgcaacagcagcagaatatctgaagaaatacgcagtcagggtaaacacaggtgaagagatacaggtgataggaccggcaagtccgtcagtcgggaaagtgaatgatgtataccggaaggttctatatctgaaaagcagagaatataaggaacttgtgtggatcaaaaatcatatggaacgttatatagagatcaacagaggatttgcggacatgagaatacagtttgattttaatccgatgaatattttttaaaagtattttatgaattaagaaatagataagtaatagtgataaaggagagacaaaagagatggcacttagaaaaatcagggaatttggtgatgaagttctgaacaaagaatgcaaagaagtaacaaagatgacaatccgtacaaaagtactgatcaatgatatgctggatacaatgtatgaggcaatgggagtaggtttggcggcaccacaggttggaatcctgaagcgcatcgtagttattgatatcggagaaggtccgatcatcctgatcaatccggaaatcatagagacatccggagaacagacaggcgaagaaggatgtttaagccttcccggaaaagcaggaactgttacaagaccgaattacgcaaaggtaaaagcattgaatgaagatatggaagaagtaatcttagaaggagaaggacttcttgcaagagcattttgtcatgagatcgatcatctggatggtaaattatataccagactggtagaaggcgaagtacatgacgtaaattatgaggaggaagagtaacatgaaggtaatattcatgggaaccccggatttttcggtcggtacgctggaagcactgatcggggccgggcatgaagttgtacttgtagtcacacagccggataagccgaaaggacgtggcggcaagatgcagtatacaccggttaaagaggcagccgtggcacatgggattccggtttttcagccggtgaagatcagagagccggaagccgtagaagagcttcgcaaatataatgctgatatcatggtagtcattgcatttggccagatccttccgaaggagattcttgatatgacgccttacggatgtatcaatgtacacgcatctttattgccaagctaccgtggtgctgcaccgatccagtgggcggtcatcaacggagataaagtgtccggtgtaacgactatgcagatgaatgaggggttggataccggagatatgatcatgaagacagaagttcctttgtcggaagatgaaacaggaggaagtcttcatgacaagctggcagaggctggcgcaaaactctgcgttgagacgttaaaggcactggaagataagacagcaacctgggaagtgcagggagaaagtccgacagcatatgcgaagatgctggataagaagcttggagatatcgactggagcagatctgcaaagtcaatcgaatgtctgatccgtggattgaatccatggccgagtgcttacacggactggaacggtaaagttatgaaaatatgggaagccggggtactggacgagaacacagatgcaaaaccgggaacaatcgtgaaagtagaaaaagacagtttctccgtacagacaggagatgggcttctgaaagttcttgcacttcaaatcccgggaaagaagagaatggaagcggacgctttcttacgcggttatcagatcgaaacaggatgtgaactttcttcacaaatgattaagaattgttaaaaatgtatgaaaagctgctattagggtaaattttcgtatataatgcaggtcatagaaagcaaggaggctgataatgatgtattatccaatgtattttgatccaacgtatatattagtgctgattggtgtcgtgatctgcctgatcgcatcagcgaagatgaattccacattcagcagatattccagagtaaggaatcattccggtatgacaggaagggatgcggcagaacagattcttcacagagaaggcctgtatgatgtgcggatcgagcacatttccggtaatctgaccgaccattatgacccgagaaccagaacattgagactttcggatgcaacctataattccacatcggtagctgcacttggagtagcagcacatgaatgcggacacgcggtacagcatgcgaccggatatgtaccgttgaagttaagaagcagtctggtaccggtagcaaatttcggaagttctatcgcatggccgctgatcattcttggatttttcttcaacagcagtacaacctctgtgttgtttatcaatctcggaattcttgcattttcgcttgcagtgttattccagattgtgacattaccggtggaatttgatgcgtcacacagggcattgaagatccttggtaatacaggcatgttgtatgaggatgaagtcagagataccagaaaggtgctgacagcggcggcacttacttatgtagccggagcagcatctgcaattctgcagcttctgcgtatactgcttctgactggaaatcgaagaaacgattaattaacgaaagggaaggggatataagccgcttccctgattgtatatctatggaaagaggaggggacgtatgcaggcgtctgtaaatgaaagagaattagtgctggacatgctgcttcagattacaagagacggtgagtacagccatatcgtgataaagaatgttctggataaatatcaatatctggacaaacgggaacgcgcatttattacaagagtagtaaatggaacactggagcgtatgattgagatcgattatattatcaatcagttttccaaagtaaaagtaaataagatgaaacctgtgatccgcacgattttaagaagttcggtgtatcagatgaaatatatggacagcgtaccagattcggcaatctgtaatgaagcagtaaaacttgcgggaaaaagagggtttgtgaacctgaagggatttgtcaatggagtacttcgtaatatcggcagaaatctggacaagatcagctatccggatgagaaagatcaagaggccttcatttccataaagtattcattgccggaatggatggtaaagcagtggctgaaagtatatgatgaagagacggtaaagatgatcggaaaagcatttctggaagaaaagccgctgacagtccggtttgatgaacataagatcaaaaaagcagagctgatctcaattttggaaaaagaaggtgtgacggcaggggaagtgccagagatcccatgtgcactgtatctgtccggatatgatcatctgtctgcacttccaagcttttgtgagggactttaccaggtacaagacttaagttctatgcaggtagcattatggtcggaagtgaaagcaggagaccaggtgctggatgtgtgtgccgcaccgggaggaaaggcgatacatattgcagaacttctgaacggaaccggtcatgtggaagcgagagatctgacagagtataaggtggcgctgatcagggataatattgaaagaagcggtcttacaaatattaatgcagtatgtcaggatgctgcaatatacgatccacataagaaagaaacggccgatattgtaattgcagatcttccgtgttccgggcttggtgtacttggaaagaagccggatctgcgctataagatgaatgaaaagacagaagcagatctggtggagttacaaaagaagatcctgtcggtagtaaaggattatgtaaagtcaggtggaaagcttttatatagtacctgtacgatacacagagaagagaatgaggggaatgtggagtggtttctgaaagaatatccggagtttgaactggtgaaagaaaaacagatgattccgggaagagatgcgggagacggattctacatagcaatattaaaaagggtgaatcatgaataagaaagatatatgttcctacaattatgatgaattaaaagaagagatgcttgcaatcggagaaaaggcattccggagcaaacaaatctatgaatggcttcatgtaaagctggcagatgattttgatgagatgacaaatctgtccaaagggctgcgtgagaagttgaaagaaaactatgagatccggaaagtgaagatgatcgatcatcagatatcgaaagtggatccgactgagaagttcctgtttgaactggaagacggtaatatggtagaaagtgttctgatgaaatataattacggcaattctgtgtgtatctcttcgcaggccggatgccgtatggggtgcaggttctgtgcatcaacgatcggaggactcgtcaggagtctggagacatcggagatgctccgtcagatctatcatattcagaagattacagaagaaagaatttccaatgtggtggttatgggaaccggagaaccgttggacaattatgataatttcataaaattcatccatatgctgagtgatgaacacgggcttcatatcagccagagaaatattacagcatctacctgcgggattgtcccgaatatgagaagacttgctgaagagggactgcagatcacactggctctgtcactccatggatccagtcaggaaaaacgtaagaagctgatgccggtagcaaataaatatgaattgtctgatgtactggatgcctgtgactattattttgataagacaggaagaagaattaccttcgaatacagtctggtggcaggagtcaatgaccagccggatgatatcagagaactgacggcgattttaaaacgaagaaactgccatctgaacctgatcccggtgaatccgatcaaagagcgtgattttaaaaagccagaccgcaaaaatgccttggaatttaaaaataaacttgaaaaaaacggaattaatgttactataagaagggaaagaggctctgatatagacggagcttgtggacagctgcgccgcagacacgcagccaaaagcgagggagagacagatgaaaatatatgcaatgactgatgtaggaagaagacgtgaggtcaatcaggactatgtatacgttacagacagaccaataggaccatttccaaacctccttacggtcgccgatggaatgggcggacataaggcgggagattttgcgtccagttatacggtaaatgtattaaaagatgagttgaagaagacaccaatggataaacccgaggagattctcagaagcgtagtcagtattgcaaatcataaattaatcgaggcagcttcaagagatatcaagctggaaggtatgggaacaacactggtagcggcaactgttgttggcaatacattgtactttgccaatgtgggagacagcagactttacctgatcaatgacaagatccggcagctttccaaggatcactcgctggtagaagagatggtaagactcggcggaatcaaggcagaagaagcaagaaaccatccggataagaacattattacacgggcaatcggtgtaaaggaaaatgtggaaccggatatttatgaatatcgtctgaaaaagggtgacatcattttgatgtgtacagatggactcagcaatatggttgaggatgaagatatgttcaatattgtcaaggggtccagggatgtagtagaagctgttcagatgttgatagaaaaagcaaacagcaatggcgggagagataatataggggttatcgtagcagagccacttgctgatgaggtgagtgtatggtaaaagatggaatcgtactaggcaagagatatgctgtacttagtaagatcggtgccggtggaatggcggatgtctataagggccgggatcagatgctgaaccgttatgtggcgattaaggtattaaagaagcagtataaagaagatgaaaatttcgtaagaaaattccgctcggaggcacaggctgcagccggactgatgcatccgaatattgtgaatgtatatgatgtcggagaagaccgcggccttaattatatggtcatggaacttgtagaggggattaccttaaaagaatatatagagagaaaaggaagactgtctcacaaagagacaatcagtattgcaatccagatgtgcagtggtatcggtgcggcgcatgcatcaggaattatccaccgtgatatcaagccgcagaatattatcatttccaaggatggaaaggtaaaggttacagattttggaattgcgaaagctgtaacttcgaatacagtaagtacgaatgcaatgggatccgtgcattatacatcaccggaacaggcgagaggcggattcagtgatcagagaagtgatatctattccattggtattaccttgtttgagatggtgacagggcaggttccgtttgatggcgagacaacggtagaagttgcgatgaaacatctgcagcaggaaattacaccgccgtcggagttggttccggatattccttacagcctggaacagatcattctgaaatgtacacagaagagttctgagagaagatatgcgagtacagaagccctgattcaggatctgaagcattcactggtagatccggatggagattttgtaagaatagcgtcggcaggcggggattccgatacggttattatgacagataaagatttggatgatatccgtaacggttacgatgatgacgacgaatatgatgatgaatatgatactgcagatgtatattcgggaaaaggatataacgacagagaagatggcgacgacgaatacgatgattatgcatccgggagagattcggatgaagtaaatccgcatatgcataagctcatgaagattctgacgattgtggtaattgcgatcattgtgctgatccttgtatttacagtgggaaaggcagcgggggttttcaagtcgtttggcggaattactacagaggatgatgcagatacgtcaggaaaagttacagttccggatatccgtggtatgacagaggagcaggcaaaggctgcactgaaaaagaaagatcttggaataaaaccgattaagagaacagaatctaaaaaatataaagccggactggtctctaaacagactccggaagccggtgaaaaggtaaagaaaaatacaactatagaagttgttattagttcgggactggtaaaaagtaaaaagcaggtaccggatgtcagcggtatgaatgaaacggaagcacagaaagaactggaagatgcaggatttaaggtgacttcaagcttccggtatgatgacagtgtagcaagtggcaatgtcatcaatacgacaccttctgccggaacaaaggctgaaaagggttctacagttaccatgctggtaagtcagggtacagataagaagacggtgccggatgtaagaggtatggcagatgcaactgcacagagtacgatcaagaattatggattcaatgtaggaactgtaacatatgattacagtgacagtgtggaaaaaggaatggttatcagccagactgtaacacctggaggtaaggcggcagccggaacaaccatttcaatcacggtaagtaacggaccgaaaccggaagaaaagattgatatccaaagctttgtaggacagcaggagtcagcacttaagagctgggcatcccagaatggtctgtatacaaatgtatcggattcacagtacagcagcagttatgcaaaaggatgtatcatctccatgagtccttcttctggaaatatttccaagggaggtacgatcagctatgtggtgagcctcggagcgaaaccacaggagacgacaaatggaggaaccacaggagataacaataaccagaatgggtctaatacaaatgatggaaccacgactggccagtaaaagattatgcagggaaaaattataaaaggaattgccggattctactacgttcacgtagtagaattcggtgtttatgaatgcaaagccaaaggtgtattccggaaagaaaagatcaagcctttggtgggagacaatgtagagatagagattcttgatgaatcggaaaaaaaaggaaatatagtgaagatactgccacggcagaatgagctgatccgcccggctgtggccaatatcgatcaggcattggtagtctttgcaatcacgaagccgaatccacactttaatctgctggaccgctttcttgttatgatggaaagcaaagagattccggttgtgttatgctttaataaagaagacattgcgacagatccgcaggtgaaggaattggaatcaatctatgaatcatgcggctatccgctggtatttgtcagtgcgaaagaagaacgggggattgaaaatatacgtgaacttctgaaaggaaagacaacagcgatcgcaggtccgtccggagtgggaaaatcttcgatcattaatattctgcagccggaggcagatatggagacaggggcaatcagtacgaagattgagaggggaaagcataccaccagacattcggaattgttcgccattgatgaaaattcatatatcatggatacaccgggattcagttcgttatatgtgaatgattatgaaaaagaagatctgaagtacttctttccggaattccggaaatacgaaggaatgtgcaagtttaacggttgtgatcatgtgcatgagccggggtgtgccgtaaaggcagctctggaagaggataaaattcataaaatccgttatcagaattatatagaaatgtatgaggaattgaagaataaaaggaggtactgatgatgaactatgtattgtcaccgtcaatactggcggcagatttcaaagttttgggtcaggaaatgaagaagacagaggaaaatggggcagcgtatattcattttgacgttatggatggaatgtttgtaccaagtatatcatttggtatgccggttctggcatcaatcaatgatgcaacggagcaattcatggatgcacatctgatggtgcaggagccgatccgctatgtagaagcattccagaaggcgggagctgactatgtaacggtacatctggaggcctgtgaagacgtaaaaacgacattggataaaatccatgcatgtggcatgaaggcaggattggctgttaatccagagacagatgtaaaagagcttgttccatatctggaagacgtggagatgatcctgatcatgagcgtgcatccgggatttggcggacagaaatttattccggaatcactggataagatccgtgaggtccgtgcgatgctgaatgaaaaaaatctggagacagatattcaggtagacggaggaatctatgtggagaatgtcagagaagtattggatgcaggcgcaaatgtaattgtggccggttctgctgtgttcagaggagatgccggggaaaatactgcaaaattcatggagatattgaaaaattatgaataagaagattgtgattatcagcggtggggagctggaagaagaatttgtattatcaatccttgaaaaagaggaaaaccagtatgtgatcggtgtggacaaaggtatggagttcctttacagccatcagattctgccaaattatattgtcggagattttgacagtgtaaaaaaagagattggagattattaccgtaatgagacaaatgttccgatcagggaatttaatccggtaaaagatgcatctgatacagagattgcaatcagactggctatgacattaggggcaggtgagattctgatcctgggagcaaccggaggtcgtatcgatcacctctgggcaaatgttcagagccttgcaatcccgtttaaagccggaattaatgctgtgatcatggatcgccagaataagatccgtctgatcggaggcggggaaacccatctgaaaaaaggagaaacttacggaccgtatttttctgtgtttccgttaggcgaggaagtatttggtttcagtatcaaaggggcaaagtatccattgacgaatcatacactgataccatatgacagcctttgcgtcagcaatcagttccaggaggatgaagtgacaatcagtttcctgaatggaattgtgattctgatggaaacgaaagacagataaaactctatataaattcatgtaagtttttgaaaaaatggcctactttgtggtccattaaccttttgatcaaagctctaatgtggtaaggagaagcgcttgtatgagtgcttcttttttatagttgtaagtattataataaaaataactggtgtttaggttctgatatgattatgcaactggaattattggcgtaatatcaacaattacgtttgtgacattactaagatatttaaaatgtcctcactgtaagacaagaacctggtgcaggaaagtcatgaccaaagagtgataattaaatcatatagacaggggatggcaacagcaggttgcttttcagaacatgaatttatctatatgatatgcttatggaggtgatgactatggaaacaattataaaaagaaagctgcaataagccaacgttttttcatggcgttttgtgccttgagcagcgcgaaaggaatggatataaaaatgaatattcacaaagataagatgctatggtataatacaagttattgtattagggtttcttatgagagaagctgaaatatgggaaaagatttaaaaggcaaagaacttggcaagggaataacccaggaaagtacgggattatactcagccagatttgtagattggtttggaaagagaaaataatggcccactaaatggtccacttgcaaaaataagtatgctgaaatcaaggaatttataggaggaaataaaaaaatgaaattaggaatcgtaggattaccaaatgtaggaaagagtacactgttcaactcacttacaaaggcaggcgcagaatcagcaaactatccattctgtaccattgacccgaacgtaggagtcgtaaccgtaccggatgagagattaagtgtactgggagagatgtatcataccaagaagatcatcccggcagcaattgaattcgttgatattgccggacttgtcaaaggagcttcaaaaggagaaggtcttggaaaccagttccttgccaatatccgtgaagtagatgctattgtacacgtagtaagatgcttcgagaacagtaatattgtacacgtagacggaagcatcaacccacttcgtgacatcgagacgatcaacttagagctgatcttttctgaccttgagatcctggaaagaagaatttccaaagtttccaaagttgcaagaaatgacaaatctgcagcaaaagaacttacacttctgaacaagatcaaggcgcatctggaagatggaaagcttgcaaagacattcgaagaagcagatgacgaggaagaacaggcatggctggaaagctataatcttctgacatacaaaccggttatctatgcggcgaatgtatctgaagatgatcttgcagatgatgcggccaataacgaaggtgtacaggctgtccgtgaatatgcaaaaggtgagcagagcgaagttttcgttgtatgtgcagagattgaggcagagatttcagaactggatgatgatgaaaagaaaatgttcctggaggatcttggattagaggaatcaggtctggaaaaactgatcaaagcaagttataagctgcttggactgatcagctatctgacagcaggtgagccggaagttcgtgcatggacaatcacagaaggaacgaaggcaccacaggcagcagggaagatccactctgactttgagcgtggattcatccgtgcagaagttgtatcttacgatgatctgatcgcgtgtggaagccacacagcagcaaaagaaaaaggtctgatccgtctggaaggtaaagactatgtggtaaaagacggagatatcatgctgttccgttttaatgtataatcaggaatagatggatgaaaagaggggggctgtttcaatgcacagaaccatagatttccctaatctgggaattcatttaaaatctgtcggcgatcatatcacagtctttggattcgatatcgcatattatggaatcgtcataggaatcggaatacttgcgggacttatgatggcggtaatggaagcaaagcgtacgcatcagaacgtagaagattattatgatctggcaatatatggagttatcttttcaattatcggagcaagggcatattatgtgatcttctcctgggatatgtataaagacgatattaagagtatcattaacatccgtgagggcggtcttgccatatacggcggtgtgatcacggcaattgttgtagtatttatatttgcaaaaataaaaggattatcaccgttcctgttatttgataccggcggatttggtctgatcaccggacagatgatcggaagatgggggaacttcttcaacagagaagcatttggggaatatacgaatggactgtttgctatgagacttccggtggatgcggtaagaagttcggacatcacaacaaagatgtggaatcatgccgagacagtcaaaggagtcatgtatattcaggttcatccgacctacctgtacgaatccctgtggtgtctgatggtgctgatcatcatgctgttgtatcgcaagcataagaaattcgatggggaagtcttcctgatctatctcttggggtatggtcttggcagactctggatcgaaggacttagaaccgatcagctgttgctgccaaaagttggacttccggtctctcagctgttggcaggcacgattgtagtgatatccgctatactgatcattgcaggaagaaaaaaagcagcagcttcacaaaaatagtccggctgccgcaaacataatcgaatacagaaaaaaatcccggtatgagaaatgacaatgagctggatgctcaaaaatgtctgattcacataccgggattttttattcatattacatatcaatcttactgagtgctgcttcatcagctacaatcgtaacatcattatgtaactgaagaatagaagcaggaacttccggagtaattggtccgtataagacctcttttaagatatccgccttatcttctccgcttacaacaaccagaattttcttggcctgcatgatattcttgattcccattgtataagcctgtctcggaacatcatcttcagattcgaagaaacgcttattggcttcaattgtactttctgtcagatctacacagtgtgtctctttttcaaaagcagcacctggctcgttgaatccgatgtgtccgttgtgtccaagaccgagaagctgaaggtctacgccgccctgtttgcgaatgatctcattgtattcactgcaggctttgtcagaatctgcttccagtccgttcggaacgaaagtacgtgttttatcgatatttacatgatcgaaaagattggtgttcatgaaatatctgtagctctggtcattttccggactgagtcctttgtattcatcgaggttcacgcttgtaacctgagaaaaatcaagatcacctttcttataccattcaatcagctgtttataagtaccgaccggtgaagatccggttgcaagtccaagtacacagtttggcttcataataatctgtgcagaaatgatgtttgcggccttacggctcatatcctgatagtcttttgctttataaattaccataataaaatctctccttattctattgtttttttgtttctgaatattagtatatacattataaatgaattttcaagtaaaatagcatgaactgaaactactttcgaaactggaaagaaactacctggaattgtgcatattgcataaaaaacggattttaaaataggaaaaaacagagagaagaattgaaaaggatgaaagaagtttcaagaactgaaaaggtacttgaaaataaaatcgaacaatactatactgattgcagaacgaaggagggaacaaaaaaatgaatcagaaagttgaaaatctgaagggtaaattaattgtatcatgtcaggcattaccggatgaaccattacattcttcattcattatgggaagaatggcactggctgcaaagcagggaggtgctagtggaattcgtgcaaatacaaaagaagatatcaaggagatccggtcacaggttgaccttccggtcatcggaatcgtaaagagagattatgatgacagcgatatttacattacaccaacgatgaaagaaatcgaagaactgatggaagtaaaaccggagatcatcgctatggatgctactatttctaagagaccaggcggaaagacactggatgagttctttaaggaagtaaaagcaaaatatccggatcagttatttatggcagactgctctactgtagaagaagcactgcatgccgatgaactcggatttgattttatcggaactacgatggttggttacacagagcagagtaaaggcgataagatcgaggcaaatgatttcgaaatcttaagaaagattgttgcaaaagcaaaacacagagtgatcgcagaaggtaacatcaatacaccggaaaaagcaaaacatgtgatcgagcttggtgcatacagcgttgttgtagggtctattatcacaagaccacagctgatcacaaaatcatttgtagaagaaatggaaagataattccgcaaggaacttattaaattaaatttatataaaaagacaaagaaaaggagaaagaaacaatgagaaatcttgaaaagtacaaaggcgtgatcccagcattctatgcatgttatgacaacgaaggcaatgtaagtccggaaggcgtacaggcactgacaaagtacttcgtagaaaaaggtgtaaaaggtgtatacgttaacggttcatcaggagaatgtatctaccagagcgtagaagaccgtaagatcatccttgagaacgttatgaaagcagcagaaggaaagcttacagtaatcgcacacgttgcatgcaacaacacaaaagacagccaggagcttgcaagacatgcagaaagccttggagttgatgcaatcgcagcaatcccaccgatctacttccatctgccagagtatgcaatcgctcagtactggaatgatatcagcgcagcagcaccaaatacagacttcgtaatctacaacattccacagcttgcaggagtagctcttacacagggacttttcgcagagatgagaaagaatcctaacgtaattggtgttaagaactcttctatgccggtacaggatatccagatgttcaaacaggcagcaggccctgactacattatcttcaacggaccagatgagcagttcatgagtggacgtgtcatcggagctgaaggagcaatcggtggtacatacggagttatgccggaattatatctgaaattagacgagtatgtaagagccggaaagatggaagaagcaagagaaatccagtatgcttgtgatgagattatctataagatgtgctctgcacacggaaatatgtacgcagtgatcaaagctatgttaaagatcaacgaaggtctggaacttggcggagtaagagagccactgccagcattagtagaagaagacatggctatcgttgaagaagcagctaagatggttcgcgacgcaaaagctaaatatctgtaagattatataaaaaatacgtgaaagaaaaatatctgtaaggagagagacgatgcaagggtttaccgtagtagatttagtcattttagtaatttatctcgcggctgtactgttcgccggccttcatttcgcaaagaaagaaatgaaaggaaaagagtattttaaaggagacggaactgtaccgtggtgggtaacttccgtatcaattttcgcaacactgttaagtccgatttcattcctgtcattagcaggaaactcatacgcaggaacatggatcatgtggttcgcacagcttggtatgctgttagctatcccgatcacgattaaattcttcctgccaatctacagcaaactggatattgatacagcatatcattatctggaactgagattcggaagcaaaggacttcgtgtacttggagctgtaatgttcatcatttaccagatcggacgtatgtcaatcatcatgtaccttccatgtatggtacttggaagtctgactggaatcagcgtaaacttactgatcattatcatgggtatcattgctattatttactcatacacaggaggtctgaaatccgtactttggacagacttcatccagggatctgtacttctgatcggtgttacatttgcactgatcttcctgttagcacacttagatggtggatttggagcaatcgcacatgcactgacaacagagcataagttccttgctgtagatcagccgatcttcaatgctaacatttttaaagacagcgtattcatcatgatcgttggtgccggattcaatacaatggcatcttacgtatcaagccaggatattgtacagcgttttacaacaacaactgatacaaagaaactgaacaaaatgatgcttgcaaacggaggattatcaatcttcatcgcaacagtattctacctgatcggtacaggattatacgtattctatcagcagaatacacttccaccggcagcagctcaggaccagatcttcgcatcttacatcgcatttgagcttccggttggtgtaacaggacttctgttagcagctatttatgcagcagcacagtctacactttctacaggtctgaactctgtagcatcaagctggacactggatatccaggcaagactttctaagaaagaattaagctttgagaaacagacaaagatcggacagtatgtatctctgatcgttggtatcttcgcaatcgtagttgctatggtactggctaacggcggagtaaaatctgcatacgaatggttcaatggattcatgggactggtacttggtatcctgatcggaacatttatccttggagcatttacaaaggttgccaatacatttggtgcagtatgtgcattcatcgttgcatcaggcgtaatggtatacatcaaatacttcgtacctgctgatcacgtatcaatctggtcatactcaatcatctcaattgtagtatcactggtaattggtatcccggcaagtatcatctggagaaaggcaaaaggagacaattccgtacctgctcctaacacaaccatttacaaaaactaagaaggagtgacgattttcgtgatttttggaaatatcaataatttatcagaattcccattcttagaagaacaggtaaaagagtgctttgaatatgcaaagacacacgaccttgcatcttatgaaaagggaagtcatgagatcgatggtgacagactgtttgtcaatatcgtagaatatacaacaacaacaccggaagaacgtttctgggaagcacataaaaattatctggacgtccatgtaatgatccatggaaatgaacagatcgatctgaacttcattcagaatatggaattaaaagattttgtggaaaaagatgattttcttccgatggatggggaaaagaattcttccgtagtcctgacagatggagatttcctgatctgttatccgagtgacggacacagaacagcggttcaggttcaggaaccggaaaccattaaaaaggcaatatttaaagtaaagatttaatcagaaaaagtcgagggcaaaccataaaagaacggtttgcccttttctggctgaacgagtataatgaaggaaagtgaaagaggcaaagcagagatgaaaaaatatattagtattgatatcggcggcacagcaatcaaatatggtattgtgagcgaagatgcagaagtattgttaaagaaagaaatgaagacagaagcgcagaaaggcggaccggcgatccttgataaagtcatcggtatcgtagaagcattaaaagaagaggcagacgcaggtgtgtgtatttctacagccggtatggttgacattgagaaaggggaaatcttctattcggcaccgctgatcccgaattatatcggaacggcattcaaaaagacggtagaagaacgattcggaattccgtgtgaagtggaaaatgatgtgaattgtgcgggacttgctgagtacaaagcaggagcggcggcaggaagtaaggcggctgtgatgctgacgatcggaaccggaatcggcggctgtattttgctgaatggcgaggtgttccacggattcagtaacagcgcatgtgaagtcggatatatgcatatggatgacagcgatttccagacactcggagcagccagtattctgacgaagaaggttgctgcatggaagggagaaccggcagaaaattggagcggatatcgcatttttgaagaggcaaaaaaaggtgataagatctgtaaccgtgcaattgatgagatgacggatgtacttgggaaaggtattgccaatatctgctatgtagtgaatccggaagttgtcgtacttggcggcggaatcatggcgcaggaagcattcctgaaggacaagattgaaaaagcagtggaaaaatacctggtgtccagcatgtgggagcatacaagtatcgcatttgccaaaaaccagaacaatgccggtatgttaggcgcattctatcattttcagggaagacatgcatagtctggagttataaaataaagaagcaggaatagtaagatatggaatattatgtaaaatcagtcgttccgatcatagaatcgaattatgataaatttacgacagtggaacggaatatcgcagatttttttatacagaacagaaagaaagtggatttttcatcaaaatctatttccgagagactcttcgtatcagaagcgtcgttatccagatttgcgaagaaatgcggatatcgcggatacagagaattcatctatcagtatgaagagacatttgtagaaaagcaggaatccattaccggtaatacgcgaatgatcctgaatgcgtatcaggaacttctgaataagacttacagtctggtggatgaggcgcagattgcaaggatcagcagatatctgaatcaggcggagcgtgtgttcgtgtgcggaaccggaagttccggtctggcagcaagagagatggaactgcgttttatgcgaatcggtgtggatattgattcgctggtagaaagagatatgatgcgtatgcaggcggtattccaggacagaagaagcctcgtattcggaatcagtatcagcggatccaaggaagaggtcttgtttcttctgaaagaagcatatcggaaaggtgcgaaaacgattctttttacggcgaacaaccggggtggcttcgagcagttctgcacagaagttgttctgattccatcactcagacacctgaatcatgggaatgtaatctcaccgcagttcccgattctggtcatgcttgatattatctattcttactatttggaacaggataaatatgaaaaagaagttctgcatgataatacactgcgtgcactggaagaaggagaagggatgcacaggagtttttagaatgttacaataaaatggaggatatataaaatgataatcaaaaatgtaattgtctatacagaagacaaaaaatttacagcaggcggcattgttgttcacgatgacaaaatcgaaagcatttacacgacagaaaacgtaccggatatgctgggggaagaagtcattgacggacagggggcatacgcaattcctggactgatcgatctgcatttccacgggtgtatgggagatgacttctgtgataacagtaaagaggctattgaaaatattgcaaaatatgaggcttctgtgggtgttacaacaatcgcaccggcaacgatgacacttccggtagaagaactggaagatatcttaagaacagcagcagaatacaaaaaagagcagaatccgaagggagcggatcttgtaggcgtgaacatggaaggtccgttcatcagcccggtgaaaaaaggagcgcaggatgaaagaaatatcatgccttgtgatacggacatttgtcagagattccttgatgcttcggaaggacttgtgaagtttgtaggacttgcgccggaagaaagcgaggacgcagttgcatttgtagaagcaatgaaagataaagtgaacatttcgcttgcacataccaatgcggattatgcacatgcgaaagcagcattcgatgccggagcaaatcatgccgtacatctctttaatgcgatgcctgcattcactcaccgtgaaccgggtgttgtaggagcagtgtccgacagtgcacatgtaatggcagagattatctgtgacggtgtacatatccacccatcgatggtgagagcagcgttcaagatgatgggagcagaccgtatgatcctgatcagcgacagtatgcgtgcgaccggaatgccggacggacagtatacacttggtggattggatgtaaaagtagtcggtaatcatgcaacactggtatctgatggggcacttgcaggatctgttacaaaccttgcagactgtatgcgtacggtagttaagaagatggggatcccgcttgagacagctattgcatgtgcaaccatcaatccggccaagagtcttggaattgaagatacatatggttcgatcgcaccgggaaagaaagcgaatatcgtattattagacgataatttggagcttaagatggtaattaaggacggacaggaattataattcatgcaatttatagtataaggccatttggtgttaaggacagatgaaaaagattatatttttaggtgacagtattacagatgccagtcattgctttttagaaaatccactgggaaacggttatgtgaatatggtggctaagaagttgaataacagtgacggcggaaggaagaagtatgacattatgaatcgaggacatgatggattcacgattcatggagtgaaacgtatattggagaaggaatgcattttaaaacgaccggatgtcgtaagcattctgataggatgcaatgacgtcggagttatgatgaatacaggaaagagtctggaagaacagcagtttgaagcctgttatgaagccattgtgaaagaaattacagagcaatcggatgcaaagcttatctgtatgtcgccatttatagtgccatatcccggaatgtatgaaaactggattccgggaataaaacagacagaaagaatcgaaaaaaagattgcagaaaaatatcatgcggactttcttacgcttcaggacatgataatattgaaagcagaaaaagcaggatatgagagtgttacaacggatggtattcatctgacggaatatggaaatgaaataattgcaggagcatggctgcaactttttgaaaaaataaaagatggagattaaaaatcatcttgacaaagttcatcaaatcagttagtctttaacacagacaggaaaataatatacagatatcacaaaggcttggaaaagaagaagtagtgattcacacacccatacagaaagctgccggttgatgagaggcgcatgaaagagtgaagaatgaatacatcttggagctgcacaccgaaatgatacacgataagaattatgagtgttttcgaaagtaggctgtgacgtcgggcacacgttatagtgcaaaggtctgtgaacacgcagactgaatgaggctgaatacgcaggtaatcagcgaaataaggtggtaccacggttaatatcgtccttatccaatattgattggataaggactttttttgaccagttatgtgggaaaatcgctttctgaaaagcatatttgcaagctgaagtaaagtgagaattctgtaaatcattaacataataaaaggagaataaaaatgggaatttatgaagaactcgttgcaagaggtctgatcgcacaggtaacagacgaagacaggatcaaagacttggtcaacaatggaaaggctacattctacatcggatttgacccgacggcagacagccttcacgtaggacatttcatggcactgtgcctgatgaaacgtctgcaggaagcaggaaacaaaccaatcgcactgatcggtggaggaacagctatgatcggtgatccatccggaagaacagatatgcgtcagatgatgacaccggagacaatccagcacaactgtgactgctttaagaaacagatgagtcgatttatcgatttctcagatggaaaagcattgatggttaataacgctgactggctgatgggactgaactacatcgaagtattacgtgaagtcggagcacatttctccgttaaccgtatgctgacagcagagtgctacaagcagagaatggaaaaaggactcagctttcttgagttcaactacatgatcatgcaggcatatgacttctatgagttataccagaaatacggatgtaaccttgagtttggcggggacgaccagtggagcaacatgcttgcaggtacagaactgatccgtcgtaaactcggaaaagacgcttctgccatgacgatcacactgcttctgaactcagaaggtaaaaagatgggtaagacacagagtggtgctgtatggcttgatccgaacaagacatctccattcgaattctatcagtactggagaaatgtcgcagatgcagatgtattaaaatgtatccgtatgctgacattccttccgttagaagagatcgacaagatggacagctgggaaggagcacagcttaacacagcaaaagagattcttgcattcgaactcacaaaactggttcacggcgaagaagaagctcagaaagcacaggaggcagcaaaagcattattctcaacaggtgcagcagcagatatgccaaagacagaactgacagaagaagaccttacagatggcaatatcgatatcctgacgatgttagtaaaatcaggactgacagcttccaagtcagaagcacgccgtgcagtgcagcagggcggagtatctgtagatggtgagaaggttacagatgtattccagacatttgcaggagaagcattaagcggagacggcgtagtcctgaaaaaaggaaagaaaaatttccgcaaagtgttagtaaagtagtataattataaaagaatatagtaaaaatgcaggcagtgaatattcactgtctgtaattctaaaagcaaagatgtactcttggtactgtttcatacttaattttgtgagagtacataaagacgataaggaggatatggaaatggcatttaaagaagtagcaattgaaagtctggaattcaacccattcacaaagatttcaaaagagtggatgctggtaacagcaggagatgaaaaaaagagtaacaccatgacagcaagctggggtggtgtcggaatcatgtggggaaagaatatcgcaactgcatatatccgcccacagagatacacgaagaaattcatggatgagaccggtatgtacacgctttctttcctgtcagaagattacagaaaagcattaagcgtatgcggatctgtatcaggaaaagacgtagaagataaatggaaagaagcaggccttcatccatatgcggtagacggaacaactgcagttgaagaagcagatctgatcttcgtatgcaagactcagtatacacaggatatgaaaccggaatgtttcgatgttaaggaaaatgatgagaaatggtatccggataaagattatcatacgatgtatatgggcgagatcgtgaaagtattgaaaagagtatagccaatcatgcaaaagaaaattgatttggtaaacggacctgtattatcatctcttaccagactggctgtcccgatcatggcgacgtcattgatccagatggcgtacaatatgaccgacatgatctggatcggccgtatcggaagttcggcggtagcgtctgttggggcagcaggaatgtatatgtggctttccaacggacttgccgcgcttgcaaaaatgggagggcaggttaatgtcggacatgcacttggggcatctaatagtgaagaggctgcagaatatgcatccaacgcgttacagcttacgttgactttggggattatttatggacttgtctgtatattaggggcaaaaccactgattcattttttccatctgaatcaggcacaggtgatccgggatgccatatattatcttgaaattacttgcggtcttgtcttgttttcctttttaaatcagacgtataccggattatttacggcaatcggtaacagcaggccggtatttctggcaacaacgaccggactggttgttaatatcatcctggatccggttctgatttttggaatcggaccatttccggttcttcgagtgacaggtgcagcaattgctacggtaatcgcgcagatgatcgttacagttatgttttttatatttgcgatgaaggataccgtactttttcaatatgtaagatatctgaagaagccggatctgcatcatctgaaaggaattgtcagaatcggttttccaacgtctgttcagagtatgctgtttaccggaatatcgatgatcattgcacgtctggtcgcgggatatggagatgcggcggtggctgtccagaaagttggttcacagatagaatcaatttcgtggatgacagcggatggttttgcagcagcggtgaattcatttacatcgcagaaccatggtgcaggtaagaagagacggatctatcagggatatgtcagcgcattaaaagtagtatttgtatgggggattttctgtacgctattattaatatgctgtccggctccggtattccggatttttattacagaaaaagatgtaattccgcttggagtggattatcttcggatccttggtgtatcgcagctttttatgagtcttgagattacgacggcaggtgcattttcggggtatggaaagaccgtgccgccatctgtgatcagtattgtatttacggcgctcaggattccgcttgcgctgatactggttcatacaacacttgcgctgaacgggatctggtggagtattacgatttcgagtattctgaaaggtgtgctgctgtttgtatggttctacatattcatgcggggagagaaaattatatataacaggaaataacctgccagcggcaggtctttcagatagggaagtatgcaagaggcactgccagtggcagtgtcttttgtgtctttaaagaacgaaatgtggtataatagaacagtgagtgatctgccggagcatagtttatggcagacacagaaaggatggatgagtaatgtgggcttacaatagtattttttatcagatttatccaatcggattctgtggggcaccggtgcacaatgacggcgtgtgtgttcctcgcatccgcaaacttatggactggtctgagtatcttcagacattaggagtagattcaattctgttaaatccgatctttgaatcggacaatcatggatatgatacaagagattttaagaagatcgactgcagactcggtacaaatgaagattttaaagaggtctgtgaagatctgcataaacataatgtaaagattgtgctggacggtgtattcaatcatgtcggacgaggcttctgggcatttaaggatgtgcaggagaagaaatgggattccccatacaaggactggttccacatcagttttgacggaaacagctgttacgatgacggtttctggtatgaaggatgggaaggtcattttgaactggtcaaattaaatcttcagaatccggcagtcgttgattacctgatggaatgtgtaaaatactggatcgatgaattcgatatcgatggtctgcgtctggatgtagcgtacagtctggatcataattttatgagacggctccgctcttatacacaggaattaaaaccggactttgcgctgatcggggaagtattattcggagattataatatcattgtcaatgatgagatgcttcacagttgtacgaactatgagtgttacaagggattatattccagctttaattgcatgaatatgttcgagatcgcacattccctgcatcgtcagttcggaagcgaccagtggtgtatttacagagggaagcatctgatgacattcgtggataatcatgatgttaccagactggcaagtatcctgaccaataaaaagcatattccactggcatacgggctgctcatgggtatgccgggaattccgtgcctgtattatggaagtgaatgggcagagccgggggagaaagcaccggataatgactatgcgcttcgcccttgctttgaagaaccaaagccaaatgagctgacagagtttattaagaaactgattcgtgtacgccaggaaagtgatgcactttgcaatggtgcttataagaatgtagtgatccagaatcatcagctggtattcgagcgctgctcagagaaagaacgagtgatcgttgcaatcaatgctgcggattatccatacactgccaatgcaggagaactgaatggaacggcagcagatctgctgaccggggaaacggttacgatgaatggtcagcttgaactgaaaccatatagtgtacagtatttaaaattttagtatgaaaaatgtacgggaagattctcgggaaaagtacatttgatcaacgaaaataagtaaaaatataaggaaaatatgtcaaaaaacagttgacacacacggtacagtataatataataagcaagtatgacaaaaggagaaacagtaagaggccaaagccccggaatcttgctgattctgatatattatcatgaaaatgttaatgattcacaggaggtaaaccacaatgaaaacttatatggctaatccagataagattgaaagaaaatggtatgtagttgacgcttcggaatatacattaggacgtttagcatcagaagttgctaaggttttaagaggaaagaacaaaccggagtttacaccacacgttgatacaggcgattatgtaatcgttgttaatgcagaaaagattaatgtaacaggtaagaaactgaatcagaagatttattacaatcactctgaatatgtaggtggaatgaaagagactacattagcagagatgatggctaagaaaccagagaaagttatcgaacttgctgttaaaggaatgcttccaaagggacctttaggaagatctatgatcaagaaacttcacgtatatgctggaccagagcacgcacagcaggctcagaaaccagttgaactgaaattctaagaaaggttaaaaggaggattttacaatggctactgcaaaattttacggaacaggtagaagaaaaaaatctgttgctagagtatatttagtaccaggaacaggtaaaattactatcaataaaagagatatcgatgagtatttcggacttgagacattaaaggttgttgttcgccagccattagctgcaacagacacagaaggaaaattcgatgtaatcgttaatgttaagggtggtggatacacaggacaggctggagcaatccgtcacggtgttgcaagagcacttcttgaggctgatgctgattacagaccagttcttaagaaagctggattccttacacgtgatccacgtatgaaagaacgtaagaaatacggtctcaaagcagctcgtcgcgctccgcagttcagcaagcgataatcgactgctcagactatatcaaaatggttcaaaaaccccggaaaatggtgtgctacccgtcaagtagacaaattaaataacgaaaattttttcttccccggtacagtttatgtaccgggttgtttatgcaacgctttctagtttttgttcatggaattccagtggtgtaagcaccccaagatttcgttgaactcttttgtttgtgtaataatctatgtatttctctatggcaagcattaattcttcttttgttttatactttttgccataatacatttctcgtttcattagtccccagaatccttccataggaccattatcgatacatctcgccacgcgagacatactttgtgtcattccagcagctaaaattcgccgcctaaatgctttcgaagtatactgatagcctcgatcactatgaagtagtggtgtagctcctggattcgctgccacagctttgtcaaatgtatcaaaaacaagagggttatcatttctggtgctatatacaaaagcgacaggcctccta

SEQ ID NO: 2793 - DNA, 53885 bp, Unknown
  gut microbiota DNA sequence
gtatcaaaaacggcagattgtcctgtatgaataccagcagacgagaaatgcatcccatccacgggaattcctaaaagggtacgacggtatctgtgtaacagacggttatcaggtctaccatactttagaaaaagagttggaagaactgaccattgctggatgctgggtacactgtcgtcgcagatttgatgaagccttaaagctgatcccaaaatcctatcaaaaggaatcccatgcatttcttctgatgaaacagatccaggcgatctatcgggaagaagggaaactgaatgacctttcttctgatgaacggcttaggcaacggcaggcggttatcaaaccgcttgtggatgcgttttttgcgtacctaaaaactataaatgtgtctaagaaggataaatttggtgatgctgttggctatgcgcggaatcaggaaaaatatctccgtgtatttcttacagatggagatgtcccgatcgataataatgcatccgaaagggcaatccggggtttctgtatcggaaagaagaactggcagatgatcgatacaatccatggtgccaagtcttccgcaatcatttacagtattgtagaaactgcaaaagccaataatctgaaaccttttgattatgtgcagcatctcttggaagagattccgaaacacatgaatgataaggattgttcttttctggaagatcttctgccctggtcagaaaaacttccggcagggatccgcaaagtttaaatatcggtggctgcaaagcagccgtctaaaaatgtcaaggaactcgctattttgcgtttactatccaacaaaatagagggggaatatataatgaaaaaaatattttttgaaacactaaaacataagtttggtcattatttactggttatattatgtggtatactaatggtttcgacaatatatgtatcatatgcatttagtgacagtattgaaggaattatacatggacaaaattctggcatagtggaagaaatgtacacttttattaattttcaagagacatatattctcttgtttatattaatggtactggttattatttcgtacatacaaaaaaaatcctatgattatgttctgcttgatacgatgggattaaagaaaaagcatagatatatgtttattggatttgaatatgcagggattatattttcctcggtaactggtggcttgattttaggaaaaatattagcagagtgtgcaaaaacagtattacaaaatatcttttataatacaattactacagaggttaattatggatttattgcactgcggaatacattggtgatttcatgtgaagttttcggcatcctattcattgtttttgatgaattgatagcatgtctgggaatggatgcattgttgactgttggaaaaaagaacgggaaaccactgaagaagagaccgaaaactttactgattgggatatttttgatcttgattggccttataagtctgttgttttattggggaaagatatcccaaagtattccgactgtatttttgaatgcgggcatgtgcctgcttatgattagtttggcaggatactatttcgttcggttgaataaaaaagagaagaagtattataaacgaattacatggttggaaaactggtatcatagattcttttataatataaatatgtcatttgtcgttgcagcatttcttgtaattattatgacggatttttctataaaattattggataaccttccgattaccgaaccgaagaattatccgtttgacttggtatggatggcaaatacggatgacgaagaatttttgaatcatttaacagatgatgaaggggttgaactgagaaaagtaccatgtgctagagtgacaacgacagatattgctgaacatatggggattccggcatcaacttatgaaaaatggactggaaaatcgctagatttgaaagacaatgaaatatttgttgtatatcaaagggagaggtttgaacgaaacaaagtcggaattggttacaatacaaaaaatccattaatttatataggaaaagtaagggctgatttatggttgtatataaaaggcgtagcagcacctaaagtacagtattttacagaaaaattcaaggttgtcggaacagaagacagaattctaacaggtgtgtttggaagtgaaacatgtgaacatattattgtattctcagacgaatattatcagaagaactgtgtgaaagcagatggggcgaatatggctgttatgatgaacatacctgaaaattatgataaagttgtcgaagaaataaaagcgtatgcccaagatcattcccaggtaaattattttgacgcggataatgggaatctgatttacgagaagaaagagctgctgttagaaagaagtaaaacaaagcttttatacgtggcttcagcagcgggaaatattatcattatgcttttgtgtggaatatttgtattgagtataaaaatggagtgtgattttccggagacagaatggaaataccgattttatattcaatcaggaatgtcttctgctaaagtcagaaagggaatcataaaagagtgtctgctatcaggaggactgcctgttatatgtggcacaattatttcaattttgtattgtagtatgcttttgtatgcgaaacatttacagattgagtgggttcatagatactttaaaggaataattttgattgttggtgctatatggttgctttttgctgtttttatttttatatttgcttatagaaatattagaaaaatagagggagatagtggaaatggaaaaaagtaaaaaaattttaaaagtggaaaatttaaaaaaggcatattactcaacttcccgaacaggagaaatcattacttatcctgttttaaataatgtttcatttgagatagaagaaggtgaatttgtagggattatgggacgttctggttgtggaaaaactacattattaaaggcagtgggaatgttagacaaaccagatgacggaacaatatattacaaagataaagatacaaaagatatataccgggctgaactggcaagacttagaagaacagagattgcttttgtatttcaggattattatcttatggatagtctgtctataaaagaaaatattatgcttccacttattttggatgaggcagatgttcaggagagtaagaaaaaatgtgaagaaatggctgagaagtttgcaattgcggatttattggataaaaaaccatatgaattatcaggaggagaaaaacaaagaactgcgatttgccgcgcattaatctacaatcccgatttaattttggcggacgaaccaacaggaaatctggactctgcctcatcagaggttgtaatacatactttagaagagattaataagaagatggggaaaacaattctgcttgtaacacatgatcctattatagcaagttcatgtgatagaattattttcttaaaagatggaaaagtaaaggaagacctgaagagaaccggagataaggaacaattttataatgaaataattacaaactggtgctgatttgcaagtgcttatataaaataaaccttgttcatgaatcgtattatacctgtatatgatatttcgttcattcaggaatatttattttaaactattctgacaattcaaatttttatttattaatttaattttagtgttacatttttaacaaagcttttggcaaaaatatgtaatacttaatgcttatcaatgatttttaatcgttattaaataagcgaaatcttttgaaacagaaaagaatttttgcagattttaaaatttttaaaactaagatattttgttacaacagaaaagcaacaaaaatacaactaaaagtagttaagataagagatattttaacaaacatcaaaaagctataaatcggaaaaaaatcttctaaatatacatttgttatatagaagtaacaaacagatagaagaaatacactataatattaaaaaaatcacaattttatcgccccaaagacttgaaaaagaaatttgcgagtagtacaattgtgttaaaagattaacacaatattttaaaaggagcgtgtttgaaatggcaagatttacattaccacgtgatgtttatcacggaaaaggatgtttatccgaattaaagaatctgaaaggtaaaaaagctgtcctcgtagtcggcggcggatctatgaagcgtcagggattcctggacaaagcagtgaactacctgaaagaaggcggaatggaagtcaaactgatcgaaggtgttgagccggatccatctgtagagactgttatgaagggcgcaaaagtaatgcaggagtttgaacctgactggatcgtagcaatgggtggcggatctccgatcgatgcagcaaaagctatgtgggtattctatgaatatccggatgagacatttgagaatatcatcacaccattcagtttccctgagcttcgtcagaaagcgaaatttgcagccatcccatctacatcaggaactgcaacagaagtaacagcattctccgtaatcacagattacaatacaggaatcaaatatcctctggcagactttaacatcacaccagacgttgcaatcgttgatcctgaactggtagaaggacttcctcagaaacaggttgcttacacaggaatggatgcactgacacatgcgatcgaagcttatgtatcaacactcaactgtccatttacagatccacttgcactgcaggcaatcgagatggttctggattatctgccggcatcttataacctgaatatggaagcaagagagcagatgcattatgcacagtgcctggctggtatggcattctcgaatgcattacttggaatcgtacattctatggctcataagacaggagcagcattctcaacgggacatattcctcacggatgtgccaatgcgatctatctgccatatgtaatcaaatacaatgcaaaagataaagtggctgcatcacgttatgcagaaatcgcacgcagaatgggacttcctggaacatcagagaaagctctgatcaacagcttgtgtgcaaagattgatgagttcaatgcaaagatgaatattcctaagactctgaaagaattcggaatcaacgaagaagaattcaaagaaaaactggataagattgcagaacttgcagttggtgatgcctgtacaggatctaatccaagagcaattgatcctgcaacaatggctaaattatttacatgtacatattatggaacagaagttgatttttaaataacaaaaatcagataacggcggctgtcacataggtttatgtggcagccattttgcgtactttggtataaaaatcaaaatctattccatatacaataaaacgaatcttgaacaattttatcgacattttttgaaaaatatggttttacttgcgaaatagaacaagccgtattatgataatagtaatattgggaattaggaggaaataagatgtacaaaattttaaaagcagaacaattaactgctaacatctttctgatggatgtagaagctcctcgtgtagcaagacattgtgaaccgggacagtttgtcattgtaaagatggatgaaaaaggggaaagaatcccactcacaatctgtgactatgacagagaagccggaacgatcaccatcgtattccagccggtcggagcatccacaaccaagatgaaagaattaaaagcaggagattatttccgcgatttcacaggtccgttgggaaatgcttcagaacttgtagaggaagatatcgaagaactgaagaagaaaaagatcctgtttgtcggaggtggtgtcggagcagcacctgtatatccgcaggtgaaatggctgcatgaacacggtgtggatgctgatgttatcatcggttccaagacaaaagatatgttgatcctggaaaaagagatggaagcagtatctggaaattattatccatgtacggatgacggttcttacggtcatgccggaatggtaacaacaatggtagaagaactggtggaaaaaggaaacaaatatgacgtatgtatcgcaatcggaccaatgatcatgatgaaattcgtatgtctccttacaaagaaactggaaatccctactgttgtaagtatgaatccgatcatggtagatggaacgggtatgtgcggagcctgtcgtctgcatgtaggagatgagattaagttcgcatgcgtagatggtccagaatttgacggacaccttgtcaacttcgatgaggctatgaagagacagcagatgtacaagacccaggaaggccgtgcaatgctgaaattacaggaaggtgacacacatcatggcggatgtggtcagtgcggaggtgacgagtaatggcagatgtattaaagaaagttcctgtaagagaacaggagccaaaggttcgtgctacgaattttgaagaagtatgttacggatataataaagaagaagcaatggaagaagcaaccagatgtctgaactgtaagaatgcaagatgtatccagggatgtcctgtatccattaatattcctgcatttatcgcagagatcaaagaaggcaatatcgaagaggcttacaaagtgatcggtcaatcttctgcacttccggctatctgcggacgtgtatgtccacaagagtcacagtgcgagagcaagtgtgtccgtggtatcaaaggtgatgcagtatctatcggtaaactggaaagatttgttgcagattatgcactggaaaatgatatcaaaccggaaaaaccggaaaagacaaacggacataaagtagcagtcatcggttccggtccgtcaggacttacctgtgccggcgaccttgcaaaactcggatacgaagtaactgtattcgaagcactgcatgaacttggcggtgttctggtatatggtattcctgaattccgtcttccaaagcagaaagttgttaagaaagaaatcgaaaaagtcaaagagcttggcgttaaattcgagacaaacgttgttatcggtaaatctacaaccatcgaccagttgatggaagaggaagattttgaagctgtattcatcggttccggagcaggtcttccgatgttcatgggaatccctggcgagacagccaacggagtattctcagcaaatgaatacctgacaagaagtaacctgatgaaggcatttgatgattcttacgatacaccgatcgcagcaggtaagaaagttgccgttgtcggtggtggtaacgtagctatggatgctgccagaacagcacttcgtcttggtgcggaagtacatatcgtataccgtcgaagcgaagcagaacttcctgcacgagtagaagaagtacatcatgcaaaagaagaaggtgttcagttcgacctccttaccaatccaaaagaaatccttgtcgatgaaaacggatgggttaaaggtatgaaagtgatcaagatggaacttggtgagccggatgcttccggaagaagacgtccgattgagattcctggatctgaatatgagattgaattagacactgttatcatgtcccttggaacctctccaaacccattgatttcttctacaacaaagggtcttgagacgaacaagagaaaatgtatcgtagcagaagaagaaaacggacagacttcaaaagctgccgtattcgcaggcggcgatgccgtaactggtgctgcaactgtaattcttgctatgggcgcaggtaaagcaggcgcaaaaggtatccacgaatatctgtctgaaaaaaatgcttaattctccacaggataaaagattctataaatattcagatatgaatatatgataaaagagatatgcataagaaaaaatcttgtgtgtatctcttttttgatgctgtatccggacttgaacaaaaacaactgtatgtggtatgattgtaagacacatttaagtactgaaaataattataaaatcagtcctgctgacaagtaaggataaaacaaaaagacaggttggagattatgacagaattagatttaaaagacggaaagatatttttaaataaagtaacggagaagatccgtacacggctgacagaagtagatgcatccattgaagccggacagaaagacattcagagtatgaacgaatactactgggagaattatactgagatggacgaatatggttatgagaattacgataaccaacaggcacttttacatcaggtaaatgataatcaggaaaagcagaagatgagacatcgtctccgtaagatgttggaagccccgttttttggacgtgtagattttatctatgatggggaagaagagccggagattttttatatcggtatcggcaattttgcagagcgtacaggtatgctgcctttgatctatgactggagagcacctgtcagcggattgttttacgattatgataaaggaccgggttcttataaagctcccgccggacttatcgaaggcgaaattgccgccaaatggcagtataaagtaaaaaatggaaaaatggtctatgcatttgaaagcgataccaagattgatgacgatattttaaaacaggaactgggaaccaacagtgatgtgcagctgaaaaatatcgtacgtacgatccagaaagaacagaatgccatcattcgtaatacacaggatcggatccttgcaattcagggggcagccggaagcggcaagacttccgttgcattacacaggattgcatacctgttgtatcacgacagagaacatttaaaatcctctaatatactgatcctttctcccaacagtgttttttcggactatatttctcatattcttccggaactgggcgaggaaaatattcaggagatgagttttgatctgtttgcataccgcgaattgaaggaaatcgttccggactgcgaagaccgttatgaccagctggagaggaacatgaagcttcaggatctgtacctgacagaacgctttgaagaaaaacagtcggaaggctttgtcggaatgatggaaggatttctcgcaagcctggaagatgaactgatggattttcgaacgattgaatataaaggaattcaaaagacggaagaagagcttattaatctgttttatttcaagttccagaatgccccgttgcttagccgtatggatgcgatccgggattattgtgtggatgaatatgagacattacttggacgtgaccttagcgaagaggaacttctgatcgtacagaataagtttgacaagatgtatgtgacaaaagatatctataagatatatggatggcttctggaagaatgcgggtatccggtacttccggatgtcgaatacgaaaagcgcaagctggaatacgaagatgtatttccggtgttatatctgaagtaccgtctgaccggaaaagctgtgcataaccacatcaagcatctggtcattgatgaaatgcaggattattcttatctgcagtatgtgatcctgaatcagatcttcaaatgccggatgacaatcctcggcgataaggcccagacactggatgaacagatgcgagatgtattacagttccttccgggggtgttcgatcagaaaatccataagattgtaatgaataaaagttacagaaatacgatggagattgccagatacgctgaaaaactaaccggtgtaaaagacgtggaacttttaaagcgtcatggaaaagaagtcattgaagagaatttccaaaatgaagatgctgtgctggatgagatctttttaaaagcaaaacttggagaagacgagtatgagactgctgccattattaccatgacggaagcagaagcgttcacattgtatcagatgttaaaagcccgcggcgaagaagtgcactatattgaccgcaacagttctgcattcaaaaaagggcttaccgtcacaaccttttatcttgcgaaaggactggaattcgatcaggtattcggagtcttccgggatattgaaaatccgatgcagaaccaggcaaaatatatctgtgcaacaagagcattacacgagttatatatgtatcaggtaaccaaacagtagaattagaaagaatagaagaatgaagataacattaatcacagtaggtaagataaaagaaaaatacttaaaggatgctattacagaatacagtaaaagactaagccgttactgtaagctggaaatcattgaagtggcagacgaaaagactccggataacgcaagtgaaactgtagaagacggaatccgtgataaagaaggcgaacggattctgaaatatgtcagagacgatgcctatgttgttacgctggaaattgagggaaagcttctgacctccgaagaactggcgaaaaagattgagaaccttggaattcaggggacgagccatatcatatttatcatcggtggttcgatcggacttggaaaagaagtactgaaacgttcagactatgcactgagtttttcaaagatgacatttccacaccagctgatgcgggtaattctgctggaacagatttacagaagctaccgtattatcagccatgagccatatcataagtaaactgccgaaatagaagaaaaatcttgtatcaaaatccatcatcctttatactaatatggatgaaaatgtcaggagagggtatgatataactatgaaacacttaaatttcaaaaatctgtgcatgatcttacttggaaatacgatctatgcacttgcaatcgtcatgtttattctgccaaataatatgatcacaggcgggacaacagggcttggtattgcgatccatcattatttcggacttccaatccatagttttgtattgctattcaatacactgatgttcctgcttggagcggctgtccttggaatgaaatttgcacttacgacattggtcagtaccttttattatccggttattctgggagtgctggagcaaatgcctgcacttcagaatgtaacagacgataagatgttatctactatatgcggcggtctgatgattgggatggggatcggcgtcgtgatccggtgcggagcctctaccggaggaatggatattccgccactggttctgaacaagaagtttggtcttccggtatctgtgatgctgtacgcatttgattttgttatcttaatctcacagatgctcttcaccaataaagaagagattgtatatggtatcttgttggtactgatttacacagtcattttagacaaggtgcttctgatgggatctacacgtacaaaagtagagatcatgacagaaaaatatgaagagctgaaccgtctgattcaggagcagcttgaccgtggaacaacacttgtctacacacagaccggatatctgaaaaatgatcagccgatgatccttaccgttgtatccaaccgcgaactgatgcggctgaaccagctggtacaggagactgatccacatgcatttatgattatcggaaatgtaaatgaagtacgtggaagaggattttcacaacagaaagtctataaaaaagaacaggaagaaagataagaaaaaaagctggtatttttagccagcttttttcttacgttctttacagatccatctggaatcctgatatataaaatgccagtattcaaagatcttttcggatgtattactatcttttccccggacaacaacccagatatcttttagatcggattcctgttctgtatgttcttcatccgcaaaatccggagcttttacaggagaaactgttgtaaacttaatgtgttccgatttgatatttttctctatctcttcctgaatgctcagatagccatcggtaatcccgatctgccggtactgttcggcaagacggattcttttgtttctccccgcaaggataagatacgtaacaatggatgtgatgatcgatgcaacaataacaagtgccaatatgatcaaaacaagaaatgatgtatgcatagataaaacctccttaaaatatatggatttcaaaaccatactatctgaccttgatgcaatgatgcaggctgattttacatagatttaacgtaaatctaataatcgtttggaaatactatgatacattagaaacattggaaatgcaatacaaagaaaggtgaaaaagttatgagtaagatatatatgaacagggagctttcctggttaaagtttaacgaacgtgttcttgaggaggcagagaaccaggaagttccgttgtgcgaaagactgacattcgcatcgatttatcagagcaatctggatgaattcttcatggtgcgtgtgggctctttatatgatcagacacttctcgataagaagatctgcgaaaacaagacaggaatgacatcgcaggaacagattgatgcaattttaaagcagactaaattgatcaacaagagaaaagaagccgtatacgaagaactgatggcacgtgtggcagagcagggaatccgtattttgcgttttaatgaactggatgaagacggtgcccgttatctggaaggttattttaagtcagagatcgcaccgcttatttcgcctactgttatcggaaggagacagccatttccgtttttgaaaaacaaagagatctatgcggcagcggtactcggtgcaaaaaggaaaaaagaccgtctcggaatcattccatgcacaagcaatattttcggacgtctgatcgcagtaccgggtatgcctggcacatatatgcttgctgaagaactgatccttcattttgcaccggttgtattcaaagggtataagatcaaatccaaatctttgctgcgcatcacaagaaatgctgacattgatgcggatgctttatacgatgaagatctggactaccgcgaattcatggcaggtctgatcaaacagcgtaagaaactggctccgatccgtctggaactttccagagatatggacaaaaaaggaattgccgtattgtgtgagtatctggaactggatgaaaatcatgtattcatgtcctcaacaccattggatctttcgttcgtattccagatccaggatctgctgagaaaaaatccggaattatattttccgaaaagaacacctcagaaatccgaccagttccaggatggaaaaagcattatagcacagatcaaagaagaagataaactgttatcttatccttatgaatccatccgtccgtttttgcatttgctgacagaagctgccgaagacccggatgttatctcgatcaagatgaccttataccgtgttgcaaagcagagtaaggttgtagaggcattgatagaggccgcagaaaacgggaaagaggtcgttgtattagttgaacttcgtgcccgctttgatgaagaaaataatattgaatggtccagacgtctggaagatgccggatgtcaggtaatctatggattagacggatataaagtgcattcaaaactctgcctgatcactagaaaaaatgcaggacaggtagaatatatcacccagattggtaccggtaattataatgaaaaaacttcccgattatatacggatctctctttgatgacatccaatgtagagatcgggctggaagcttccaatgtatttcaggcactgtcgaagggagaagttgttgaacatactaggcatcttcttgtagcaccgaagtgtctgcagaataaagtgctgggtatgctggacgaagagatcgcacatgcaagaaacggagaagaagcttatgcaggattcaaactgaattcccttacggacaaaaagatcatcgacaaactgatcgaggcttctgaggccggagtcaagatcgatatgatcatccgcggtatctgctgcctgatccccggagtggaaggaaagacagaaaacatccgtatcatcagcattgtcggaagattcctggaacattccagaatctatatcttcggaagcaaagaaagaaggaaatattacattgcatctgcagatttcatgaccagaaatactgtacgacgtgtagaggttgctgcaccggtatataatgacaaactgaaaacgaaattacaggaaatgttcgacgttatgctttctgataatcagaaagcaagaaaactggaagcagatggaaattatcaccgtgtgagtaatgatcttacaccggtaaatgcacaggaatatttttacgctgaggcataccacgagattccttaaatccgggcaggtatatatctgaggcggaatgcataaagtgatataaatcacaaaagtggtatggatatgaatcgtcaggaatggaaagaaaaagcggcggaaatgtcgggagtcccaaaagatgtagcaatggggctcccgattcttacgattaccggtacggatgaactatgtgtggaaaattacagaggaataacggaatatacagatcagattatccggctgcagaccagatgcggacagattaaaatcggcggcaggaaactggaagtcatctattacaccaatgatgagatgatgattcacggtcacatcaggacgatcgaataccaaacataggagggatcgctgtgtttgaacagttcatctggtatctgaaaggctatgtccggatacgtgtgtcaggatattcacccgaacgttttctgaatgcctgccgttataaaaacatctatatatgggatctgaaacgtgtctgtggagcatatgaaatgaatctgtcggtcagtgggttccagagactgaaggaaattataaggaagaccggcacaaaggtttgtatcatccgccgcagcggtcttccttttctttttcaccgctaccggaaacgtcatatactgttttccggatttattctctgtatttgtcttatcctttttatgacacgttatatctggggaattgatatccgcgggaacctgtcgtatacggatgatactttaaagaaatttctggcatccgaacagattaaaaatggtatgaaaaagacaaatgtagactgtcagaagattgtccgggatctaagacgtacatatgatgggatcatatgggtatctgcttccatagatggctgcaggctggtcattcagataaaagaaaacgaagacggccttgcggataacagcattatatcccggataaacgaccagtctacagatatcattgccgacactgactgtaccatcacaagtattactaccagaaccggcatcgcacaggtaaaaaaaggtgtacaggtaaaaaaaggtgatcttctggtatcgggacagatccccatctgcaatgatgcaaaagaaatcacagggtactcaccctgtagatcggatgctgacatatccggcgaaacctgtattccgtatcaaaagacgctctcaaaaaactatttcgaaaaagaatattacaaatcaagatatcattttatccagaaaaaagaatatgcagtccgggcaggaagatatatgatccgaatcggttctgtaaaaaacacatatccttattttgaaaagcacgtcttccagtggcagttcaggccgttgaatatattccctcttaccttcgaagaaatcacagtaactccttaccggaaaagacaaaagaattatacaaaaacgcaaatccggaagatattatccggagattttcagaattactgtaaagaaatgaagaaaaaaggggtagaaattatccagaatgatgttaaaatatacacagggtctgagacgtactctgcaaaaggaacactgaaggtcagatgctccgttggaaagcaggttccgtccacaccgcttccgccggactatattgcggaagacgacacaaagaatggagactaatgcatgggattaatggagacagtcatcgatatacctgcagaacacgaagccaatgtgttcggacagttcgatgcatatgcaaaaaaaatagaacgcgctcttcatgtaacactgatcgcaagaggtgaaagcgtcaagatcatgggagatgctttgaaagtagaaaaagcaaaaaaagtgctggatcagcttgtagaactttcaaagagaggcaacacgattcaggaacagaatgtagattacacgctggcactggttatggaagacagcgaagaaaacgtactggagatcgataaagatattatctgccataccttacagggaaaaccgatcaagccgaagacactcggtcagaaaaaatacgtcgatgcaatccgtaaacagatgatcgtattcggactcggaccagccggtaccggtaagacttaccttgcgatggcaatggcgatcactgcattcaagaacaatgaagtaggacgtatcatactgacacgtccggcaatcgaagcaggagagaagcttggattccttccaggcgaccttcagagtaagatcgatccttatttgcgtcccctctatgatgcactgtatcagatcatgggtgcagaaagctttataaagaattcggaaaaaggtctgatcgaggttgctccgcttgcttacatgcgtggtcgtacattagataatgcctttattattctggatgaagcacagaacacaacaccggcacagatgaagatgtttcttacccgaatcggtttcggctcaaaagtcgtgatcactggtgacgcaacacaaaaagaccttccgtccggacaggtgtccggtcttgatgtggcggcaaaagttataaaagatatcgaagatatcagtatctgtcaccttaccagcaaggacgttgtacgtcatccactggtacaaaaaatcgtaaaagcatacgaagattacgaaagcagacaaaaccgtcgcggtaatgacgcaaaatacaaaggaaaagataagaggcgaagatcatgacattatactttgaagaagaaggcgaaataaagcttcctctggaatgcgaaacacttgcaaagaaagtagtagaagaagcattggattatgtaaattgtccgtacgaagcacaggtgaatctgctactgacagaaaatgaacagattcatgaaatgaacagagaattcagaggcattgaccgtgcgaccgatgtactgtcttttccgatgatcgactatccggaacccggaacgtttgattttctggaagaggaagaagattgctttgatccggaaagcggagaactgacgcttggagatatcgtgatatcaaaagaaaaagttctttcacaggcagaagaatacgggcatagtccaaagagagaatatgcttttcttattgcccattctgtgttacacttaacaggttatgaccatatggaagaggaagaacgtcaggtaatggaacagaaacagcgtgagatcatggaacgcctggacattctgagataatcattgatcttaataaatttttacaaaacgatggagttaaagctgtatgtcggaacaacataaaaaaaatgaaaaaaatttcctgatacagggatcgattcttgcaattgccggagttatcacaaagctgattggagccttttaccggattccgcttttgaatattatcggaacagaaggaaacggatattattcggttgcattttcaatttattcagttgcattgatgctgacttcgtacagtctgccgttagctgtgtcaaagcttgtatcggcaagagtggctgtcggcgaatataaaaatgcaaacaaaatcttccggggtgctatgacctttgcacttcttgccggtggaattgtctctcttctggtatttttcggagcagattttattgcaacaaccattatgcatcttgacatgagtgcctatgcgctccgtgttctcgcaccgtgtatcctgatcgtagcacttctcggggtgttacgcggatttttccagggaatgggatctatgatcccgacagcaatctcacaggtgatcgagcagattgtaaatgctgttatatcgatcgcaggtgcatatttattattcaatgcaggaagagctgtcggaaagaccagaggcgacaaatccttcggtcctgcctatgcggcagcaggcggaacactcggaacagtccttggtgcattgagcgccttgatatttgtcggattcatttttctcgcataccacaaagtattcaaaaagaaaatgaaacgcgatcattcaaggaaaagagaaagttacagaaccgtatacaaagtgttgtttgtgaccatcgcacctgtcattttaagtgcaacggtatataatatcagtgattttgtagatactgcactttttaacaatgtcatggctgctcagggatttagcaaaaaagaatacgcaagtcttcttggaatctttcagggacagtacagtacaatgatcaatgtgccgctctctatctcaagtgcacttgccgcctcactggtgccgagtctggttgccactgtacagaccggtaaccgtaagcaggtacataacaagattaataccgtaagccgtttcaacatgttgatcgcaatcccatgtgcagttggatttatcacacttgcaaaaccgatcctgaatttattatattttacacaggataatactacagcagcacggatgcttcagatgggggcgctttcagttgtctttttctgtctgtcaacagtgaccaactctgtattacagggactggatgatatgatgacaccggtaaaaaatgcggcaatttcactggtgatccatatcgtgacattattcctgatgctggtagtactaaaatggaacatttatgcggttgtattaagtaagatcatattctccggagcaatctgcatactgaatgcgaaagcacttcgtgacagaatcggttatgttcaggagaaaaagaaaacattcttaatcccgacacttgcttccctgatcatgggtgtgatcgcaattgtgattcatctgatcttcgaattattcgccggtccgtatatcgcaacaatcattgcacttctggcagcagttgcagcatatggagtatctatcgttgcacttggcgggattacggaagaagaattacttggcatgccaaaaggagcagcccttgtgacagtatgccggagactacatttgataagaggggaatacaagtaagtatgagaccagtaaagaaaattgctctgttacacgatatctgcggtgtcggcaaggcagccatgatgaatatgacaccaatcttaagcatgatgggaatcgaggtatgtccggtaccgacagtactgttatcaacacataccggtggctatggcactccggcggtctgccatgtacccggagactatatacgtgcatgtgcagatcattacaagaaagaacatattacgtttgatgctatttttgtcggataccttggaaaagctgatgtaattgatgccgtcatctatttcattagtcaatttccggacacaaaagttattctggatcctatcatgggtgatcacggagtttattatacaaattttgacgaatcttatggtgctgcaatgcggaaaatccttccgtatgcagacgtaattctaccaaatctgacagaaatgtatctgctcgccggaaaagaatatcagctcacaggcaatcacagaaatgtactgcatttgtgtgaaatcctccgtgaattgggagcgaaaaacatgatcattaccagcgttccaaaagacgactgtaaaaagggtatcgtgttatacgaagataatgcatttctttatatcggaaatggtgaaaacctgaaagaatttcatggagccggagacgcatttgacggaatgttcctggcaaagcttctgcagggaaattcccttttggaaagtgtacaggcttcgcatgcgtttgtttgtgcctgtatcagagaaagcgaaaagtatgactatccggagcgggaaggccttttaattgaaagaacattgaagaaaattgtataaatagggtgagttgagcgaatactgtactcaaaaaaggagtcttcattatgaaaaacaagtatggtattggctttttactgtttctgatcctcatcgtattcggaatcacctgtgcttatcagcttagcttaaacaggggaaaacgtgaaattcaggcagagaaaacagcggagaagcaaaaaacacaagatttttctgttgccgcagatggacaggctttaaaagaagactgttactatctgaaatctctgaatggctatgtagtcgtatatctgaatgataaaaaaacggtatatgaatacacagatattccactggatgatcttcctgagacactgcagcaggagatccataatggaaaatacgttgagacatcagcagctctatacggatttctcgagaattattcgagttaaatctgagtatattaaggaaggacaaaagataatggatgataagaaagtagcaagaatcaatgaattatatcacaagtctaaagccgaaggtctgacaccggaggaattaaaagaacagcagatattgagaaaagaatacattgattctttcaaaagaaatctgcgcggacagctaaacaacatttctataaaggaaaaagacggaagtattacgaatttgggtgagaaatttggaaacaaaaaaggaaattagacataagatcatccgtctcagaaaagagatggatccgcttgtgtggcaacaggccaccaatactatcacggaaacagtgattaatcatccactgtttttagaagcgactgacatctactgttatgcgaattacaatggcgaaaccggaaccttggcaatcatggaggaagcctggaaactgggtaaaagtgtatggtttccaagagtcgagggcagcgagatgaatttttatctggtagaacaaaaagaggatctgcagcctggtgcatatggaattctggagccgacaggtgaatacaaagccgacggatatgacggacttctgatcatgccgggtgtcgcttttgacgaagaatgtcaccgaatcggatatggcggcggtttttatgacaaatatctggaaaaacatccggatctgcatacgattgcagttgcttttgaattgcagatgtacagagaactgccttttgaggaacatgatataaaaccggaaaaagttattacagaaaagcatatctatccattggaatcaggtgaatgttttttgtaatttctgattaagatatgaaaaaatataatacttaaaggagtgagccagaatggcaaacggattacctagagatcccatgctgttactcagtgtggtcaatacaaaactaagagactattatcacagcctggatgctttatgtgacgatatgaatgtcaataaagaagaaattataagtgctttgaagttgattgattatgcatatgattcagacatacagcaatttgtctagattgccatacattctgcaaaaagctgttgtcttcactttctgtgaatgactaataatgaataatacaaaggagcaaagagaatgcttaatactatgaattacgatatagatattacaaaagaaccgcctgcggatgatactgcccgtcagtattattttatcgaaaaagcaaaagcttatgtacagcgcgaatccgaagaactgggacgtccgctgacattctgtgtcacaacattcggttgtcagatgaacgcccgtgattccgaaaaactctgtggaatcctggaaaagatcggttatgtagaagcgcctgaagatgaggctgactttatcattttcaacacctgtacggtaagagagaacgccaacatgcgtgtctacggacgtctcggacagttaaaaccaagaaaggagaaaaatccgcatatgataatcggtctctgcggctgtatgatgcaggaaccggaggttgtagaaaagttgaaaacaagttaccgctatgtggatattatcttcggaacacataatattttcaaatttgccgaactgatcgtgacacggtttgaatcacaacgtatggtgatcgatatctggaaagataccgacaagattgttgaaaaccttccgaatgaccgcaaatattcctttaaatccggagtaaatatcatgttcggatgcaataatttctgcagttactgtatcgtcccatatgtacgtggaagagaaagaagccgtgacccggaggcaatcatatcggaaatccgccagctggttgcagatggtgtggttgaagtcatgctgcttggtcagaacgtcaattcatacggaaagaatctggaaaatccgattacgtttgcccagcttttggaaaagatcgagcagatcgaaggattggagcgtatccgttttatgacgtctcatccaaaggatttatctgatgaactcattgaagttatgggaagatccaaaaagatctgcaaacacctgcatctgccggtacagtccggaagcagcagtatcttaaagaagatgaatcgtcattatacaaaagagcagtatctggaactggtagaaaaaatccgcaagaatgttccggatgtgtctcttacaactgatatcatcgttggtttcccgggagagacagaagaagacttcgaagaaactatggatattgtaagaaaagtgcgttatgacagcgtattcactttcatctattcaaaacgtactggaacacctgccgccgtgatggaagaccaggtaccggaagatgtggtcaaaaaccgttttgaccgactgctgaaagaagtacatacgattgcggcagaagtatgcgctgtacatgaaggaaccattcagaccgctctgatcgaatcggtaagtgaacacgacccatccatggtaacaggacgtttaagtaataatctgctggtacacatcaaaggtgataagggaatgatcggacggcttgccgatgtcagactgacggaatgcaaaggtttctattatctgggagaactggcagaataaatgtattataattaaccatgaaaacgctcaaactatgtaatatcaacaagatagtgagggcgtttttgtatgaaaaaaatcagtgagtatttatttttgtgggggatcggtggctggatttattatacgctggaaattcttttccgtggtttttcccactggtccatgttcgtgctgggcgggatctgtatgatgtttttctcctatcagggacagcaggtacactggcaggatgattttcttctgcaggtattccgctgcagcatctttgtaacagcagcagaattcattacaggtattatcgtaaataaatggtttgcacttcatgtatgggattacagctgtatgccatttcagttgtttggtcagatatgtctgccgtacaccatgctatttacatgtctctgtgcagcagggatctatctgagtgccaatattctttatcttctgtatgatgaagaaaagcctcagtttttgaaaaaatctatccttttaaattcaaaatataaatgctataatgaaatgtaaaatttaaatgatcagaggagtaaaaaaagtggcagaattaacaccaatgatgcagcaatatatgcagacgaaaaaagaatatccggactgcatcctcttttatagattgggagacttttatgaaatgttctttgacgatgcgttgactgcatccaaagaactggagattacattaaccggaaagaactgcggactgaaagaacgcgcaccaatgtgcggtgtcccgtatcacgcagtggacggatatctgaacagactggtatccaaaggttataaagtggccatctgtgaacagttggaagatccggctgctgcaaaaggaattgtaaaaagggatgttgtaagaatcgtaacccccggaaccaacctggacacgcaggcactggatgaaacaaagaataattatatcatgtgtatcgcttacgcatcggatcattacggcgtatctgtcgccgatgtatcaaccggcgagtacatggtaaccgagattgaaaattctgagaaattgtttgacgagatctataagttcatgccgtcagagctgatctgtaatgaagccttttatatgagcggtatggattttgaattgttaaaagaaaagcttggaattaccgtatattctctggattcatggtatttcgacgatgcagtctgtgaacgtgttttgaaagaacatttccatgccggtacgattgaaggactgggacttaccgattatgactgcggtgtaattgcagccggtgcactcatgcagtatttggtggagacacaaaaacgagatttatcacacatttcccacctgacaatctatgcttccggaaaatatatgcttttggacagctcaaccagacgaaatctggagctgtgtgaaacactgcgtgacaaacagaaaagaggttcccttctgtgggtgctggataagacgaagactgccatgggtgcaagaaccctgcgcaaatatattgaacagccgttgattgacaagagcgctattgaaaaacgactggatgctgtagatgaattagtgaaaaatgcaatttccagagaggaaatccgtgaatacctttcaccggtctatgatctggaacggcttgtgtgcaggatcacatatcagtctgcgaatccaagagatctgatcgcattccaaagttctcttgcaatgcttccgcatataaaatatatcttgaatgatatgcagacacctcttttaaaggaattgaatgaagaactggatacgctcggagatctgtgcaagctggtcagtgattccatcaaagaagatccgccgatcgccatgaaagaaggcggcattatcaaagacggttacaatgcagaagtggacaaactccgcaacgccaaatctgacgggaaagactggctggcaaagctggaaacagaagaacgtgaaaagaccggtatcaagaacctgcgtattaaatataacaaagtattcggctattatctggaagttaccaattcattcaaaaatctggtgccggattattacacaagaaaacagacgcttgccaatgcagagcgctatatcataccggaattaaaagagctggaagatacgattcttggtgcagaagataagttgtatgctcttgaataccagctttattccgaggtcagagatactatcggaaaagaagttgtccgcatccagaagacggctaaagccattgcaaaattagacgcatttgcctctcttgcactggttgcagaacaaaataattatgtcagaccaaagatgaatgacaaaggactcattgatatcaaagacggccgtcatccggtagtcgaaaagatgatctccaatgacatgttcatctgtaacgatacatatctgaatgacaaaaaggaacggatttccattattacgggtccgaatatggccggtaaatcaacatacatgagacagacagccctgattgtcctaatggcacagatcggttcgtttgtccctgcttcttcggcaaatatcggtgtggttgaccgtatctttacccgtgtaggtgcttcagatgaccttgcaagcggacagagtaccttcatggtggagatgacagaagtggccaatattctccgaaatgcgacgaataagagccttctgatccttgatgagattgggcgcggtaccagtacctttgacggtttgagtattgcctgggcagtgattgaatatatcagtaacagcaaattgttaggagcaaaaactttatttgcaacacattatcatgagctgactgaactggaaggaaaaattgaaaatgttaacaattactgtattgccgtaaaggaaaaaggtgacgatatcatcttcctgcgtaagattgtcaagggcggtgcggataaaagttacggaatccaggttgcaaggcttgcaggtgttccgcagtcagttacagacagggcaaaagagatcgtagaagaactggtacaggcagatgtaaccggtaagatcaaagagatcgaagtgcaggggcaggaagcatccaaaccaaaggcaaagcattttgatgaggtagatcttgcccagatgtcactttttgatactgtaaaagatgatgatgtcatcaaggagatcaaagaactggatcttgccaatctgactccgatcgatgcattgaatacattatatcaacttcagaacaaactaaaaaacaggtggtaaacgatgagtaaaattcaggtgttagacccgattacaattgataagattgcagcaggagaagtgatcgaacgaccggcttctgttgtaaaagagctggtggaaaatgccattgatgccggtgctacagcagttgtcgtagagattaaggatggcgggatctcgttcatgcgtattacagacaatggctgcggaatagaccgggaagatgtacgctctgcgtttttgcggcactcaacgagtaagatccgttctgtcgatgatctgcttcacatcggttcacttggattccgcggagaggcactttccagtatctcggcagttgcacaggtagaactgatcacaaaaacaaaagatcagacatatggcacgttataccgtattgcaggcggcaaagaagaaactctggaagataccggtgcaccggatggaacaacctttatcatacggcagttgttttataacacacctgcccgaaggaagtttttgaaaacaccgatgaccgaagcgagccatgtcggagacctgatgacgcgacttgcactttctcatccacacatttcgtttcagtttattaataacggacaatccaaattacatacatccggtaacggaaagttgaaagatgtcatctatcacatttacggacgcgaaattgcttcaaatcttctgcaatcagaatacgatacaccgggacttaaaatcaccggatttttaggaaaaccaatcatctccagaggaaaccggaattttgaaaattattatgtgaatggccggtatgccagaaacagtatcatttccagagccatcgaggatgcatataaggattttaccatgcagcataagtatccgtttgtggtactgcatatagagattgacggagaacatgtagatgtcaatgtacatccgacgaagatggaattacgctttaacaatcaacaggaagtctataacgctatctattcggcagttgatcagggacttcacgaaaaagaactgattccgcatgtagagatgccggaaccaaagcctgctgtccagtctacaccggaatcaaagcctgccgtccgatctacaccggaaccaaagacagtcgtccaatctgctccggaaccaaagacggccgtccgatctgctccggaacataatctggaatacttcatgtccaaaatgaaagaacgggtactggctgagcatgaagaaaagaagaaaaaagaagaggctgtaacaaaacaaccggtaaatacgatacaaactattgcagaagaaaaaacaccttacatgcagaatactgccgtcagaccgcaaatatcaacacagacaactgcgtcagaaccaccaaaacaaatggaacttttcgaagatcatctgcttaccagagaggccatgcagaaatataaagtagtcggtcaggtattcgaaacctactggctggtagaatacgataacagtctgtatattatcgatcagcatgcagcgcatgaaagggttctgtatgaaaaaactctgaaatctatgcaaaccagggaattcacctcgcagatgatcagtccgccgattgtattgaatttaagtatgcgggaagcagaattgctgaacacttatatggaccggtttacaaggatagggttcgagattgaagagttcggacaggactcttatgcagttcgtgctgttccggataatctgttcagtattgcgaaaaaagaactgctgatccaaatgcttgacagcctttcggatgagattgcccgcaatcagtctccagatctcattgatgaaaagattgcttcgatgtcatgcaaggctgccgtaaaaggaaatatgaaattatccgtgcaggaagttgatgcgttgatcggtgaactgttatcattggacaacccctatcattgcccgcatggaagaccaaccattatcgcaatgacaaagagagaattagaaaagaaattcaagaggatcgtataaaatgaagaagaaaccactagtagtactaacagggcctacggccgtcgggaagacaaaagcttcgatcggactagcaaaagcgattggcggggagattatttctgccgattccatgcaagtatacgagtacatggatattggttctgccaagatacgcccggaagagatgcagggtgttactcattatctgatagatgatttgaagccatgggatgaattccatgtcgtccgatttcaacagatggctaaaaatgcaatggagcagatttatgccaacggacatattccaatcgttgtcggcggaacaggattctatatccaggcgttgctgtacgatattgatttcaccggtaccgcccaggatgacacttaccgggcagagctggaaaatcttgcaaaggaaaagggggcagaatacctgcataatatgctgcggaaagttgatccgaaatccgcagaagatattcatgccaataatgtaaaacgagtgatccgcgctctggaatattaccgtcagaccgggcagaaaatatcagaacacaatgaagaggaacgccggaaagaatccccgtatgaattcacctattttgttctgaatgcgccaagagaacagctgtatgcaagaattgacagacgtgtagacctaatgatagaagagggactcgttaatgaagtaaagcatctgaaagaacttggctgtacgaaagagatggtttccatgcaggggctcggttataaagaaatcctggcatatcttgacggggaatgtgatctggatacagctgtctataccatcaagcgtgacaccagacattttgccaaacggcagctcacctggttccggtgcgaacgtcaggtgacgtggattcagaaagaagtgtatgattatgatgaagacaggatcctaaaggcaatgctctcgcatctggagggaagaatatgctgaagaaaaagttaagaggaaaatccaaatttttgagaaaaatgaatgaactgatggaaatatattcacgtaatcaggacactgcttttgcttaccgtgaactgctcggcctggaatccatgatccggtacgaaggcgagcaggcaatgtttgatcttaataaagcttctcttttatatgacatgggaagataccgtgaggcagaaacggttctgaaacagattccatccattaatccaacatttgatgctatgtgtgaatccctgcgtttcaagctgctggaagtccggtgattttctcaaaatatttacgataaatcaaaataaaaaatcagaaagaaggataaatatagattatgacaccgatcaacacaatttatagcgaaatgggcatccgtgaaacagtcctttcgttcggaaatacaatagaaaaagacctgaaaaaacgttttgaaaaaattgataagattgccgaatacaatcagttaaaagtagtaaaagcaatgcaggacaaccgcgtcagcgcaggatgttttaactatgccagcggttatggttatgatgaccagggaagagataccctcgaaaaagtatatgcgtctattttccataccgaaagcgctttggtacgtccgcagatcacttgcggaacacatgcactggcactggctcttgcagcaaacctaagaccgggtgatgagcttctggcacctgccggaaaaccatatgacacactggaagaagtcatcggtatccgcccgtcaaatggatctcttgcagaatatggcattacttactctcaggtagatcttttagaagacggaacctttgattacgaaaatatcaaaaaagcaattaacgagaaaacaaagatggttgcaatccagcgctccaaaggctatcagacacgaccgagcttttcggttgagcagatcggcgagctgatcgcatttgtcaaacggctcaaaccggatctgatctgtatggtggacaactgttacggtgagtttgtcgaaacgatcgaaccaagtgatgtcggtgcagatatgacagtcggctcactgatcaagaaccccggcgggggacttgccccgatcggcgggtatatcgcgggtcgcgaagatctgatcgatgcatgcggataccgactgacttccccgggcctcggaagagaggttggtgcatctcttggtatcatgaaagatttttaccagggattattccttgccccgacagtggcagcagctgcgctaaaaggtgcgatctttgcagctaatatttatgaaaaactggggttccctgttattccaaacagcacagaaagcagacacgatatcattcaggctgtagaatttggaattccggaaggcgtcattgagttctgcaaaggaattcaggcagcagcaccggtcgattcctatgtgactccggaaccatggccgatgccgggatatgattctgacgttatcatggcagcaggtgctttcgttcagggatcatccatcgaattgagcgcagacggaccgatcaaaccgccgtatgccgtatattttcagggaggtctcacctggccgcatgccaagcttggaatactgatgtcattagagtatctggtacgtgccggaattgtaactttgtaaccctcaatatatataatcattgcaatatttggaagaatagatatgaagaaaatagcaatcattggcggcggtgcttccggtcttgtggcggcaattgccgccgcaaggacgaacccgcaggcacagatcctgatatacgaaaagaaagacagcgcaggcaaaaaaatccttgcaaccggaaacgggagatgcaacctgacaaacaaagatatgaacgcctcttatttccacagcgacaatctttccgttgtagaagaagtattacagaaattcggctatgaagacaccattgcgtttttcacatctcttgggctcctgacaaaggcaagaggaaattacgtctatccgtattccgaccaggcttccaccgttcttgatttgttgaaatcagaactggatcgtctgcatgtaaaaataaccactgatgtgacggtgacgggtattagcccaacatctcatggttttacggtcctgacagatcatcaaaagcaaaaggcagatgctgtaatccttgcctgcggcgggaaagcgaattccaagctcggatccgacggaagtggttatgcacttgcaaagcagctcggacatacgatggttccggtcgtacctgctctggttcaattagaagtaaagaatcatccgtttgccaaagccgcaggggtccgtacggatgctgtcgtaactgcaatatgccatggacaaccggcagcttccgatcacggggaattacagcttacggcttacggcatttccggaataccggttttccagatcagccgctatattgccaaatctctgtatttaaaacaggatgcaaaagtgaacattgatttcctgcccgcttttacggaagaggcattttttgagttcttgctgaaacgtagaaacggaagagagcagatgacctgcgcagattatcttcttggaatctttcaccagaagctgatcccaagatttttagagcaggcacgcatccgaatgcatacactgacaggtgatctgtcggatacacagataaaaagtcttgttcaggtagttaagaataacgtagtaacaattgataccactaatggttttgataatgcacaagtctgtgccggcggaatctcaacagaagaaatcactcccgacactatggaatcccgttatgtccggcacctttatcttgccggggaattgctggatgtggacggcatctgcggagggtacaatctgcaatgggcctgggcgaccggttatcttgccggaactgctgctgcaaacgatatatcatcagatagatgacaaactgtaaaggagtaaaaacatatgattcggatcaaccagatgaaactgaacattgaacatacatcagacgattttgaatgcaagattttaaaaacactttgcataaaaaaagaggaacttcagggctttcaaatccgcaaacagtcgatcgatgccagaaaaaagcctgttctttactatgtctattctgtagatgtccaggtaagagatgaagcaaaagttaagaaaacggtcaaaaataatcagatacagttccaggttaagccggacagctaccatttcgaagtaaaagggacaaaggaactgacacaccggccggtcattatcggaacaggtcctgccggactgttctgtggttatatgctcgctgcgcacggatatcagccaattcttctggaacgcggagccgatgtagatcagcgtacaaaagatgtggaagcattctgggaaaacggacagctgaatctttcatcaaatgttcagttcggtgagggtggcgccggaacattttctgacggaaaactgaacactctggtaaaagacaaattcggacgcaaccatgaagtactacgtatctttgccgaacacggtgctccggaatccatcacctacgagagcaaacctcatatcggtaccgatgtgctctctgcagttgtaaaagaaatgcggaaatatatctgtgctcatggtggagaagtacggtttcactcacaagtcactgatattcagacacattccgacaacggtcaaaagattctccgcaaacttaaaatctacgattcgcaaaagaaggaaacatatctgctcgatacagatcttgcagtttttgccattggtcacagtgcacgggatactttttccatgttatatcagcacggccttccaatgcagccgaaggcatttgctgttggtgtacgaatcgaacatcctcaggaaatgatcaatcaggatcaatacggtaagaattatccttcctttcttccggcagcaccgtataaactgaccgctaacctcgataatggaagaggcgtatataccttctgtatgtgtccgggcggatatgtcgtaaatgcttcttccgaagaacaccggcttgccgttaacggaatgagttacagccgccgggatagccagaatgccaatactgcagtgatcgttactgtttcacccgatgattttgaaagtgatcatccgctcgctggtgtcgaattccagagaaagcttgaagaagcggcatatctcgagggaaacggcaaagttccggtacagttatttggggatttctgtgaaaacagaccttccgtgcagctgggtacagtcactccgcatataaaaggtatgtatcagcttgcaaacgtcagaaatatttttccggaattcattgcagagtcgctgacagaaggaattcagatctttgaccacaagcttcccggatatgcgcggtgcgatgccgtcatctcgggagtagaaagccggacttcttcgcctgtacgacttataagagaccaatcccttcagagcgaaatccgcgggatctatccttgcggcgaaggcgcaggctatgcaggcgggattacctctgcggctatggatggaatcaaaacagccgaaatgattgcttccgtttatcatccgttcaagatggaatcttaattttttatctaatctgatcattttatgtaaaaaaatgaaaagaagtttaagaattttttaatatcataaacctatacactttttctgaaatgtgataaaatgtattgagttttttagataggaaaaacgaggaggagtacatatgaaaggtgcaggaagtaaaaacgcctgggctttatttctgcttctgctggcaggagtagttcttggtggctttattggtgaactggcaaaaggggtgccggctttatcctggctgggctatggacaatctttcgggatagacgatccgatcgttctgaatctcggagtaatggtcataacatttggtctatcgataaagataaccatggcaagtatcattggcgtgattctttccattatcatatatcgtttcttataatttacagaatctgtcttttgactgagtctgtaaaaatgtcgtgcgaatctaaagaataatatgaatcaatcaaataccataagagaaatgccgagagacgagcgaccatatgaaaagtgttcccgtctcggagccgaacatttaagtgacgttgaattgctggcagtgctattacgaaccggtacccgcggtgaaaatgcattggaacttgcaggaagaattctttatcatgccggcggaatcggcattctcggaattcatcagtttaacgctgaacgtctgaagcagatcaaagggattggcaacgtaaaagcaattcagatatcatgtatatctgaacttgcaaaaaggcttgcaaaagcgtcttatcaggataccgtatgttttaccgatccaaaaacgattgcgcaatattatatggaagatttaagacatgagaaacaggaacatatgaaattattaatgttaaactcgaaggcaaagctgcttggcgaaactaccatttccaaagggactgtgaatgcatccctggtcacgccaagagagctttttatagaagcattgcagaaaaatgcagtatccattatcatcttacacaatcatccaagcggagatccgtctccaagccgggaagatatgctgacaacaaaaaggattcaggatgcaggtgcattaattggaattgagctgttagaccatattataattggcaataattgttatataagttttcgtgaagagggaatgctgtaaaattctgcaaccaagatagaaaggattctgtcagatggcaagaaatgtatacggactggatcttgggtcttatgacatcaaggtctatgataagaaaaaagacacgatctggaaagagaagaacgtgatcgcatttaaagacaatcgtgaccgtgatatttttgcggttggtgatgatgcatttagtatgtatgggaaagctccctcaaacatcgagatcacatttccgatgaaagagggcgttatttccagatttaacgacatgcagtttcttcttcagaacttattaaaaagaggaagacagttttcccgtggttctgaatatgtaattgctgttccaacagatgttaccgaagtagaaaagaaggcgttctttgatcttgtgatccattcaacagccaaagcaaaagaagtaaatatcgtagaacgttcgattgccgatgcagtcggattaaatctggatattcagaatacaaaaggaatcatgatcgcgaatttcggtggtgaaactaccgaactgtctgtactggccggaggcggaatggtactgaaccgtctcgtaaaagtaggcggacatacgtttgatcaggggattatcaatcttgtaaagcacagtcacgacttcctgatcggtcggcagactgctgaagtactgagacggaatttcaatgtctttaccggagattctgattctatcttatcggtagccggcagagacctgatcacaggtgtaccgatgcggaagccggtttctatcatgctgatccgtgctgcaatgaaagatccgttactggaatgcgtcaaagccatccattcccttcttgatagaacacctccggaagtccgcaaagcaatctatgagaatggtattttcctcactggcggacttgcaaatatgcccggtcttgaaatttatatcgaacagatggtaggcatcaagtcaagaactgccctggaaccggatacctgtgcagtcaatggcctgaaacgtattattatgtcgaaagacttaagaaaactgacattttcaatgatagaagataattataggtggatgagataatgaagacaaaaaatcaatcttcccttccaagtaaatactggctgattatcgcaatcgtcatctgcgtcatcctgatgagtgtggaacgtattaccggagggaacggaccaatcagtttcgttgcaaactatacagtcattcctatgcagaaagggatcggatatgttggacgctatatgagtgatctttccgataactttgaaacactacaggacatgaaaaaagaaaacagaaaattacagtccaaagtagatgaccttacaatcgacaacacgcgactacgccaggatcaatatgaactggagaggctgagagaattatataaactggatgaaaattattctgattacaaaaaagtaggtgcacacgtcatttccaataacggctccaactggttcagtgattttacgatcgacaaaggaaagaaggacggcattaaaaagaattgcaatgttctcgccggaagcggactggtcggaattgtaacggaggttggtccgcattatgcaagagtacgttccattattgacgacgaaagtaatatcagtgcaatgctcctttcaacttccgacacctgcgtagtcagaggagacttgaaacagatggagaacggcaggatccggtttgaaaaacttgccaataacgataataagattgaagtcggagaacaggttgttacatctcatgtcagcgaccggttccttcagggactttttgtcggatacgtcagtgaagtgaaagtggattctaataacctgacccggtccggatatattacacctgctgtagatttcactaaactgcaggaggttctcgttattaccacaacgaaaaacgacctgatcaaacaagaatccgcaaatacaaagggagagtaattcatgaaacgaaagttgattacattttgtattatcatcatatgctttttaatggaatgcaccatcttccaccgattgtcttttgcatccatcaaaccgaacctgctgattatcatcacttcatcgttcggatttatgcgtggaaagaaagaggggcttgccgtaggattcctttccggctttttgacggatgtattctggggaaatacacttggattctatacgttacttttctcggtgatcggatatctgaacggatcattccgaagacttttttatgatgatgacattaaacttccaatcgcactgatcgcagtcagcgaattgatctatggtttagttacatacttctgtatgtatcttttgcgaggggattttgcttttgaagcatacctgagacagatcattatgcccgagcttgtatatacaatcctggtcacactgattctgtatcagatcatattacacattaacaagaaactggaagcagaagagcaaaggagtgcaagtaaatttgtatagtttatgggaacggattaaatccggcattgcagaattcgtacaatctcgaatattcgtgctgatcattgtcttttgtattacatcggcaattctggtacagcggatattttatcttcagattgtaaaaggacaggaataccttgacgattataaactgcagattcagaaaacaaaagagattcagggaacccgtggtaatatatatgaccgtaatggcaacctactggcttataatgaactggcatactctgtcacaattgaagacaatggttcttatgacagtattgcacagcagaataaagttttaaacaagacgatttcttctgttattaaaatggtagaatccaatggtgataccgtgatcaataactttggaatcattttggacagtaataatatgtatcagtttgttgcacagaatgaaacgcagaaattacgttttatcgctgatgtatatggtaaatctacaattgataagctttccaaaaaacagaaagagactactgccgatgaactgattcattatctgtgtacaaataagcagaaatttggtattgatgaaaaatctatggacaagtccatggtattaaaactgatcaatatccgttatcagatctggctgaacagttatcagaaatacatttcaactacaattgccgaagatgtcagtgatgcaacagtcgcagacatcatggaaaatctggacaaattgtccggtatcaatgtagaagaagagtccctgagaaaatatgctgacagtaactgttttgcaaacattataggatataccggtcagatttcccaggaagagtatgacgcattaagtgatgcagatcaggaaagatacagcaaaacagacactgtcggtaaagctggtctggaaaagacgctggattctcagcttcagggaaaaaaaggaagtgagaaactttatgttaataacgtcggaaaagtaatcaaaacagtaaagggcacaaagccaaaagccggaaacgatctgtatctgacgatcgatgccaatcttcaaaaagctgcttataacattctggaacaggaacttgcaggcgttctgcttgccaaaatacaaaacaatctggattttgaccggaacaaagtcgaagacggaagtgacgttatcattccgattggtgatgtgtataatgctatgatcaacaatgacgtacttgatatgacgcattttacagatgcaaatgccggtgaagccgaaaaagaggttgcatctgcattcgccgtaagaaaagaagaagtgaagaattctcttacgaaaatattcagcgattccaatgcagcagcatataaagatcagccgaaagaaatacaggcgtacctcacctatctggtatcggatgtgctgacaaacggaacaggtgtagtaatgtcaaaatccatcaataccaaagatgatacttataaagcctggaaagatgatgaatctatcaatgtatataactatctgaattatgctatttcaaagaactggatagatacttcactattgaaagattatataaaatcaaatgaacagtattctgattccagtgaagtatatcagggaattattaattatattttggattatgttgattcagacaatagttttgacaaactgatctaccgctatatgataaaatccggaacaattaccggcaggcaggtatgcatgatgctttatgaacagggaatactggatcaggatgatgagcagtataacggtctgaaaacaggaaatgtcggtgcatatgactttatgcggagtaaaatccagtctttggagattacacccggacagttaggactggagccttgtaccggttcattggttgcaacagatccgaacaccggtgaagtacttgcatgcgtctcttatcccggatatgacaacaaccgtcttgcaaataccatggattctgattactacagcaaactgcttaccaatcagtcccgtccattctacaacaatgcaacacaggaaaagacagcacctggttccacttacaaaccattatctgcaattgccggtctgaccgaaggtgtcattgacgttaacacatatcttccatgtgccggagtatataagaaagtcacaccgaatccaaaatgctggatttacccgtcatcacatggtaacctgaatgtatcacagggtattcagcattcttgtaatgactttttctatgaagtcggttacagactggggctcaataatgtcggtgattcaaagctggacagtgatacctcagatggaaagagtacacagaattattattcaagcgaacgtggtattgcaaaacttcaaaaatatgcggaagaattcggtcttggagatacttcgggtatggaaattcctgaatctgacccgcagatatccgatgacaactctgtattatctgctatcggacagggtaccaacaactatactaccagtcagcttgcaagatatatcacagcagttgcaaatgagggagccgtatacaacttaagtcttttagataaggttacaagccctaaaggaaaaacgatcaaagactatactcctgaagtgaaaaataaagttaccgatgtgtccgcctctacatggcaggcagtccatgaaggtatgagagcagttgtaacttcagaagataaagatatttttacgaaattaaattcgagtggtattgcattatccggtaaaaccggaactgcacagcaaagtcagactcatccagaccacggtctgtttgtaggatttgctcctagtgacagcccacagattgcatttgcaatccgtattgccaacggctacagttcgacatttgcagctgaagtcggtaatgatgtcatggagtactactataaagtcacaccggaaaatgaattgatcacgggatctgcatcagatattggtaccggatcaaatggtggagattaaagaaaggatgattctatgtgaaagaccaggtgctcatcaagagtaacaaatacggcatcactatttattttgattcagacagttcattcgaggaacttctggaagtcgtaaaaaagaaattccaatctgcttccaggttctttgctcacgcaaaaatggctgtggaatatgaaggccgttctttcacagaagatgaagagcggcagctgacaagagaaattgaatcagctgccaatatcgaaatactttgtatcattgagaaaaatactgttacagaacaagtccataaaaaaatgttggacgaaagtcttgaagccatccatgaaaaagacgggcagttctataagggtacattaagaggaaggcaggttcttgagtccgaacagagcattgtgatcataggtgatatcgaagaaggtgctaccgttgcatccaaaggaaatgtaattgtaaccggtaccatatacggtacggtgatcgcaggtgcctccggacgcagagatgctgtcattgcagctctccgtatgcagccgaaaaaactgcggataggagaagtaaaagtaaaaccagttataggaggaagttattcatgggcgaagttatcgtaattacatcaggaaaaggtggagttggaaaaacgactacaactgcaaatgtaggagcaggtttatcaaagcttggcaaaaaggtagtgatcatagataccgatctagggctgcggaatctggatgttgtgatgggcatggaaaatctggtcgtatataatctggtcgatgttgtgaccggcggatgccgcctgaaacaggcattgatccgtgacagccgatatgaaaatctatatctgctcccgtctgcccagacaaaagacaagtcggcggtatcaccggaacagatgaaaaagctcacttctgaattaaaagaagaatttgactacatacttttggattgtccggccggtattgaacaaggctttcaaaatgccattgccggtgctgaccgtgcattagttgttacaactccggaagtatcatccattcgtgatgctgatcgtatcattggacttctggaacagaatcagatccgtaagattgacctgatcatcaaccgcatccggatggacatggtgaagcggggagatatgatgtccgttgatgatgtcaccgaaatcctctcggtacctttaatcggaatccttcctgatgatgaacaggttgttatcgggactaaccagggggaaccggtaattggtctcgattcaacggcaggaaagggatatttaaatatttgtaagcgtattctgggattggaagttccttatataaatcttgatgccggaaagggattcttctcaaggatctcacatgcattcaagaagaattaggaggccctgaatatgttgaaaagctcttccgtatccattgcaaagaaccgtctccgcgcattggtcgtatcggatcgggtacaatgtacgccttccgtttatgatcatatctgtcgggacttatatcaaaccctttccaaatacgtggaacttacagaagatgattttcaagtagagattaaccgttcacagatagtgataagaatagcaggagaagaaacgtgagatcacatagatttacaaaaccatataactggaaaaattacaaattcggaattgttgcacttgtaggtattttatccattttcggtatcttagtcgtaggcagtgcaaaagaatctcttcagaacaaacagattcttggtgtcgtgataggtcttgcggctatgatcatcgtgtcactgattgactatatgtggatcatgaatttttattgggtattgtatatactttctatcattatgcttactgcagtaaaattatttggtgagaatgtaaatggtgcaacccgctggatcaaggtaggctttatccaattccagccttcagagcttgcaaaaatattactgatcatatttttcgcaaaatttttgatggaacacgaagaagatatcaatgataaatttacactgttgaaatatgctgtcctcgcaggtattccgctggtattgatcttaattgagccaaacctgtccacaaccatttgtaccgcacttatgatctgtcttatgatctatgtagccggactaagttataaattcatcggtaccgtccttgtcatattaataccagtcgcagtcatctttttaagtatcgttgttcagcctgaccagaagcttttaaaggattatcagcagaagcgtatccttgcttttatcgaacccgaaaaatatgaaagtgatgaagcttaccagcagaaaaactctgtcatggcaattggttccggtcagctaacaggaaaagggctggataataacactaccacatccgtaaaaaacggtaatttcattcttgaaccacagacagatttcattttcgcgatcattggtgaagaattaggttttgtcggaggttgtataattattgcgttattactattaattgtgatacaatgtattttagttgggatacgatcgcaagaccttgcaggaagaatcatatgctgtggtgttgggggactgattggcatacaaagttttattaacattggtgttgccaccaagatattacctaatactggagtaccattaccttttgtaagttatggactgacatctcttgtaagtttatatattggaattggattagtcttgaacgtaggattacaaccgaaaaaataccagtaaggagtgaataatatgaatataggtctgatagcacatgattcaaaaaaagcactgatgcaaaatttctgtatcgcatatagaggaattttaagcaaacacagtctttatgctacaggaacgacagggagattaattgaagaagttacaaacctgaaagttcataaatatctggccggtcccttaggaggaaagcagcagttaggagcgcagattgcgcagaatgatattgatgctctgatctttttgagagagccttccaatccaaaacctcacgacccggatcttaatgatgtaatccgtatgtgcgacacttataatattccgctggcaacgaatcttgcaacagcagaaattattatcttagcaattgacagaggagatttagactggcgtgaaatgtatcggtaaatactcaaaattaatagctatgctgtcattgacggcaatggtgacaaccggttgtggttttggttcaaagaatgtagtagcagattatgaaatcgaaaattataacacaaatctgtatacaggtgatttatttgcctctgatctgtgtgttgcatccggtgatgtcaatctggaagggattacctctgccgaaacagatacacttcattcagcagccttgtttgatgttgacgggaaaaaagttgacttttcctatcagatgtttgataaaatctatccggcaagtacaaccaagcttatgactgctctggttgctttggaaaacgctgatctgtcagacgttgttacagtgtctcagaatgccgatatgaacagctttgctgcagacgaagcaacttgcggaatacaggctggcgataagattacattatccgatttattatatggtctgttacttcattccggaaatgacaatgcaacagcaattgcagaatatgtgggcggaagtatggatggatttgccaaaatgatgaataaagaagcgaaaaagttaatggcaacaggcacacattttgtaaactccaacggtcttcataatgacgaccattatacaactgcttatgacctttatctcatttttaatgaatgcattaaaaatgatgattttgtcaaaatcatcaaatcaaaatcacataccgcaaaggttaccggaagtagtggtgctgtaagaagtattacctgggaacctactaatttttatgctaccggcgaagcagaaaaaccagacaatgtaactgtcatcggcggaaaaacaggaacaaccaagctggccgggaattgtctcgtccttcttacagaagacgagaacaatcatccatatatctctattgtaatgaatgctgatacaaagccattgctttataaagatatgacagcaattgtggaagcaattcccgaaaaataatatgtaaaaatatagaaggggcatccatagtacggataccccttttttaggatgaacttccgattcttccataaaggctgatgagataaagtccacatagaccgataatggtataaataattctggaaatccatgtgagatttccaaagattacggctacgatgtccagtttaaatataccaaccagaagccagttaagtgcaccgatgatcacaagcgtcaatgcagtgttatcaaaccatttcatctgagtaatcctccttttatcgaatgataatagtattgccggaaaaagtgggattatacattgcggaaaggatttttatcatggataaaaatgaaaaatattatccatattcacaatatctcaaagaaagatatggagaaaaagtatataaacttccggtaaacctcccggtcagctgtccaaatagaattaacggaaacggctgttcgttttgtgcagaaaagggaaccggatttgaagcaatggactctgccgtatctgtcacagaacagcttcttaggactcgcgactacattgagaaacgttatcatgcgcataagtttattgcgtattttcaaaactttacgaatacatttttaccgcttgaaatattccgttcatatatcgaggaagcatcccgcgttcctgatattgttgaaattgccgtctctacacgtccggattgtatacgggatgactacctggatgtattacatacagtccgggaaaaaaccggaatccagattacgatcgaactcggacttcaaacagtgaattatcataccttaaaacaaatatcaagaggtcattctcttgcggaatttatcgatgcggtcctgcatatcaacaaatattctttcgatatctgtacccatgtaatcctgaatcttccgggagatgatctggatgacagcattgaaacggcaaaaatattatctgcacttccggtacagatcgtaaaggcacattctctttatattgctaagaatacaaagttgtgcgaagcgtatgaaaatggtacaatatctctatgtaaaaaagaagagtacctgaaccgcctcatcctgtttctggaatatctgagaccggatattgcaattgagcgcctgttcagccgtattccggaaaaggatgctgtattctgtaactgggacaccagctggtggaagttaagagatgaactatttgaaatcatggcagaaaggcaaagttatcagggaaaggcatttcactatttaaatggatcagcgttacgtatgttaaagcaataaagataggaggccggaaatttggctggaaacacgcaatcatcaaatataaaagtatatcagaagaaaaaacatttaaatattgggatcatcatttttggtgttatatttatttatcttgttgtaactgtattaatgtatctgacagaaaaacatatttctgtttatgaggttcgggaaggatccattctcaaagacaattcctataccggtcttgccatccgtaatgaaacagtaatccgctccaaagacaatggatacgttaattactttgtttcagccggtagtaaagtcggtgctaaaacacagatttattctctttctgaccacaagttacagtttgaatcaaaatcaggaaaaagtcagaaattaacctccgttgagcagaacaatatacgtcagaagacccagactttctgcgaaaattattctgatgaaagtttcggagatgtatatacattaaaaagtaatatctcaagtgtgctggatggaaaatcaaatcagaaccgtcagactcagcttgctgctctgaccgatgcagataccgacggacttcatgtgttttctgcagattctgacggtatcatatgttattatgtggacggattcgaaaaaactactgcggatgatgtaaccccggatatgttaagcaaagaaggctatcgtaaaaaagagcagaaaaacaatacccggattaaatccggcaccccggtatacaaattaatcaaagatgatgactggactttggttattcctttaaccaaagagtgtgcaaaagagttgaaagattcttctagtgtccatgtacgttttccgaaagataatgaaactatgaccgctgcattttccatgaaaaaagtaaaagggtcttatctcggatatcttgcatttgattcttcgatggtacgctatgcccagaatcgttttgttgacgtagaactgatactcgaagatcagtccggacttaaaataccgaaatcagcgattacaaaaaaggacttctatgtaattccggaagattatcttacccagggcggaaatagtaacagtaccggtgtattgatcgataccgggaaagagaatgcagaatttcaggctgttgatatctattaccgcgatacacagaccggttctgtctatgttaatccggatgattttgaaaaaaatacaaccttaaaaaaagcaggctcttcagatacttatcaattatcagaaacaaagcaattaaagggagtttataatatcaaccgggggtatgcagtattccgtcaggtacagattttatgcgaaagcgatgattactatattgtacaaagtggaaatgattatggtctgtccaattatgaccacattgcactgacaggaaaagacgtacatgagggtgatgtcatttcttaatttgatataagagaaaaggagctagaaattatgttaaaagaaaatcttgcaaaagtagaagaaaatatccaggctgcatgcgaccgcgccggccgtaaaagagaagaggttacgttgatcgcagtaagcaaaacaaaacctgtagagatgctgcaggaagcatatgatctaggtgttcgtatcaatggagagaacaaagcacaggaactcgcttccaaatatgaagttctgccaaaagacatccactggcatatgatcggtcatatgcagcgtaataaggtcaaatatattattgataaagtagatcttattcattctgtagattctgtccgattggctgaaacaattgataaagaagcagcaaaacataacattacagccaatatactgatcgaagtgaatgttgcgaaagaagaaagtaagttcggacttatgccggaagaagttcctgcattcgtagagcagatatcaaaattttcacatatccgtgtaaaaggtcttatgacaattgctccatttgtagaaaatcctgaggataatcgccctgtttttgctcatttacgcaaattatctgttgacatcgcaaagaaaaacattgataatattactatgagtattctttctatgggtatgacaaatgactatcaggtagccatagaagaaggagctaccatggtccgtgttggtaccggaatcttcggagcacgagactatactcatcaagtataaacggaagataggagatttattaaaaatgggagtattagataagttcttaagtatcatgaagttggacgacggagacgatgaatacgatgatgatgaattcttcgacgatgacgaatatgatgatgattatgaagaaaagcccaagagaagcctctttcataaaagcacaaaagacaatgataaagattttgatgagaatgacgaggaggaatatacagcacctgtaaagcagaaatcttcattctctaataataaagtaacaccaatgcgtcagcctgcaagaagaagcagtgtaaatatggaagtatgtgtaattaagccaacttctgttgaagattccagagagatcacagagactctgttaagcggacgcacagtgatccttaatctggagggactggatcttgagattgcacagcgtattattgattttacttcaggtgctacatttgcaatcagtggtaacctgcagaagatttcgaattacatattcctggtaacacctacaaatgtagatatttcgggagatcttcaggatctgttgaacacttctctggattcttcatctatgaggacaagattttaattatgaacaaagaagaaagtatgttacagaaacgtctggttgaactttccagacttgcatataacagaggaattgttgtattttctgactttcttaatttgaatgaattgaatattcttcatacgacaccaaaagacatgttcttatcccagtataagacgtatggtggatatgacttatcagagcgtcagatggctgtatttctacctgatgctctttattatgagtatgaatatccaattcagacaatagaagtcagcccgctgaataagaagttttccgaagatcttactcaccgcgattatcttggtgcactgatgaatcttggtattgaccgttgtaagatcggagatattattgcagaagatcataaagcgctgatatttgtcaaagaagaaatggcagaatatgtcaccgataatctgactcagatcagacatactcatgtaaaagcaacgatcggtaccggttttcaggttgattatgaaccgagatacgaagaattaaaaggaaccgtatcatccatccgtctcgatagtgttctcgctttggcatatcctctttccagaagtaagatcacgtctcagattgaagccggaaaagtgtttgtgaatggaaaactgattaccagtaacggataccggttaaaagagaatgatataatttccgttcgtaaaatgggtcgtattgcctataatgggatcctgtctgagacaaaaaaaggacgttatatgatttctgtacgcaaatatatatagttttgtactatgaatccggaaattcatagtatgatcggcaaggagtatcatgaatacaaatacaaaacgtatcacaaattatatcacagcactgatcagtgttgttgtactggtatgcatagaccagtttacaaaatatcttgttgtcggacacttaaaagaccggccggcttatgtactgatcagaaatatattccaattagaatatctcgaaaacagaggagctgcattcgggatactgcaaaaccagagagttttcttttacatcagtgtactcctgattaccgcagctgtgatctggttctacagcaaagtacctatggaaagaaaatatctgccgcttcgtatctgtgcggtattgatcgttggcggagctttcggtaactgtattgaccgtatccgcctgaattatgtagtcgatttcttttattttaaattgatcgactttccgatttttaatgttgcagatatctatgttaccgttgcagcattcctgttagttatattaatactcgtttactataaggaggaagaccttgaaagaattttccatcgatcttaattccgaaggccagcggattgatctctatctttccgaacagttcgaagacagatcaagatcttatattcagaaaatcatcaaagatggatatgtaaaagtaaaccagaagcctgtaaaatccaattacaggctttcttttgatgacagggtagaagttacccttccagaagcaaaagagcctgatatcgtgcctgagaacattccactggatatcttatatgaggatcaggatattattatgatcaataaaccgaaacagatggttgttcaccctgctccaggacattacagcggaacactggtcaatgcactgatgtatcactgcggaaatgaactgtccggtatcaacggctgtatgcgtcccggaattgttcaccgcattgatatggacaccactggttcactggtcatctgcaagaacgataaagctcatcagagcctttccgaacaattaaaggtacactctatccgtcgtatctatgttgcgatcgtacatggtaatatcaaagaagattccggtacggttaatgcaccggtcggacgtcatccgacagaccgcaagaaaatgagtactcactgtaaaaatggacgggaggccattacccactacaaagttctggaacgtttcggagattatacctatatccaatgtgagcttgaaaccggacgaacccatcagatccgtgtccatatggcgagcatcggtcatcctctagtcggtgacgaagtttacggtccgaaaaagtgtccttttaaaggattgcagggacagactttacatgcacgcactcttggtatcatacacccatctaccggagaatacctggaagtcaacgcaccccttccggaatattttatcgaactattagacagactaaggaatatttgcaggtaaattatgtgaaaattctatacatttctccgagtttgctgtataatatgtttatattaatttatgtataggagcgtggtatatatggcaaagacaaatacaatcattacgatcggccgtgaatatggtagtgccggacgccagatcggatataaagttgctgaagatctcggaatcaaattatacgacagagaaatgttggaacgcgcagcaaaggaaagtggtatatgcgaggaactttttgaaacacacgatgaaaaacctacgaacagttttctgtattctctggttatggattcctactcattcggatatccttcatccagttatacagacatgccgatcaatcataaaatttttctcgcacaatttgataccatccgcaagatcgcatcggaaggtccttgtattcttgttggacgttgtgccgactatgcactggaagaatttgataatgtcttaagtgtattcattcatgccgatatggacgcaagagtccgcagaatcgcacggatctatgatctgacagatgcaaaagccaaagatctgattaaaaagactgataagagacgttccagctattataactattacagcaataaaaaatggggtgctgccgaaagctataatatctgccttgacagttctcttcttggaattgacgggacagcaaaggcaatcgaacagttagtagcattaaaagaaactgttacagacagaaaattgtaaatcaaaaatctctgacgtataaatataaattgtatattttacgtcagagatttttttcatattacggcataaaaatgttcgattctgtatatcttacaattcccgcaatttaactgctgaagctgctttacggcggcggttgtcatctattgcggcgtagtgctttttcgtcgtatttacatctttatgtcccagaacatctgccacaagataaatatcgccggtctctttatataacgatgtgccataagtactgcgaagtttgtgcggtgtgatcttcttattcggcgttacctgtctggcatactttttcaccatattttcaactgcctggacacccatacgctttctctgtgtcgataagaacaatgcctgttcatggccggagaggggagtagatgcctcgcggtctcccgttatataattttcaagtgctccggcaacttcatcgccaaaatacacaaccatctgattgccaccttttctggtaaccgtaattccattgttcttaaaatctacatccttgagatccagtccgacacattcggacacacggataccggttcctaataacagcgtaagaatagcaatatcacggtcccgcgttttcttatagtaattcagtgcctgtccggtcaggtgatcgcctgcagattccacaaaatccaacaacaaagcaacttcatcggtatccagacgtatgattgctttatcatgtagttttggcatatctaccagaagtgtcggattcttctgtatgatctgatgtttgaaataatatccgtaaaaacttctaagagcagacattttacgtgccagccctttttccccattggtgatcaattcaccgtcctcatcgcgtttatatactttcaggtattccagatattcctcaatatctacaggttcaaggttctccagatcccggggcataaaacggtccatcgtataattcttatacacaggattattttccataaggaaatggaaaaatacacggatatcgtaagcgtagttaatgcgggtacgtgcagatgattttggttccatagcacggaaatagtccttcgcaaaaggcggcaaagtctttaagacttcacgaaggcgtaacgtctgatcaatctgactctgttcatgataattatgcggtttgtttgatgccgtgtttgttaggttggtagatgaatcaatcatgtaatagaaaacctcctgaatagaaatgatggaataaaagtatcaataaaataatagaaattcctcataaaacaatataattatagcagaattcgttatttccgtctatatcttttggaaaaatcggtatttgtcgtatagatgtgtaccaataacaaaatggcaatgaactactatttttcattcattgccgtgggtgagtataatatatataagcctttcagcatatatatcggaatgattctgttttaaagaatgatttaaaaaatcatctgtaatcgtaatatggaacggtcagatactgactgtcctgaatctgatcggatgaaagcttattgatcttttttacttctgtaatataatcattgacagattcataatcttcagttatatattcctctgcaatattccaaagagtatctcctgaatgaatctgaatacttttatagtacttgcatcttaccggatcatccttgacattatcatgtgcactcacaagaccgctcccataaaatgcactgagtccaagaatcataaacaaagaaaaaataccaacaaatagcttctttacatgtacacttctttttcttcggctgcttgccctgttgtaaccggtataattacttcctctgctttctctatagattctctttgtatccatctcgtacccctccatctattcttcaaaacagttttgtacgaacatttgttctctacgtcatctattatacaagtcgaacaaatgtttgtcaatagattccaccatatatttcgaacatattttctaaacatctgtttgcgttttccgatatcctgtgttatcattaaatatataataattaacgaatttacaatccatcttaaggaggacataatatggcgcaggggaaaataactgcaaagcaggaagaaatattagaatatatcaaatcccagatactggagcgtggcttcccgccatcagtcagagatatctgtgaagcagttcatctgaaatctacttcttctgttcactctcatctggaaactcttgagaagaatggatatatcagaagggatccaaccaaaccacgtgcgattgagatcctggatgactcttttaattttaaccgccgcgaaatggtaaatgtgcctgtcatcggacatgttgctgcaggagaaccacttctcgcagaacagaacatagagaactacttccctatcccgatggaatatatgcctaacaaacagacttttatgctcaaagtacatggcgaaagtatgatcaatgccggtattcttgatggagattttgtactggtcgaacagtctgctgttgccgataatggagatattgtagtcgcattgcttgaagacagtgccactgtcaaaagattttacaaagaagaaggtatcttccgtttacaaccggaaaatgatgcgttggaaccaattatcgtccgtgatcttcagattatgggaaaagtgatcggagttttccgtttcttctaaacgatatttttcagaaaaaaaccccaggcaatatatcaaaaaacggatttctgttttacatgatatatttgcctggggtctttaacaaaagttcattctacacactaaatactaacaaacttttattttatgatactatcctttcgcaaacatgatttttctg

SEQ ID NO: 2794 - DNA, 7834 bp, Unknown
  gut microbiota DNA sequence
aaatcggaatcttggtattttatcataaagtgatcaaatgtgttcaagctttttgaaacaaaaataagagaaacgctgtaatttcaacgtttctcccatttttacttaatgccgcattccctccactgctttgcatttttctattttacagtgtcaaaatatccaacaattcctatatatccatctttctttaaaggcgaccacaacgtatgcagtttcagatgatacatctgactgtcgttcttcaccttcgcttttatctgcaatgtgatttcattattttgtacagatgtctgatttaacaaaaatctaatgtgttgaatgtcttccatgctcacttcgaacacattgaatatatcaaatttaggatcatctctctgacaaagtatctgctgctcctcgtttattatgattagctgccctgaaattgcattatactcgatagaatttttgccactgtgcgatctgaaaaaatctatcttttcctgcataattttaacgacattctgcgaatagtttttgttcggcaaagatttttcactaagtatttcattcgaaagtctctgcgcctcataataatatttattactatccatctctttgctgagcatttttgaaaactgaaggctcaattcttccaaacacttgagaaggatcggattaaactgtccgcattgcccgtccaggatcatcttgattgccgtatcatgatcaaatgctttcttataacatctttcactggtaagagcatcataaacatccacaatagacaccacctgtgcagagattggtatttcttctcctttcaggccatccggatacccatttccatcccatctttcatgatgccatctgcagatttcccatgcggtatgcaccagtggatgattttgcaaaaaatgcatgtcccggatcatggatgctccaatctcactatgagttttcataattttaaattcttcatcggccagtcttccgggtttattcagtatttcttccggaatgcgtattttaccaatatcatgaagcgaagatgcagttgtaattatagcaatatcagtctccgtcagatgatatgcatccgttgtttttaccagttgcctcagcatcatttccgtcgcagtccggatatgtaaaatatgttcgctgctctcactgttgcgtgatcctaatacattgctcagaatcctgatcataatattattattttcttctttttcataaacctgatcaacgaccacattgatcaggcgcttttgatttgcatatagccccaaagtattttgaactctcttttttacgataacagagtcaaatggccgtgtaatataatctgtgattcccatctcatatgctttacgcatagtctcaacagattcttccgaagatatcataattacaggagtttcttcaatgcattggcttagtttcatccatttcaggacttcaaatccatccatctgtggcatgttgatgtctaaaagcatcagatcgattcccggattctcttccataatctggactgcctgatttccattttcagcttccagataatcataggtttctccaagaaattctttcaatatatccctgttgaactttgcatcatcgacaatcagtattttttgtcttttattcatattttctgtttcctttatatttcttgcataactgtttatttttatacatataagtatctgcatcatccaataacatctgcattgtacacgacatatcatcggaggataatgcccatccgcatgcatagtcgattggtatttgattttcataactatttaatctatctttttctctgtacaagaatttcaatatttccttaatttccgcctatattaggaacaaatacttttaatagtctttttcatcttttcaatatccaaaggtttcgccaaatgagcgttcatacccacggcaatgcacttttcagcatcttcctggaatgcatttgctgtcatagctataatcggtactgtttttgcatctgaacgttctaattccctgatttttctcgtagctgtatatccatccataacaggcatcatcagatccatcaaaattacatcaaatgttcctgccggtttctctttaaatagttccagtgcctgctgtccattctccgctctggtaattaacgctccgacatcttcgagaactgtctttgctatttccgcattcagctcattatcttctacaaggagaattcttttcccttttattgtatgaattgcagatgactctatggtatcctcacttccatatacctcttctttcaatgctatgtcaaaagaaagatctatcgtaaattttgttccaataccctgtctgctttctacctgaatacttccacccatcagctctatcatagatttgataataggaagtcccaacccggttcccggcactttgttttctgtggtactatgttctctggaaaattcttcatagatatgtggaagatattcttcactcataccaatgcccgtatcttcacatgaaaaaatatagcgtatctttgaaggattctctgataccgcctcatgtacttctacatagattgaatgtccctccggggtatactttatagcattactgataatattcagcatgatctcctgtaactttgtctgatcacagacaacataatgatgtcttacatctaaaacagcatgatactgcaggttcttctttctgacatcctcttcaaacactgtatttactctgtgaaataatgcatccatatcttcagcttttaactgcaataccgcagtaccactttcaatccgggccatctccagaacctgattgatgattctcagcaaaagattaccggaagactgtatcttttccagatattcttttgcctttctttcattttgcagattcttctccaacaaaccggaaaaacctacaattgcattcatcggagtccggatatcatgactcatgttaaataaaaatcttgtttttgcctcattggcatttttcgcctgctcagcagatttttccagttctgcttcatattgtctttccctgtgttttttactggatattaaataaaatactgtagcaatcaataatgagaatatacaagaaatgacaatacacataatctggtaaaaacgtggaatccatccccttgaaggtataatgtcaaaataccatgtgttatttggcactgtacattctactgtcagaatattatccgacatattatcctggctctctgctaaaataatcttgtcgctgctgcttctgtcatatgtccaaattctgtaacagaaatctgcatcgcttaaataatcaagatttatctctctaatgaaacgatcccagtcaatcaccagaatcacaaagccccagaactcaccctgttctgaattattgtcctgataaaccggattaaaaagcaatgctcctgttcccccctgctttaactggtatggtcctccaagcgtatatttcccgctatcccttgccagaattgcatcctttttccgttcatgttcctgcagcatatccagtccaaaagccccctcatttccctctttcggataaatgtctgtaacaatcccttcaggtgccagttcaaatgcctttatcactccatcttcattaggaatcttttctgccagttcagaaaatgtattctcatccagattctctcctgcactgatataatttcccaaaagagcagagagcatgctatactgatccagtcttgccctgactcttttctcagtaatctgcgccatatattttccggttgtcttttcatccttttccaaattatgaagcagaaaaacgccaacaatcaatgctgtcagaaaagcaatcaatccaacaatatagcaatgtacttttatttttttatatagttcgctgtcctttttcattctgctatccctctgttattctcttctcggtcactgacatatctgcttcccagcacagaattttcggattgtatccatcagttcctgtacatttaaaggttttgacaggtgcgcatccatccctgcctccatcgtctttcttttatcttcagcaaaagcattggctgttatggcaatgattggaatcatttctgcatctttctttccactgccacgaatcgccctggctgcctgatatccgtccatcacaggcatcatgatatccattagaaccgcatcgtaatatccttccggcatttttaggaaacattccactgcctgctgtccatcttccgcctctgtgacggaaattccctcatctttcagaaggaatgccgcaatttccctgttgagctcgttatcctctgccaatagaatacggcacccggacagattttcctttggtaattcagacatttcctgtacaactgcaggttcttctgctatttcaaaaggtatgaccacatgtatggtagtaccctgattttccacactgtcaatctgaatggttccatccatacgatcaagcagctcttttacaatcgccatgccaagtccggtacctttatagtatgatctggcgccctgatcagcctgaacaaatggctgaaatatattcttcaggaaatcctctgacattccgattcccgtatcttttatagtcacatctaccagcactctttcatcggattccttctcttctttcaagaagcaatccactgagccatttttacggttgtatttaatactgtttgtaatcagatttaaaaatatctgttttacatgcagggagcttccggtaagattcggatatggaatcgaataaggatcatccataaaatgaatcgtaatacactcttcatctgccctcatctgtgcaatggtttccacctcacgaagcagatccggcagataaaaatcttctttcggaatttttgtttcttcattttccagtttactcatttccagtgtgtcattgatcagcgacaacagatggtctgccgctactcttgctttaaggcggctggaatccaccaatgttctgtcctccgggtgcttcatgcagatatccataagtccgataattccattcaatggtgtacgcatatcatgggacatcctggaaagaaaatccgatttactctggtttgcttttttctcgctctccaaggcaatggttttttccaccagttcatttttatccagaatcagattccagtgttcgattactccattcggtttgcaaattttgtgtcccctgtcctcaatatatttccaggatccatttttgcatttcattcgatatgtgatttcataatgatccgctttactatactgctccaacgcctgtgcaattccctgttccagatcgtccggatgcgccaggtcaacaatcgtccctccagaagcttccatcaatttctccggagtatcatatcccagcatctgtgcaaaatgctctgaaacatacttaaaagaatattccggatcatcattgctgattttcacaccacccggcagtgcagatgtgatcatgtccagctgatgcttaagttcctggtttactttttgcaaagaatctttataaaaacgctctttctgtacgatctcatctatacttcggaaaccaaggaacgcaaaatggctgccttcctcgtactcttttacaatatgtgcctgaaaacaggacaaacctgctgcatttggtgacgtctcaaaagaaaaatgatattcgtcttctgtttcaaaatgctttttaatcatattacggtccagttcccgacgcattacgtcacgaaattccggaagtgcaaatgcaaaagcataggcatccacataatctgaaaatgctttgaactcttcatgtttctgggcatgatttgtctcctgattaaatacaaactcatactcatccgtatccagattcaaaacaaaagctgtcgtataatcacggctcagtcctgacaaaatcctgttcttttttatcagttcctgcttataagtaatttcaacctgtttttctttatcaatctgccggacaacatatagaacatttgtaaccttaccagatgggttccgtttttttacaataaatcttgccagatgccaggatccactttgtgcccggtattcaaccgcaatactttccgtgtctttcagcctgtcagccagagtcgatgtatcaaggaactttttcatcatttcctgatgctccccatcaacaattgtattgatagcatgctggaaatcttcttccgtttttccatgcttgcctgtaagtttatgcatctcgttgccggcagatatttcttcataagttcctgtttccagattcattcggtagatcagccagtataatttactgatggaatcaatgatttctccattcagatttgcagtttccagtgcatcctcaagtgccttcatcattctcaggttttcacggacacttcccatatggcaccccacatcagataacagattcatggacaccatattctgattcagctccgggttatccaatccaatgaagcctataaatttatgatttgtataaatcggcacagcaatcagagcatgaatattctgaggctttaaaatttcatattcctgtggggtttcttctgctatttcttccaggtcataaatgatgatatttttcttctggataaatgtttccacccagttctgcatcaggcagacgggaactttctgcagattctgtatctgcggttcgattcccgaggcacaccattcaaatgtatttttaaaactttcttttttttctgaactccattcaaaaatatacgctctgtctgctgctgtgtattttccaacgctcttcagtatagatggcgtaatgtcatccagttgtttttcattctctgcctgactcatggaagaaatcttatgaaggatttcatccatataatacaatttactttttttatcatctctgtattcttccatatcacttttccccagtttataattattagccgcctgtcttcttgctacttacgtatgctccaattgggaaacaacaacttctatacaccaaacacctggtcaaaaacagcaagtattgtatttatatcaattggttttgcaatatgagcattcatacctgctttaaatgccttctttttatcttcttcgaatgcgtttgcggtcatggcaacgattggaatatttgctttcctgttattcctcagaaggcgtcccaaaacagcctcatagtttcctccgatagctttatagcactcctgcattgtcatcttttagccctcctgtcaattgtattccactaattcatgaacctctgctaatcattatgaacataccttaaaatcgtttttataacttcctcaatcacaatcggctttgacaaatgtgcattcattcctgcatccaatgatgcctgaacatcttcagcaaatgaattggctgtcattgctataataggaatattttttccatctggtctgtcattcatcgccctgattgcttttgccacttcataaccgttcatttcaggcatcatgatatccattaggattacatcaaacgtgccttccggatgattgctgaaaatctcaacagcattctttccatctacagctctttctacattcattccaaactcttccagctgcacggtcgcaatttctgcattcagctcattatcctctgcaagaaggactttcacacctgtaagatttatcttttcagaaaaacctgtgtctgacttattacattccttatctgtaatttccagaggaatatccacagtaaaagtggttccctcctgctttttgctttgcacggaaatggttccacccatcatatctacatacttctttacgatagccatccccagt

SEQ ID NO: 2795 - DNA, 1219 bp, Unknown
  gut microbiota DNA sequence
gtgacattcccactttcatcactccggccaagaccatcacccatattggattcatttttacttttcgaagtaatatcatacaaaccacaaaaatcactaccagactccacttcgtccccgcaagtgcgatctgatccctgcttccccagaatgccgtgatcaggattgcgatccctgctgatgcgatcatcgccacaacggcaggtcttaaagaccccagcacgccttgcagtacctccatactgcgatattttaaatagagttttgcaatgacagttacgatgatacatgaaggcagaatgcatccaaatgttgccgccagcgcacccggtattcccgcaatcttgattccgacaaaggttgccgaattcactgcgatcggtcccggtgtcatctgggagattgtaataagatccgtaaattccgacatactaagccaatgatgtcccgtcacaacctgtccctgtatcaaaggcatcgccgcataaccgccgccaaagctgaacatcccaacctgtaaaaaactaaaaaaaagctgcagatatatcatttgcctgctcctttcctgttcatacatgtgcgtaaaacacccagcgatccacatatgatcacgatatacacaacatttacctcaaatacacaggacgccacaaatgcccctgccatgatcagcagtgagattccgtccttttcctttactacacctgctcccatctcatacgtcaccgatgcaatcaccgctccgactcccgcctgcatgccttccagcatctggcttaccagttcattactacgaaatgtattataacagaccgaaagtaacgatataataacaaatggcggaataattgttccaatgatcgatatcagtacaccggtaattcccgcaagcttatatcctacgacaatcgctccgtttatcgcaatcgccccgggtgaagactgtgcgattgcaaccagatccagcatttctttctcttcgatccagtgaagctcatctacgaatttcttcttcatcaaactcacgatcacgtagccaccgccgaatgtaaatgcgcttaaatataatgttgaaatgaatatcttccataagactttttttctgctgttcatattcgatttcctttttctcctgtgatttcaactctaatgtaacacatgtcatatttatattatacactttttaagataataaaaatttttaaatatccacaaacag

SEQ ID NO: 2796 - DNA, 1263 bp, Unknown
  gut microbiota DNA sequence
tccccactggcccaaaattcactaaagttctagtcattttagccaattcatgttattattttaaataggatttttaacaaaacgcacaggaaggagcattttaacaatgaacgaaagaattaaccgcgtattggaaaaaatgaaagagaaaggaattgatcagttattggtatctgatccactgagcatccgctttttaacaggcatcatggtaaatcctggggaaagattatatgcactgttactcagaacaagtggaaagcatacattattcctgaactatctgtattatgtatcaaatacaggatttgaggaagtgtggttcagtgacatggatgatcagatcggggttctgatggagcacatcgataccaagagtactcttggaattgacaaaacatggccagctcgtttcctcattccacttcaggagcgctgccctgagatgaagacaatctggggatctgactgcgtagacggtgttcgtgcagttaagaatgcagaagaaattgcaatcatgaaacaggcatctgttatcaatgataaggttatggaaagagttgcagacttcatcaaagaaggtatgacagaaaaagaagttgcggacttcatcgatgctgagtacctgaaagaaggagcaagcggagtaagctttgataccatcgtatgtttcggagctaatgctgctgaccagcaccatacaccaagtgagacaagaactctgaaagccggagaatgtgtcctgatcgatatgggatgtatctggaatggttactgctcagatatgacaagaacattctactgcaagagcgtagacgatgagcaggctgctatccatgatctggttcgtacagcagttgagaaggctgaagccgttatcaaacctggtgtacgtttctgtgatatcgacgctcaggcaagagatctgatcgacgaagccggatacagcgaatattggagaatccgtcttggacacttcatcggacaggaagatcacgagtatggtgatgtaagcccgatcaacaagaatgtagctgagcctggtatgatcttctctatcgagcctggtatctacctcgaaggaaaatacggtgttcgtgttgaagaccttgttctcgtaacagaagacggacatgaacttctgaatgctgtagataagaaataccgcattgtaggttaatttacatatttaatttggaattataatacaatacacaaagaggaactgttgtgagagtgtaaaatattttgtgtaaatctctt

SEQ ID NO: 2797 - DNA, 960 bp, Unknown
  gut microbiota DNA sequence
gcatagaatgtgtctattttgacatatttcctgccattccactttgccttatattctaactgtcttgtcagttcataccatgatacatcacttatagactttgacaaacggtgattttttaccatgttttttatctgcaaatcttccgaaactatcacttggttttcgctgataatctcatgggacatcttgtgcagataatcttttctggtatttgttattttttcatggcatattgctatctttttctttgttttgtagtaattttgacttcttttctctttatgggctaactgcctttgcagtttcaccagtttcttttcgtattttctgatgatttctggattttcgtatttctttccagcagaagtaatacataactccttaatacctaaatctattcctgtattttgttttatatgtggcagttccacgtgttctgtttccactaaaattgatacataatactttccactcggaacttgtgatatcgttgccgattttatctgtccgataaaatttctatgcagttttgcttttattccttttaatttaggcagttttactctattgcacccgaaatctactgttatattgccgttcgtaaaatttgttgtatatgacttatgattattgtgtttactcttaaacttcggataacctgcgtgttccttgaaaaacttctggtatgcagcatccatgttgtaaatcgcatttgtcagagcaaatttatccacttctttcagccattcatactctttctttaattgtctattgcagtaattgttacagtcggttttactaactgtttttttctctttctcatatacttctttccggtatgccagtgtctgattatatacaaaacggcaacagccaaatgtttttgcaatctgtattttctgctcattatttggatatattctatatttatatgcctttaacatccactgtcacctt

SEQ ID NO: 2798 - DNA, 10833 bp, Unknown
  gut microbiota DNA sequence
ctgtgaaaggttctcttttctttttgcaactgtgaaatggcaagataataacgttatatacattgtgtattaagtacagatattgtatttctgcatgatgggaacatagggagtccatataaaggcacttaatacggggcatgacggaagtctcagcaccggccatgcaaacagtccgaaggacatgctaagccgtctggaaacgatggtactgatgggaatggatcttccccttcctgcaattcagagacagatcgcctccggtctggatatcattgtacatctcggccgtctgagagataagaccagaaaagtcctggaagtaacagaagtactgggatactgggaggaagaaatccacctgcagacgctgtattgctttgaagaagcatataaggaggcggtgaatgtaacagaagatgaagaaaaaagagaaatcaggatggaaagaaaagtcagcggagactggaaaaaaattgcagaactttgtcaccgcgagaagcttatggcagcaggatatcacatttaaagaacgtggggcagccgggggaaaggctgccatactcattgggattacggcatggctttattaccggaagatatgggctgtgccggcactgatcccgctggggatatggctgtacagagagtttctgaaagaagagaaaaagaaaaaggaacaggaattccagaagcagttccgcgagatgatacagtctctgtcggcagcactgaacacgggctattcggtagaaaatgcattctatgaaacgcagaaagaattaaaaatcctttatcctccggaggcccggatttctaaggaattattggttattacgagaaaactgcggatacatattccggttgaacaggtgctggaggaatttgcagaacaagttctgtcggaggatgtaaagagttttgtaaccgtattcgtaacggcaaagaaaagcggtggggacatgatcggtattatccgtaatacagcgaatcagatcggagacaagatagaagtgaaaagagagatcgataccatgcttgctgcaaagaaatatgaatttcagatcatgtcggtagtgccgtatggaattatcggttatatgtcacttagttttccggaattcatgaatgaattatatgggaatatggcaggaatcggggtgatgacattatgtcttggaatctacgcaggcgcttattatctgggaataaggatattgagaatcgacgtatagtgcgggtgacttgtgtactgttcatatccggaatattactgaccggagcagatgccgttcgttctgtaaagcagctacaaccggccattgagaggaatgattacggaaaagggtcaaagacggaagtcttagacgtaaaagtcggggatacaaagaaaaaaataagaacggatatagaagtatcggaacgccggtatacgacagaagagatacaggaactgttcggaaggatcatccggaggatggacaggctgatactaaatgaaaaccagacgccggatcatgtggagacagacctgaacctgatcacagagattccgggagaaccggtgacggtctcctgggaactggacaggtatgatgtaatgaatgttaagggcgagatacaggagaagaatattgcaaaaaagggaacgcttgtaaaactgaatgcggtacttacttatacggaaaatgaaaaagaacaggcagcttatcagtgcgtggtctgtgtatatcctaagaagttaagcggagaggaaaagataaagaaaatagtaacggaaaatatgaaaaaggcagatgaaaagcagcgggaacaggaaacgctgatcctgccggaacgtctggggaaaaatgaacttcgttattatcatccgtttaataaccggggaatgattgtgctcacaatgagcataatgatcggaatactgctctgtgcattacagaaacagaatgaaaaaaaggcactggaagacagaaaaaaacagatgcttaaggactatccggatattatcaataaactgacattgtatctgggagcaggcatgacggtaaagcgtgcctggagaaaggtaaccgagggctatgcgagagaaaaagaagaagggaaaaagaggtacgcatatgaagaaatgatacagacctgtcatgagatggacagtggtgtgacagaatcggagagctatgagaatttcggcagacggtgtgacgttcaggtgtatataagactgggggctttgttgtcacagaatctgcggaaaggaacaaaaggattgacagaactgttaaaactggaatccatacaggcatttgaagagcggaaagcacaggcaaaaaggcttggggaagaagctgggacaaagctgctgcttccaatgtttcttatgctggcggtggtactggtcattgtgatagtaccggcatttctgacattgcagatatagatgaaaaataaaagaaaaagaagaaaggggaatacagtatgtggagaattcgatatgcattacaggtattaaaagacgaccgggggattggggtggtagaagtgatcttgatcctggtcgtactgatcggacttgtgatcatcttcaaatcacagcttaccagtctggtgcagacaatattcgaaaagattaccagcgaaagttccggaatttaagtgtggtgagcaccggaaagaaggagctgacgacagggtatgtaagaggagaggtaacggtatatctgacactgacatttattctgcttgtctcgcttgtacttgcgttgacggaaagcgcatccatccagatggcaaagaattacagaagggcagatatgaaccgggcagtggagtgcgtatttgcggaatatcaaaaagaacttctggaacattatgatgtatttgccatagaagcaggatatgaaagcgggacatacagtgagcagaatttgttagaccgcctgtcatattacggtgctgatatggaaaatgatataaagagaatccggctgttcacagatcagaatggggaattgttcatggatcaggccggtaaatacatgaaacacaaatacgggatctcatgggcagacaagtatcttgggagtacttccatctggaagaaccaggaacggcaggcagatgaaattaccagagaagaaaaagcgcagacagatcgtctggaggagcttctgagcgggcaggaaatggaacttccgggcgaagagaatccgttggaacatgtagcaggactgaagcaggcaccgattttgaatctggtattaccgaaagaaacacaggtatcagaaaaacaggttgtgtcagaggacatgccggagaaccgagagaatcagaccggttacggaacatttgaagatgtggaatcggaaggaggaacactggattccgtattgctgggcgggtatatacaggaacattttgcggattttctggatgaaccgaagggtgggagcctggactatgaagtggaatatattctggctggcaggcaaagtgaccgggagaatctggaagcggttgcgaacaaattagtgctgctgagattcgtgccgaattatctgtatctgcagaccaacagtaccagacaggctgaggcacgggcagcggcagggacattatgtacactgcttgcggtaccggcggttacagaagctgcagcgcagggaattcttctggcatgggcatacggggaatccgtgatggatgtgagaacattgctgaatggaaaaaagattgcagttgtaaaggatgatgcaagctggcagctctcattatccggtcttatgaagcttggaacagaggaagacaccggcgacggggcggatgtagaaggtggtatggactacaaagactatgtgcgaatgttgttattcctggaagataaagggaaattaacagtaagaaccatgggcgtgatcgagaaggatatgcagacggtttacagccagccgtcatttcggatcgattactgtgtcggaagaatggaagtggacacggtgtgtaagctgagaagagggatatcgtatagatttcagacatattacggctatcagtagtgagtataagaacaataacatgaggcggataaagatgccctttcaggtatcgttagaaatcccggaaatataaaaataataaagaaaggagcaggattcgcaaaatgagaaataatttattctccccctcacaacctatcaatcattcagtatctgaaagggtatctttatccgcctcaacacgattggaaaaattattccgtaataaaagaaagggaagcgttaccgtagaggcggcagcaacggtaccgctgtttttcctggcggttgtgacactgctgtaccttttggaaatgatggcagtacatactgcagtcaggagcagtctgcagtatgcaggaaaacaggcggcaaaagacacctgtatcacacagatgctgatgccgtcaaaggtagagcgtgatgtcgtctatgcaatcggagagacaaggatggaaagaagtatcattgcaggcggcagcagtgggatggactgttcggcatcaagaatgtctgtgcgtaccgggattggaacattgaacgcagaatatcaggtgaaaattcctgtgccggtattcggtatcagaccggtaaaatgcagggaaaccatgaagataaaagcatggagcggatatgaaaaagagggattatccgatatgggaaatgatacggtctatgtgacggagaacggtcttgtatatcacaaagattatcattgttcctatctggatctgtcgatccggatgacgcatatgggtacggtgtctgatcttcgtaatgaaagtggcggcagatattatccatgtgaacattgcatgaaaggaaatgcaggaactatatacattacaaattttggagaccggtatcatagttcattgtcatgcagtggattaaaacggacaatctatgcgataccggtatcggaggcagcgggaaagggggcatgttccaaatgtggacggtaagccgcatcgtggcgatggtcatactgacaggactgtcgtttatggattataagatcaggaaagttccgagagatgtactgttattgtgtatggcaggaacggttctatatcaggcagttacacagaatatagactggatggtatcgctgggaggcgggctgatcggtatgatatttataggaatcagtaagattacacgggaagcaattggatacggggacagtctggcgattctgatacttggaatctatctgggagtatggggacttctggaagttcttgcgacttcattttttattctggggattcttgctctgggatgcgtgaccctgagacggaagaagagtcttgcattcccattctatccgtttctgacagtgggctatctgtttggcgtatgtatcggaggactgtgagatggaacggatcataaacatagataagaaacatgctctgaacggaagctttacagtggaaatgtccctgctgatgccgatgatattatttcttgttatggggtgcgtcctggcatgtttttattatcatgacaagaatattattgcgggagcagcatacgagactgctgttgtcggaagtacgaaagccagagaaaaggatggaatacaggaagcggaattaaaagccttatttcaggaacgggtcgggaaaaagtgcatcctctttccgggagccgtagcggtatgttccgtgagcaaagaagagatccgtgtgtcggccgtggcgaaaagacggaagatgtcacttgcggtagaaagcagggcagcggtaacagaaccggaacggtatatccgggatatccgcaggataaagaaataaatggggaatgaaagaatggaacgaaagataacgatagaagaacatgtattatataaagaggactatcagatgaagatgctgaaagccaattcaccggaaggattccttaaggtggcaggaagaggcatgaatggcagcagttattatgattatgatgtaagcggaaagatatctatgcaggcaatgtatacaagagcaaagctaaaggcggaggatatacggcaatttatgtaccagtttgggaatgtgctgaaagaaaccggaaaatatctgctggatatccactgtattctactggaaccggaatatatattttatgaggaagggcaattctttttctgttattatccgccggcaacgcaggatctatgggagaaattccatgtgctgacagagtacatggtgaaagttgcggattacgaggaagaagaatgtgtccggctggcatttttgctgcataagggaacgatggaagaaaattacagtctggagaaactaatcgcagaatgtggggaaagagaagaaaaagatatggaaaaaccagtaagaaaaacaatgatagatgaactgctggaagaaaaaagagagcggacatcttattacgatacggaagaacatgactggattacggaacaggagatgggaagctcgatcatgcgtgagacagataatctgtggatcccggtaaagcgtttcctgactaaacataaaaaaacaaaatggggagaatgggacggactgcatattgaagaagaggaattgtaatatttaagtaatctatgttatactgataaagacagaaaatgaatagattgaaaggtaacggacgatagaagatgaataagaacacaataaaagcaccatgtactgtattactggcagttgtgaatgtaatagtctttctggtactgtcatttcagggaatgacggaggatggaagattcatgttacagcatggggcaatgtatgttccatatctgataaagaacggagagtattaccggctgtttacgagtatgtttctccacttcggatacgatcatcttttcaataatatggttgtgcttgtagcgatggggtggaatctggaacttgagataggaaagataaagttcctcatcgtatattttgtaagcggccttgcagggaatatcctgtctgcatggtgggacatactgacaggaagtatggcagtatcggcaggcgcatccggtgcaatcttcggaattatcggtgcacttctgtatgtggcgatccgtaaccggggaaggataggagagatatccggcaaaggattagtgtttatggttgtgctgacattatattatggatttaccagtggtggcgtagacaatatggcacacatcggaggtctggcagccggtttcctgatgggagtattactgtaccggaagcgtaagggtaaacgtggttccgttatgtaagacggagttaagcgtgaccgttccatgatgtgcctggatgatccggcgggtgattgcaagtccaagaccggtcccgtccggtttgtgagtgacaaatggctcgaagatagtcttctggtcttcgggagcgatgccgcatccgttgtccctgaccccgatatgcagagaatctgtctggagagtgacagagaatgtaatgaccggcttctgggaatcaggagcttttttgttcagtgcatcgcaggcattacgaagaagattcagaactgcctgacggagctttacgggatctgcagatatttccgggagatcctcgggaatacgggaaacaaattcgatatctgtatcaacaatagaagctgcgaaggataaagcaatcctgcggaaataggtacttgcacttaccggggtaagttccagacgttctccgttattgtaagaagacagatcctccaggagaaatttcatgtattcgatatcctgatgcagttccgtccaatgggaaaatgtaaggacttccggatgttgtgattcgataagctggagtgtactgtaaaccagtgtcagaggattacggatctcgtgacttatggtactgatctccatctgatgagaggttaaaagccggtttataagtgcttcgttttcaggattttcctgcatgatctgttgtaatttgtcatagtctgtcgatgataacataataattaccgcccctttctgaggtatcagtttagcattggcggtttaaataatcaatcataaattttaaaagaaagaaggataagattatgaaggatgagaattgtattttttgtaaactggcgaatggagacattccgacagcgactgtgtatgaggatgaagatttccgggtgatcctggatgccaatccggcagcaaaaggacacgcactgatcctgccaaaagaacattatgccaatctgtatgagattgatgatgaacttgcaggaaaatcaatgatccttgcgaagaaaatgatcacaaagctcacaaaagcactgggctgtgatggctacaatattgtccagaataacggtgaagctgccggacagacagtatttcattatcatgtgcacatgatcccgagacataaagatgacaaagtcggacttggatggacgatgcatgagttgacagaagaagaaaaagaagatgttttatcaaagattaagtagataaaaggtaggagcgtaaagtgggaagagagtttacaggggaaagtgcctttgtggatgcatatagcgaatattttgacgttgtatacagggaggcactcagatactctggaaaccatcacgtagcagaagaaattgcgcaggatgccttcttcatggcatatgtacagaatggaaatgaatccaagcagcagattaaagcatggatgctgatgcttgcaaagtacagagccatgaattatataagagaccataaacgcgaagtgtcgttagaggaaataacgatgtcggaagacgaatatccggacgctctggttgatgacagttcagaagagtatgtaatagcgatgctcaaggaacaaggtttccgcaaactcggaattgatatattccgggaattgtatcagaaaaaggccagatggtatcaggcagtgacacttgtatattatgtagatatgccgcagaaggaagccgctaagcagatgggcgttacattatatgcattggaaggtatgctgaaaagagcaagaaaatggatgataaaaaggtacaaagatgagtatgaccgcttacacaatacataaaaaacaggtggaagtacaaccacctgttttttatgtattacagagataaatgcagatcagtgtctggcaacggattcgatcagatcgataatggtatcgatggaattctgctgaggagaatttttcattgcctgaatgtacgtctcacggttctgataaaggtccgtgattgctttcaggaggacatcatgattcagttcctcttcttccagaacaacactgtatccctgacgttcgaaagaacgggcgttcaggatctggtcaccacggcttgcgtttgcggagagtggaatcagaagattcggtttgtgcagtgcaagaagttcgcagatcgcattggctccggctcttgaaataacaagatctgtcagagcgaagaggtccttcagttcgtctttgatatattcgaactgagcataaccttccaggtctttcaaagattcatcaattttgcccttgccacagagatgaactatctggaaagactgaagcaattcaggaaggacactgcggacagcatcgttgacggcaacagaaccaagacttccgccaacgaccatgatcactggtttgtcctgagtgaagtgcagaaattccaatgccttatatttatcaccggataacagttcctgacgaatcggagagcctgtgagaacagcctttccggcaggaagatgctcgatggtttccgggaagttacagcagatttttgatgccgatggcatggaaatcttattagcaagtcccggtgtcatgtcagactcatggataatggtcgggacatgacggcttttaccggcaagaacaacaggaacggatacgaagcctcctttggagaagatgacatcaggatgaaggatcttcacaagtttttttgcttcgccgagtcctttgatcacacggaaaggatccgtaaagttctgcacgctgaagtagcggcggagtttaccggttgagattccgtgatacggaataccgaactgttcaatcagttctttttcaattccattataagaacctatatagtgaatatcatagtttaattctttcaggcgtggcagaagagcaatgttaggtgtaacatgcccggcagtaccgccaccggttaagataatacgtttcataattacctccagacttgaatatgtattattcttgcatacataaaatataataaagattatatctatattatactttctgaaagaaataggtcaagtggcaaaactatggagaaatttacagaccagtcaaaaatttgagggtagcaaaatgaatgataagaaagacgaatttaaagaatgcattgccagagaatttgaagagattgccagagaggaagaagaatttctggaaaatgacaccagtcttgtcgtgcctgaagggacaaaggaagctgtcctcgcaagagtaagagaacagatccgtgcatatgagatggagcagaccaggaaagaaacagaagaaagagaagaagcaatcaaccatctctctgaagaagaccgcgaggctctggagctgggacgcaagatgctgaaagcagggatcggacaaaaggatccggaggaaccttccggaaagaaagtccgccgcaaaaagaagcctttgaaaatgtatctcgcactggcagcagttattgtctgtgtactggcaatggggattaccagtatgggaggtccgaagaggattgtgcggatgatgacgcagaatgttggggatagagaggttgaaaaatcaagtacgagccataaggtaaaaatgatagaaag

SEQ ID NO: 2799 - DNA, 77969 bp, Unknown
  gut microbiota DNA sequence
gaacctgaacaggaacggcttcctactttttatgcaggtccgggtagtcatgccttctaaattaaatcccaagatacacttgtttcatatattcaatccgggaactcatattttgcatcaggagatctacaagtgtaacggcagccatggattctaccacaacaactgcacgaggaacgataactggatcgtggcgtccggaaatctcaattttaatattttcaccattagtgttcactgttttctgcggctgggaaatagatggagtaggctttatggccgcacgtaaaaggatcgtgcttccgtcactgagacctccgagaattccgccgctgtgattggtcagtttggatatctgcccgttttcagcgaagaatgagtcgttattcttacttcctttagaagagacgacagaaaatccatcgccgatttcgacaccttttacagcaccgatggacatgactgcttttgcaagagcggcatccagtttgttaaataccggttcaccgataccggatggcatgccgtgaatcatgcattcgatcagtccaccggaagaatcctgttctctgatacaggattcgagatatgcacttgcctgttcagcatatttctgattcggcatataaagcctgttctcgttaattgcagagtaatcatatgcatcagaaggaatagaaaaaggtccgatagctttggtgtaagtggtaagatgaattccgagtgcttcaagaatccggcaggcaattgcaccgccggcaacccgtccgatggtttcacgcccggaagtacgtccgccaccgcgatagtcacgcactccgtatttctggtcgaaggtataatcagcatgcccggggcggtaacagtctttaatcttgctgtaatcatgagaacgctggtcagtgttgcgtacgataagagaaatcggtgttccggttgtatatccttcaaagacacccgaaagaatctctacgctatcggattcctttcttgctgtggtgaatttgctttgtccgggtttcctgcggtcaaggaatgtctgtatataatcactggtaaggggaatgcctgccgggcatccatcgacaacaacgccgagtgccggaccatgggattccccccatgttgtaatagtaaataaagttccaaaagttgatcctgccatatcatagtctccttaattatgtattagtcatcgtgaatataataatctataaagtattatatataaaaagaaacgaagccgcaatcataaaaggtgtataaaatatcctgtaaaaaaataagaattagactgtactttttgatatatgcatattataattagaaagcatgaatcttatagaagtagaatattcatatagaggagttaagattaatgagcagaaaagatatgcagtcagatgagattgaagaaataatgaaagaaatgctgaacgatgatgagtatgcagatgagggatttgaggatattgacagagaagataaccggcatgaatcaaagaaagcaatgaaaaaagagaaaaaagcagaaagaaaatcaagaagaaaaaagcggaaaatgagcaataaagtagcgattgtcctttcgctgattgtggcagttatagcaatcggatatgtggcaacagcggtattttacagcacacattttttcgcaaatacagaaataaacggagtggactgctcaaataaaagtataaagcaagtggaagcttatctggagaagcaggtttctgattataatcttactttgaaggaaacagaaggaaaaacggaagaaatcagcgggcaggatatttctttgaaatatgtggaaggaaagcaggttgagaaacttgtgaagagccagaacccgtttctgtggccggaagctttttggaaatccagaaagatggaagcaaaaataggtgttgaatacgatgaaagtgcattgaaagcactgattgcaaatctggattgtatgaaggaagaaaatcagacggaaccggttaatgcacatccggaatttcagaatgataaatttgtagtcataccggaaactgacgggacaaagattgatacagatacattcagggaaaaagtaatcactgctgtagatggattgaatgcggagctggatctttcgaaagaaagctgttatttaaaaccgtcatatactgctgaatcaaaaaaagtgacagaggcctgtgatgcaatgaataaatatctcggagccatggttacttatgattttaaaccaaacacggaagtggtggactcgtcaatgatatcccagtgggtaaaagtagatgatgatatgaatgttacgtttgatgataacgctgttaaagaatacattcagtcacttgcggcaaaatacgatacaaaaggaaaagaaagaacatttacatccgcaagtggtaacactgtcactgtttctggtggaagctacggctggaagattgaccagaatgcagaatataatgcgttgatcgcgaatattcagaatgcagaaacagtaacaagagaaccgaattattcaagccgcgctgcaagtcatgagggcaatgatgtgggaaatacttatgcagaagtaaatctgacaacacaacatatgtattatgtaaaagacggccagattgcactggaaacagatgtagtaacaggtaatcccaataaaggaaacgatactccgacaggagtatattcactggcatacaaagccaaggatcagactcttaggggaacgaaaaaagccgacggaacatatgaatatgaaacgccggtaaaatactggatgccatttaatggaggcgtgggattccacgatgcatcatggcagccgacttttggtggaagcagatatctgacaaatggttcgcacggatgtgtaaatatgccaccggagatggcagcaaagctgtttgatctgatttcggcaggcacaccggtagtggtacataattagggaaaaggaaatagaacatgtatgaattaataaaaaaagatggtcttgcaaaaaggggaagactacatacagtacacggggtcattgagacacctgtatttatgaatgtgggtactgcagcggcaatcaaaggtgctgttgcaacctcagatcttcaggagataaagactcaggtggaattgtctaatacatatcatttgcatgtgcgtcccggagatgaagtagtaaagaaactgggtggacttcacaagtttatgaactgggacaaaccgattcttactgactcgggtggatttcaggtgttttcacttgccgggcttcgcagaattaaagaagaaggcgtatattttaattcgcatattgatggaagaaaaatcttcatgggaccggaagagagtatgcagatacagtcaaaccttgcatctacgatcgctatggcatttgatgaatgtccatccagcgttgcagacagggattatatggaaaagtccgtagcgcgtacgacaagatggctggtgcgctgcaagaaagaaatggaacgtttgaatacacttccggatacgatcaataagcatcagatgctttttggtattaatcagggcggtgtgtatgaagatatccgtatcaaacatgcagatgaaatctcaaaattggatctggatggttatgcagtcggcgggctggcggttggtgaatcgcatgaagagatgtatcgcattctggatgcggttgttccacatcttccggataataaaccgacttatctgatgggagtcggaactccggcaaacattctggaagcagtcgacaggggagtggatttctttgattgtgtatatccaagcagaaacggaagacatggacacgtgtacacaaaccatgggaaactgaatctgtttaacgccagatttgagctggatgccagaccgattgaagagggatgccagtgtccggcatgccgtaattattcgagagcatatatcaggcatctgctaaaagcaaaagagatgcttggtatgcgtctgtgtgtccttcataacctttatttctataatacaatgatggaagaaatcagagatgcaattgatcatgactgttacaaagagtataaaacccaaaaaatcgctgctgtaacaggaaagaatgaataaaataatgaaaaaagcataaaaaaccttgctgaatacgaggtttttgtgtatgatagcaatagtgtttaaagataagtaggaggaaaagagatgttttcattagcagcacaaagctccagtggtacaagctgggttattttaattgttgtatatgcagttattttcggaggattctacatgatttttatgagacctcagaaaaaagagcagaaaagagttcaggctatgatcaacgagatggaagttggtgatacagtactgacaacaagcggattttacggtgtgcttattgacatcagtgatgaagatgtgatcgtagaattcggaagcaataagaactgccgtattccaatgcagaaagcagcaatcgcacaggttgaaaaagcttctgcagaataaaagatgaatgtagagaatctgttgtgtacaggttctcttttttatttgcggaaatgtcagaaaatccaaagtgtatatatgtgaaattgcgttggaaaaaatacaaaacaaccgtatattgttcatataaatatacacaaattgcacaaaattgcatacaaggtggatattgagaacgattatcagaacaaaacttgatattttcttcacgaaatgttatactgacggcgcagaagaaaatgaaagataggaaaggggaacaaagaaatggcacattttgagcagtgggctggttttaaaggaaaagaatgggtaaattctgtagatgttcgcagttttatccaggagaactacacaccttatgaaggagacgaatctttcctggaaggaccaacagaagcaacaaatattctgtggggtaaacttcaggaacttcagaaagaggaacgtgcaaaaggcggcgttcttgatatggagacagaagtagtatctggccttacagcatatggacctggatacattagcgaagagacaaaagatcttgagaaggtcgttggtcttcagacagacaaacctctgaagagagcttttatgccatatggtggaattaagatggctgagcaggcttgtacaacttatggttatcagccgagcgaaaagcttcacgagatttttacaaaatatcataaaacacacaaccagggagtattcgatatctatacacctgaaatgaagaaagcaagacacaataagatcatcacaggtcttccggatacatatggaagaggacgtatcgttggtgattaccgtcgagtagctctttatggtatcgacttcctgatcgaaagaaaacagtatgactttgagcgttatgcaagacacggaatgaaaggaacagatttccgtctccgcgaagagcttgctgatcagatcaaagctctgaaagaaatgaaagaaatggcagctgcttacggttatgacatttcacagccggcgaaagatgctcatgaagcagcacagtggctgtacttcggatatcttgcagcaatcaagactcagaacggagctgcaatgagtgttggacgtatctctacattccttgatatctatattgaaagagacttaaaagctggaaagattacagaaaaagaagctcaggaattaattgaccacatggttatgaaattccgtatggttaagttcgcaagaatcccatcttacaacgaactgttctcaggagacccgacatgggcaacactggaagttggtggacttggacaggacggacgttctatggtaacaaagaatgattaccgtttccttcacacactgaagaacatgggaccttctccagaaccaaaccttactgtactttactcttcaagactgcctgaaaacttcaagaagtttgcagccctgatctcagtagagacaagctcaatccagtatgaaaatgatgatgttatgcgtccggtatggggcgatgactactcaatctgctgctgcgtatctgctacagagacaggtaaagagatgcagttcttcggagctcgtgcgaaccttgccaagtgtctgttatacgccatcaacggtggtattgatgaaaagaataaaattcaggttgcacctgcttacagaccaatcacatctgaatatcttgactttgatgaagtaatggaaaaatatgatgctatgatggaatggctgagcaaactgtatgtagatacactgaatatgattcactacatgcatgacaagtattactatgaagcagctcagatggcattgattgatacagacgttaagcgttcatttgcaacaggtatcgctggattctctcatgtggtagattcactttgcgctatcaaatacgcaaaagtaaaagctatccgtgacgaagatggaatcacaacagatttcgagatcgaaggagatttcccaagatacggtaacgacgatgatcgtgcagacgacatggctgtatggcttctgaagacatttatgcacaaactgaataagtgtcatacatacagaaattctgtacctacaacatcaatccttacaattacttctaatgtagtatatggtaaggctacaggatctcttccggacggaagaaaagcaggagagccactttcaccaggtgctaacccatcttacggtgcagaaaagaacggacttcttgcatcccttaactctgttgctaagcttccatacgagctggcactggatggtatttctaatactcagacaatcagcccaagtgcacttggacatacagatgatgagcgtaaagaaaatcttgcacgtgtaatggacggatacttcgatcagggagcacatcacctgaatgttaacgtatttggtacagataaacttattgatgctatggagcatccggaaaaaccagaatatgctaacttcacaatccgtgtatctggatacgcagttaagttcatcgacctgacccgcgaacagcagttagacgttatcgcaagaacttgccacgatcatatgtaaaagctatgagccatgcatcagatgagacagatgttataatcaagcttgcttgaattatgatatctggatcagatgatatacggcgacagccgtcagcgagatgaagcaaagcggaatcgagctgcgcatggcggagtacatggcgaattgcatgtaataaataagaaaaggagcaaagctatgaccaaaggatatattcattctctggaaagtttcggctccgttgacggtccaggtgtccgctatctgatctttacgaccggttgtgctatgcgctgccagttctgtcataacccggacacatggaacatgaattcagggactctctacacagcagatgaactgattaataaagcctggaaataccgcacttactggggaagtaagggcggtattaccgtcagtgggggcgaaccgcttctgcagatcgattttctgctggagttgttccagaaagcaaaagaaagaggaatcaacacaacactggatacctgtggaaatccattcacaagagaagagccattcttcagtaaattccaggaacttatgaaggtgacagatcttgtaatgctggatatcaagcatattgatgatgagcagcataagatccttaccggtcagacgaataagaatattcttgatatggcagaatatctttcagagaccggaaaaccagtctggatccgtcatgtactggtcccggaaagaagtgataaagacgaatatctgcacagacttcatgattttattgagacgttagataatgtggagaaagtagaagtccttccgtatcatacacttggtgtatataaatggaaagaactggggattccgtatcagttggagggcattgatccaccatcgcaagaacgggtggaaaatgcgaaccggattcttgaaacagcaaaatatcatgcataaaaaatgtggaacacatgggaataatgtgttccgcatttttttatagcaatcaatcatcaaagtgtacaagaaatattataaaaagcgttttttaagtaggtaaaatgtagcaatttgtcaatttagccaattaaagtcttgaaacatgtataaaaatacgataatattatttttatagatttttaccgaaggaaggaagaagaacgatgaatcttaaaattggtgtgattaagggagacggaattggtccggagatcgtaacggaggcaatgaaagttctggataaagttgcaggagtatatggacacacttgtgattatacacagttactcatggggggagcatccattgatgttcacggagtgcctcttacagatgagacaatcgcagaggcaaaagcatgtgatgcagttctgatgggttccatcggaggagatgcaaagacatctccgtggtataagttagagccatccaaaagaccggaagcaggacttttaaagatcagaaaagccctgaatctttttgcaaacttaagacctgcagtactttatgaggaattaaaaggtgcatgtccgttgaaagaagagattacagaaggtgggttcgacatgatgatcatgagagaactgactggcggtctttactttggagagagaaagacagaagagattgacggagtgatgacagcaaaagattctcttacatataatgaagaggagatccgaagaatcgcaaaacggggatttgatattgcaatgaagcgacgcaaaaaagtaactagcgtagataaggcaaatgttctggattcttcaagattatggagaaaagtggtagaagaagttgcaaaagattatccggaggtggcagtggaaaatatgctggtagacaactgtgcaatgcagcttgtaaaagatccaaaacagtttgatgtcattcttacagagaatatgtttggagatattctttccgatgaagcaagtatggtgaccggatctatcggaatgcttgcaagtgccagcttaaatgagacaaaattcggtttatatgagccgagcggcggatcggcaccggatatagcaggaaaaggaattgccaatccaatcgcaactatcctttctgcagcaatgatgctgcgtttcagctttgatcttgataaagaagcagatgcgatcgaagcagctgttgcaaaggtgttaaaagacggataccgtacgattgatattatgtcagaaggaaagacgcagattggaacagaagagatgggcgatctgatttcagaaaacattcgttaattgtagaattatatatagataagaagtatttgacagaaagaaaacaggaggataaaaatgagaagtgatacagtaacaaaaggaaaacagcaggcacctcaccgttcattgttcaatgcacttggacttacagaagaagagatgaacagaccactggtaggcatcgtatgttcttataatgaaatcgtgccggggcatatgaacctggataaaattgcgaatgcagtaaaacagggagttgccatggcaggtggtacaccgatcatgtttcctgcaattgcagtttgtgacggaatagcaatgggacatatcggaatgaagtattctctggtaaccagagacctgatcgcagattctacagaagcaatggcgatggcacatcagtttgatgcgttagttatgatcccgaactgtgataagaatgtaccgggacttctgatggctgcagcaagaattaatgtaccgactgtatttgtcagtggcggaccgatgcttgcaggacatgtaaaaggacagaagagaagtctttccagtatgtttgaggcggtaggagcgaatgcggccggaacaatgtcagatgcagacctgtgtgaattcgagaataaagtatgtcctacatgcggatcatgttcgggtatgtacacagcaaacagcatgaactgtctgacagaggtacttggtatgggacttcgcggaaacggaacaatcccggcagtatattcagaaagaatccgtcttgcaaaacatgcaggtatgaaagtcatggaacttcttgagaagaatatccgcccaagagatattatgacaaaagaagctattctgaatgcacttactgttgatatggcacttggatgctctacaaacagtatgcttcatcttccggcaatcgcacatgaagtgggaatggactttgagattgatttcgcaaatggaatcagtgaaaagacaccaaatctctgtcaccttgcaccggcaggtcctacttatatggaagacctgaatgaagcaggtggtgtctatgcagttatggcagaactgaataagaagggactccttcatacagaatgtatgacagttacaggaaagacagtaggagagaatattgaaggagtagtgaacaaagatccagaggttatccgtccgattgacaatccatatacaccaacaggcgggcttgcagtgttaaaaggtaatcttgcaccggatggaagtgttgtaaagcgttcggcagtcgtagatgagatgctggtacacgaaggacctgcaagagtatttgactgtgaggaagatgcaattgcagcaatcaaaggtggtaaaattgtagccggtgatgttgttgttatccgttacgagggaccaaagggaggtccgggaatgcgcgagatgttaaatcctacatctgcaatcgcaggtatggggcttggatcgagtgtggcgttgatcacagacggacgtttcagtggagcatcaagaggagcatctatcgggcatgtatctccggaagctgctgtcggcggaccaatcgcactggtagaggagggagacctgatccagattgatatcccgaatctttctattcatctggatgtatcggatgaagaactggctaagagaaaggaaaactggactccaagagagccaaaggttacaaccggatatcttgcaagatatgcggcaatggttacttccggaaacagaggcgcaatccttgaagttccaaaagcaaaataaaaattatgacaggggaatgaatggtatgcagttaacaggatcacaaattgtaatcgaatgtttgaaagagcagggagtggataccgtattcggttatcctggcggagcgattttgaacgtatacgatgaattatataagcataaagatgagattaaacatattcttacatcacacgaacagggtgctgctcatgcggcggacggatatgcaagagcaacaggaaaagtcggtgtatgtcttgcaaccagcggaccaggtgcaacgaaccttgtaactgggattgcaaccgcatacatggattccattccggtggttgcaattacctgcaatgtaggagtagcacttctgggaaaagacagtttccaggagatcgatatagcaggtgttacgatgccgatcacaaagcataattatattgtaaaggatgtcaataacctggcggatacaatccgcaaggcatttgtgatcgctaaagaaggaaggccaggtccggttctgatcgatattccaaaggatgtaacagctaataaagcagaatttatatcacgggaagcagagattgtaaaaccgtccgaagatatctgcgaagaagatctggaaagtgcagttcgcatgatcagggagtcggaaagaccatatatatttgttggcggcggggcaatattatcaggagccagcaaggaattatatgaatttgtaaagaaggtagacgcaccggttaccgattccctgatgggaaaaggtgcattcccgggaacggatccgctgtataccggaatgcttggaatgcatggcacaaaaacatccaattacggagtcagtgaatgtgatcttctgattgtaacaggagcaagatttagtgaccgtgtgacaggaaatgctaagaaatttgccaaggatgcaaaaatcctgcagtttgacgtagatgcagcggagatgaataaaaatatcctgattacagaaggggtagtcggtgatctgaaagtcgttcttcagaagatgaatgaacgcctggaacagcagaatcataaggaatggatagagaagatcatttcttataaagagaagtatccaatgacatatcatccggatgtactcagtggtccgttcatagtggaagaaatttaccgtcagacaaatggcgaagcaataatttctacggaagtcggacagcatcagatgtgggcggcgcaatattataaatatacagaaccaagaacacttcttacatcaggagggcttggaacgatgggatatggtcttggtgcttcacttggagcgaaggtcggaagaccggaaaagacggtagtcaatattgcaggagacggatgtttccgtatgaatatgaatgagattgctaccgcaacacgccataatatcccggtaattcaggtagtaatcaataaccatgtacttggtatggtgcgtcagtggcagaatctgttttacgaacagcgctactcggctactgtactcaatgatgctgtagattttgtaaaacttgcagaagctatgggagcagaaggagtacgtgcatcgaccagggaagaattcaaagaagcatttgcaaaggcattaaagagcggtcacccggtagtgattgattgtcagattgacagtgatgacaaagtatggccgatggttgctcctggtgctccaatcagtgaagcttttgatgagaaagacctgaaaacaaaaaatgcagaataaaagaagcaaaaagtaaagaaaagtggaggaacaacaatgagcagagtgtacaatttttcagcaggtccggccgtattgccggaagaagtattaaaagaagcagcagcagagatgttagattataaaggctgtggaatgtcggttatggaaatgagtcaccgttcatcggtgttccaggagattattgagacagcagaagctgatatccgtgatctgatgaagattccggataattataaggtattattcctgcagggcggcgcatctcagcaatttgccatgattcctatgaatctgatgaaaaataaagtggctgactatatcgtaaccggacaatgggcgaaaaaggcagccaaagaagcagaaaaatacggagaggttcatgtagtcgcatcttccgaagataagacattttcttatattccggactgctctgatcttgaaatctctgaagatgcagattatgtatacatctgcgagaataatacgatttatggtacaaagttcaaagaacttccggatacaaaagggaagacactggtggcagatgtgtcatcctgctttctgtctgaaccggtagatgtgtcaaaatatggcgtgatctacggaggagttcagaaaaatgtaggacctgcgggtgtggtgatcgcaattatacgtgaagacctgattacagatgatgtattagatggtacaccgaccatgctgaaatataagacacatgcagatgccggatctttatacaatacaccgccggcatatggaatctatatctgcgggaaagtattcaaatggctgaaaaagcagggtggtctggaagcaatcaaagagcgtaatgaaaagaaggcaaagattctctatgattacctggatgaaagtaaattattcaaaggtacagttgttccaaaagaccgttcacttatgaatgttccatttataacaggtaataaagagctggatgcaaaatttgtaaaagaagcgaaagaagccggatttgaaaatctgaaaggacacagaagtgtcggaggtatgcgtgcaagtatctacaatgcgatgccggttgaaggagtggaaaaactcgtggaatttatgaaagcatttgaaaaggagaatctgtaatcatgtataagtatcataatctgaatccaatttcaaaggtaggactggatgaatttacaaaagactatgcacctgtaagcacaccggagacggctgatgcgatcctggtaagaagtgcggcaatgcacgaaatggaatttgcaacagatctgaaagcaatcgcaagagccggtgcaggtgtgaataatatcccgcttgagaaatgtgcagaacagggaattgttgtatttaatacaccgggagctaatgcaaatggagtaaaagaactggtgattgccggtatgctgctggcatccagagatatcattggaggcatcaactgggtgcaggagaatgaagaggatggaaacatagccaaagatgcagaaaaggcgaaaaaagcatttgcgggacaggaattgcagggaaagaaacttggagttatcggtcttggagcaatcggtgtgcttgtggcaaatgctgcaacacatcttggcatggatgtatacggatacgatccatatgtgtcggtggattctgcatggagactttccagaagtattcatcatacaacaaatgtagatgaaatctatgaaaactgtgattacattaccgttcacgtgccggcacttgacagcacaaagggaatgatcggaaaagatgccctgagccttatgaaggaaggtgtgatcgttctgaactttgcaagagatgtgctggtggattccgaagcaatggtagatgcacttgttgccggtaaagtaaagcattatgttacagatttcccgacacctgagattgcaggtgtaaagggagcgattgtaattcctcatctcggagcatctacggaagaatctgaagataactgtgcaaagatggcagtgaaagaagtgatggattatctggaaaacggtaatatcagacattcggtgaactatccggattgtgatatgggactgagaggagataagacacgtattcttgtattacatcacaatgtaccgaatatgatcggtcagatttccgctgtccttgcaaaagataatatgaatattgcagaccttacgaataagagcaaggggaaatatgcgtatacaatgatcgatgtagattccgaagtgcaggaaggtgttgtggaagaactgaaacagatcggtgaagtgttacgtgtacgtgttatatgttaaacaaaacttaataaatttgtaagaatcccttaattgcgaaatatgtcgaattagagtatcctattaatgaaagagatgcagggaagagatcttcatctccggtaaacagaacttatgaaatctgggggatacagggaatggacaatacagggattcgatcaagacgtaagaaatatagaagaagagtaagaaacattcgtgtgggtcttactctttttgtcatatgcctgatcgcggtggcaataccggtcatacgtgaaatgctaagaaaaccggcacagattacgatacaggtcgctgatattgaggttacgcagggaacagcacttccgtcgtatacggcagatgtaaagatacaggacaaagataagaacaagcttacaaagacatatacggctgaggattttgcaaaagatctgcaaaaaggaaaagatattactatttccagtaaggcggattcaaatatagagggaacttatgtaattacggcaaaactgtcggagaagattaaaaaggaactgaatggagcatggaagaaaaaggctcaggtaacaatcaggaacggaacctgtaccgtgaagaatccaaccggtgtatgggatggtaataaatttaaaaaatacgatggaacttatgtaacatcagatttcgtggtgtcgaagggagatacatattattttgatgcagatggaaataaagtgactggctggcagaccattgagaatgcgttatattgttttgataaaaaaggaatcatgcagaagtccggatggattacaacggatgacggaagagcatatctgagtgatgacggaaaggcactgagcggctggcagaccattgacggaaaagagtattattttgattcaaaaggaattgcggcgacaggagagctaaagctcggacttgagaaatgtaaattcagcgagtcgggagaattgctctcgaaagaaaaaacagagatagatccgggaaaaccgatggtggcacttacatttgatgatggacccggaccaagaacatcagagattctggatcagttgaaaaaatataatgcacatgctacattttttatgctcggaaaaaatgtaaaatcctatccggatgccgtaaagcagatgttgaaagatggaaatgagcttggaaaccattcttatgatcaccagcaactgacaaagattgatgcagaagcaattgccaaagaagtcaatgatacgaatgaaaatatcaagaatatctgtggaagcccggctactgtattaaggccgccgtatggtgcgattaatgatacagtgaaatcaagcgtaggtatgccgatgattctctggaatgtggatacactggactggaagacgagaaatacacagagcacaattgatgaggttatgcgtaatttgaaagacggagatatcatactgatgcatgatattcacacacagacagtagatgcagcacttcagctgattccaaaactggaagaagaaggttatcagctcgtaaccgtttcagaaatggcagcggcaaaaaacaagaccttggaaaacggaactgcttacagtgattttgtaagtacaagtaaaaaataatttgatatatctattataaaacaggatcaaccggtaaaagttgatcctgtttttaggttcgtttataacgaagtattatgttttgctaacagacggtgaatcttttctgtaggatccataacctttccgatgctgatatcatggttcatagaatcgatgatcagtgcgataaacttactcatatctgcgatcaggaaataaggcttttcctttgcttcggcaggaagataagtgagattagtagtgatcacgcggtcgatgtaacctttttcataataatcatcaaatttttcaaaaccatcggtaaagagtccgaatgtggtgcagacaaatacccggtttgctccgcgggctttaatctgttttgcaacatccagcatactttcaccggaagaaatcatgtcgtcaatgatgatcgcatcttttccatccagatgttcacctaagaattcatgtgcaacaatcggattctttccgtttacaatagttgaatagtcacggcgtttgtagaacatacccatattaacacccataacgttagaaaagtatacagcacgctgcatagctccctcatccgggctgatgatcatcagatgttccttgtcaactttaagatctggctccgcttttaataatgctttcataaattgatacggtgggttaaagctgtcaaatccgtggagaggaatagaattctgtacacgtggatcgtgggcatcaaatgtaaatatattagacacacccatatcgatcagttcctgaagtgcaagggcactgtctaaagattcacgtttggtacgtttgtgctgacggctttcatagaggaaaggcattaacacattgacacggtgcgcttttccattggcggcagcaatgattctctttaagtcctgaaaatgatcatccggtgacatatgattcagatggccgtttacagaataagtaaggctgtggttacagacatctaccataaggaacagatctgttccgcggatagattctgtaagaagtccttttgcttcgccgcttccaaaacgtggacacggacaatcgatcagataattgtcacgcaggtaattataatataatggtgaatctgtgttcttgtccattgtgcttttcctgaattgtacaatgtaatcatttactttttcaccaagttcgcggcatgattccagagcaccgatttttaatggcgcaacaggaagtccgctttccattaatttgatatttggcataataaaaactcctgtgtattttatatattaagttactcctaattatttatatcactttttctataaaaaggtcaactactgattggactatttgacaaaggtaatgtataatagtatcgttaagagacaaatatagaatgaaatatagaggagagttaagatgagtaaaccagtagttgctattgtgggaagaccgaatgtagggaagtcaaccctttttaatgtactggcgggagagatgatttcaatcgtcaaagatacgcccggagtaacaagagaccgtatctatgcagatgtcacatggctggacaaagaatttactatgatcgataccggtggtattgagccggagagcaaagatatcattcttgcacagatgagagaacaggcacagattgctattgatactgcagatgtgatcattttcattacggatgtcagacagggacttgtagatgccgattcaaaagttgcggatatgctccgcagatcaggcaaaccagtcgttctggcggtgaataaagtagacagttttgagaagtttatgccggatgtatacgaattctataatctggggattggtgatcctgtgccggtatctgcagcttccagacttggtatcggtgacatgttagatgctgtgatcgcacatttcccggaacatgaagctgaagagaaagaggacgagcgtccgagagtggcgattgtaggaaaaccaaatgtagggaaatcttcaatcatcaacaaactgaccggaaagcagcgtgtgatcgtatcagatatagcaggaacaactagagatgctattgataccaatgtgaaatataatggaaaagattatgtgtttattgatactgcagggctgagacgaaagagcaagataaaagaagaactggagcgctacagtatcatccgtacggtaactgcagtggaacgggcggatgtcgttctggtagtaatcgatgcgacggaaggtgtaacggaacaggatgcgaagattgccggtatcgcacatgaaagagggaaaggtatcattattgttgtaaataaatgggatgccattgaaaagaatgacaagactatgaaagagtacgagaataatgtgcgccgtgtgctttcttttatgccgtatgcagagatcatgtatgtatcggcagagacgggacagcgcctgaacaagctatatgatatgatcgatatggtcattgagaaccagacactgcgtgtcgcaacaggtgttctgaatgagatcatgacagaagctgttgcaatgcagcagccaccttcagacaaaggaaagagactcaaactgtattacattacacaggtagcggtaaaaccgccatcatttgtgatttttgtaaataataaagaactgatgcatttttcttataccagatatctggagaataagatccgggaggcatttggattccgtggtacagctttgaaattctttatcagggaaagaaaggaaaaggatcagtaatcatggaacggttgatatgtgtacttgtcggatatgtgtttggtctgatacagaccggatacatatatggaaaaaagaatggcgttgaccttagaaaaaaggggagcggaaatgcaggaacaacgaatgcacttcgtaccatgggctggaaagcaggagcggtcacactgcttggagactgctttaaatgcgtagcggcagtggttgtcgtacatctgatctatggaaagacacatacagatatgatgcctttactttccatgtatgccggaatgggagcagtcctcggacataattatccattctatctgaaattcaaaggcggaaaaggtatagcagcgacagcaggtctgatcatcagtactacgaatatatggatcgtactgatctgtcttgcagcatttattgcaattgttgcgacaaccagatatgtatcccttggttccatgacggttgttacaatctatctgatcagtgtgatcgtatatggtcagcacggtggatttggtgtggaaaatgtatcctatctgcatgagatgtatggtgtagcagcgtttctgatgatactggcattctggagacacagagcgaatattaagagacttttaggcggcacagagaataagatcagtgttggcggaaaggataaaaaatagtcagggatgacagataaaaagaaaggacaggctatggcaaacgtaagtgtgatcggagccggaagctggggaacagcactggcattactattatgtaaaaatggacatgatgtgacggtatggtcatataaggaagaagaagtgcgcacgctgagtgagaaaagagaacatgtaagtaagcttccgggagtaaagattccgaatgagattttttttactgcggatctgaaagaggcggtagaaggaaaggacgtagttgtacttgcagtaccgtctattcatgtgagaaatactgcgaaaaagatgaacgcatatgtaaagggcggacagattttagtggatgtagcaaaaggaatagaagaagacaccctgatgacactgtcccagcagatcgaagaggagataccgcaggcagatgtagcggttctttcgggaccaagtcatgccgaagaagtaggaagaggtcttcctacaacggtctgtatcggagcacatacagaggcgactgcaaagtatttacagcagctttttatgaatgaagtattccgtgtatatatcagtccggatatcctgggaattgaacttggcggatcgcttaagaatgttattgcacttgcagccggggttgcagacggaatgggatatggagataataccaaggctgcattgatcacccgtggaattgccgagatatcaagacttggtgtgaagatgggaggagcggctgagacttttggtggtctggccggtatcggagatcttattgtaacctgtgcaagtgtacacagccgtaaccgcaaggccggatatctgatgggacagggcagaacgatgcaggaagctatggatgaagttaagatggtagtggaaggtgtatattctgcaaaggcagcagcgaagcttggaaagaaatatcaggtatcacttccgattattgaagaagtaaataaggtgctgtttgaggacaaaagtccgaaagaagcggtaaatgaactgatgctgcgtgttggaaaagcggaacatatggctcttccatgggaagaataaaaagagtcagttttgcaatatgatataaaaataacagagaggaaagagttttaacaatctttcctctctgttattttttaaagatccgcatgttctattacatactttttgaaatccatgatgacaggtgcctgatagacattttttaaagtagccatataaaagagtctttcccacgaaggtttttctatttcgataatagataccggcatataagaaagaacgggcatctttggaacaactgcaataccaaaacctgcaccgacaagacctgcaacgccctgatcttcttccatggagtaagcaatctgcgggtaacctccacatttatgaaacaatttgtcaataacatatcttaagccgcttcgtttggaaaaagcaatatgcggataagaaagtgtatctttcagatcaatagagctgcgttcttcaagcggatgtccttttggtacgatcaataccagttcctgttttgcaacaggtatgaattcgatcagaggttcattgtccatcatagagcaaaatgcaatgtcatatttccggtcttttaacccctggatcatatcagaagtaagacctgtagaactatgaaaatagaaatcaatctttttgtccggcgtagaatccaggaatccttttacgaaaccgggaaccacagtactgcttagagtgcgcagttccacgatgtcgatacgaccttcaccacgacctgtcatctgaagcttgttaacactggaatcgatcatatccagagcctgttccacatcaatgagaaaggcctgcccgcattttgtaagtactacattccggccctctttctcaaaaagttttacccccaattctttttcaagagatgcgatcgcatgactcaggcttggctgagtgatggaaagaatttcagcggcttttgtgtaatgctccagatgtgccagcgtggcaaaatatcttagatgatacagattcataaagccggtccccctttcttttgttatatttatatatgtttatatcttatcatgaacggagtggaaaaactatgaataaaatctataaattataatagaataaccaatttgttttttatttaacaaggatatataatcaaatcatagcaaatattactagattgaacattaagcaaaaagagaatctgttcaattttaacaatggaggtagaattatgtcaaaaaagaatccaattacagtaagttcatggacacttggagatcagtgcaaatttgaagaccgtgtgatcgctgcaaaagaagcagggtatgaaggaatcggtcttcgtgcagaaacttatgttgatgctttgaatgagggacttcatgacaaagacattcttgcaattcttgataaacatgacatgaaagtaacagaagttgagtatatcgttcagtggtgcgaagagcatcgttcatacgagcagaaatacaaagagcagatgtgcttccatatgtgtgaacttttcggagttggtcacatcaactgtggactgatggaaaattattccgtagaatatacagcgcagaaattaaaagagctgtgtcagagagccggaaaatacattattggtgttgagccaatgccatacagcggtattccaaaccttcagaaaggctgggaagttgtaaaagcatccggatgtgagaatgcaatgcttatccttgatacatggcactgggtaagagctaatcagccatatgatattcttacaccggagatcgctgaaaaagttatttccatccagatcaatgatgcctatgagagaccatatgcagattcaatcttaagagatgagtccatgcatgaccgtcttgcacctggaacaggagcaaaagatacagctggattcgttaagatgatcaaagatgcaggaattgatccaaaggttgttggtgtagaagtaatttctgacgagatccttggaagaggaattaacgaagcagcagcttatacatatgagaatactgaaaaagtattaaaagaagcttggccagaactggtagactaatttatagaaatcagatttgttcaaaagagagaggaaaaaataatgaagttcaaaaatatgttttctccgattcagatcggaccaatgacagtaaagaaccgctttgtagtaccaccaatgggaaataactttgcaaatacagatggaacatggagcgatgagtctgttgcatactatgctgaacgtgcaaaaggtcagtttggcctgatcacgatcgaagcaacagttgtccataaaggagcaaagggcggcccgagaaaaccttgtctgtatgatgacaacagcattgagagtctgaaaaagattaccgatgcctgtcatgcagaaggtgctaagatttccattcagcttcagaatgccggacctgaaggaaatgccaagaatgcgggagcaccaatccaggcagcaacagctattgcagcggctgatggaagagacattccggaagcagttcctacagagcaggtatatgagcttattaaaggatatggagatgcagcggtccgcgcaatgaagggcggagcagatgcagtggaaattcacatggcacacggttatcttgtgaattcttttatgtcaccaagaacgaataaacgtgtagatgaatttggtggaaacttcgaaaacagaatgagattttctcgtctgatcgttgaagaagttaagaagagaacagaaggtaaaattgcagtgcttgcacgtatcaacagtacagaagatatgtttggcggtctggataaccatgatatgtgtgcaattgcttcttatcttgaagattgcggagtggatggacttcatgtatcacgtgcggtacatctgaaagatgagtatatgtgggctccgacaggaattcatggcggattctcggcagagcttgtagcaaatatcaaaaattgtgtatctgttccggttattacagtcggacgttacacagagccacagttcgcagaacagatggtaaaacttggaaaagctgatctggtagcatttggacgtcagtcactggcagatcctcatactcctgaaaaagcgcaggaagagagactggaagatatgacaccttgtatcgcatgtctgcagggatgtgtcgctaacatgtatgccggaaaacctctttgctgtctggtaaatcctgtgcttggccgtgagtcagaaggtcttccgaaagcagaaaaggcaaagaaagtatatgtcatcggtggcggagtagcaggtatgtgtgccgcattcacagctaagagacgtgggcatgacgtgacattatttgaagctacagataaacttggtggaaacatgagacttgcagcttatccgccgggaaaaggtgacatcacaggtatgatcagaagctatatcgtaaaatgcgaaaaagccggtgtaaatatcaagatgaacacaaaagtaacagcacagatgttaaaagaagatacaccggatgcagttatccttgcaaccggatctgagacattagtccttccgtttatcaaaggtatccacaaccctgatatcgtatatggtgtggattgtctggaaggaacacgtccggtaggacataaagtcttagttgtaggcggcggtatggtaggtgccgagacagcagatttccttgctgaacagggacatgaagtatctgttatcgagatgagagatgccattggaccggatgtgatccacgagcaccgtatcttccttatggaagcatttgaaaaatacggaattgaacagattacaagtgccgcagtatctgaaatcttctcagacggcgtaagctataagaatgccgcagataaatctgatgagacaatttacgaggcaagaggattcgacacagttgttctttctatgggattcagctcccgttatacacaccgcgatggtcagaatgttgtatatgacttcgccgatgaattaaaggacatcgttccggaagttcatgtagtaggtgatgcagtaagagcacgtcgtgccttggatgctacaaaagaagcttacgatgtggcattaaaactttaataattgaatttagaaagaaaaccaggagggttaagatcatggaaaaaagaatttccggacatacaggcttaatggcgttatttggaacaccggtcggacattcaggatctcctgcaatgtacaacttcagcttccagcatgatggattggattatgcgtatatggcatttgatgtaacagaagaggaaatgccgaaagtattcgagtctatccgtttattaaatatgcgtggtggtaactttactatgccatgcaagaacatcgctgcacagctggtggacaaactatcacctgcagctgagatcatcggagcctgcaatgtattcgttaacgatgacggagtaatcacaggacacattacagatggtgtcggattcgttaagaatctggaactcaacggagcacctgtaaaagacaaaaaggttgttgtccttggagcaggcggagctgctacagcaattcaggttcagttagcactggatggagcaaaagaagtaaatatcttcaatatcaaagataaattctttgaaagagcagaaggaacaaaagctaaattagcagagaagtgtccggaatgtgtagttaccgtagatgaccttgatgacaaggctaaactggaagaagcaatcaaagcatgtgacattcttgtaaatgctacaattataggaatgaaaccacatcaggatgtgacactggttgacaaatcgttattccgtaaagatctggttgttgcagatactgtatacagcccggaaaaaacaaaaatgatcctggaagcagaagaagcagggtgcaaggcaatcggcggagtgggaatgcttcagcagcagggagcagtaaactatggactgttcgtaggaaaagaaatgccgcttgctgagtatcaggaatttcagaaagcacaggcaaaataataaaacaacttgataaaggagaatgagggaatgaaagcaaagaagtatttatggtctatcatctgtgtatatttttgctatctgacacatggtattcaggcaatcattttaagccagaataatgtgaattttgcaaaacagtggggattcaatatgtcagatccgcagtcagcagcatatgcagcaggacttgcagcagtaagtaccgcagtagcatggaccggatttggtaaattcgtaagcgtatggatcggtggagaaatttcggaccgtgtcggacgtaagaaactgatgatcggtggagcagcgttatatattatctgtttccttggattcttatttactaagagcgcactggttgcttctgtatgcggttttgcatctggagttgcaacttcaggattctgggatgcttcaggatatcctgcagtacaggaagcttatccggcagcacctggatcagcgcttgtaggaatcaaattcttcgtttcattgtctggtatggtatatccacttctggttgtacataatgcaaacagtggaaactggaaattaaatgttatgattccagtggttatgtcaattatctgtctggtacttgcaattattgcaccgttcgtatatgatgatcagaagaaggcatcagaaggaactgatggcaaatcaaaagatgcagtgcaggcagaaatcgatgcagcaaaagcagcaatgcttacaaagccaggcaaatttgtagtatttctggtaatgttttacgcattcctttgtatggcaatcatgtatggtgctcagcagtatacaaaagcgttcggattatccgtatgtggactttctgagatgcaggcagcaggtatgacatctatctatacaattggttctatctgtgcagtgcttttctgggcatttatgatggccaaattaaaatggagcccgctgaaagttgtcctgatcgattctatctgtacagcagtagctcttgcaggtgtactgtttattcatcaggtggcaatcatctatgttgcaattgcaatgttaggattctttgcagcaggtggtgctcttcagactggtcttgcagtggttcagttattcaacccgggaccaaaaggaagaaacaccggtatctattacacatttatgggtgcagcaagctatctgattccggtagtagcagcacagcttacaaaagcatctggtgaggcaaatgcagtatacagcctcatgatcatgttattagtatttgcaatccttgctattttaagttccctctacttagtagcacagcacaaaaaaatcttcggaaagagtgcattgtaaaatataatcaagaataaaagggactgttgttccggacaataacggataagcagtcccgttcttttaacttgggattgttaaaaaaaagacatttatagaaaacactagcgaaacagaggaaaaatatgttattccatagattatttctatggaataacgaatgctatgttataatagcttttggttcctgaagtatgcaaatataatttgtatgcaaaaattataaaacgaaggaggacgctcaaagatgagtccgaaaaaagcaaaaaaagctaatgaacttccttatattcctcttggaccattccaatggagaattccgggaatccattacagagtagaatatgtggaattttttcaaggtctgatccttggcgctacagctttaagctccattccgtacctgactgataatcttggacttccatatgaacttgcatggagctgcgtcattattgaagtatttatgtatatgcttcacggatggttgggagatccggtagttccgggatggattactccgacattaccgtttaccctggcatatttaaatgggtttgaaaaaggaccggatagaatacaggcaatgatcgcattgcagcttctggtcgcatttgtatttatatttatgggaattacaaaactggcagacaaattcgtaaatggtgtgccaaattcaatcaaaggtggtatcctgatcgctgcgccgattacggtattgcagggacagttatcggatggaagccagcttatgacagcaccggtggcaacacttgccggtacattattacttgcatttttaagcttttcaccgttttgtgagaagaacagaagtaaatataagatattagatattatggccaagtatggcaacttgttcccatatctgatcgctatggtagcaggggttgcgcttggagagttatcaaaacctgtattagaacttggaacagtcatcagaattcctgatttcagtaatatattccatacagtcagtatctttgcggtaggctttcctccgctttcaaaattcatcagtgccatacctctggctttgatctgttatgtactggcatttggagattttgttacatcaaagacactggtagaggaagctcaggagagcagaagcgatgaatatattgatttcaattcaagcagatcaaacctgatcagtggtctgagaaacctgattcttgcgattttcgcaccattcccgccgttggcaggaccgctttgggttggaatgaccgtatctgtagcgatgcgttataaagaaggaaagaaagctatgaaatctctgattggtggaatgagttctttccgtatggcaacgtttatcagcgttatcctggtaccgatcgtatcctttatgaaaccaattatgggagtcggatcggcaatcacattattgttccaggcttatgtctgtgccagaataggtatggaatactgtcagtctaacacggataagagtattgcaggtgttatggcagcggtactggcatttaaaggatccggatgggcattgcttgtcggctttgcaatgaacctgttactttctaatatggatttccagaagaaaaaactgggagtgcttacaacggaagaactggatcaggtagaagcaaaaaaagatgaggaagcacagagacttcttgcactgaaaaagcagggataaaaaagacatctttgtcctgctggagaaggcaggagaatagcataatgaaaaaaatgtcagaaacataaaatgagggcctgtgggaatatccatgggccctctctctatttgattttttacagtgcatcgtgcacaatctggagtgcctgatgtaattttgctgctccgatctgtccaggtgcagaagcctgtgctccggaaccaaatgtcagacaggaaccaaatgcctcgcaggcaatacgactgatgcttccaagccctgccatagacatggtgatgattggtctgtcggcataatcggatgccatctcttcagtagcggaaagaagagtcaggacatcttttttggtttgtggcataaccgccattttaggaatatcggctcccatatcctgcattttgcggaggcggtaaatgagatcagatttggcaggtgttttgtcaaaatcatggttagaagcaataacctttgtgccggaaacgtggattgcatcaatcatctcccgtacaatgtcatcgcctgtaaagatctctacgtcaataatatcagcattgccggttgcagcaactgctttgttaagttcggcgtatttttcagtgggcattggatgtacgcccccttctttgtctgtacggaatgtacagagaagaggagtatttcccattacatcgcgaagttcttttacgagctctgtgacttttgcaatatcttcgacatcttcgtaccagtccatccgccattccatcagatccatatgcatgtcaaggtaggtacgggtaagagaaagaatgtcttcttttgtctttccaacattaggaatacagattgccggaattccgtttccgagttccaaatttcttacttttacagtgttcatagaaaaattctccttaatcttcataaacgtaggaaattcccagtttttctttcatatattcactgtccacacgtttgccgaggatcagttcgatagcagcaattgcctggaagagcatcatgccctgaccgttcattgttttacatccggcgtgtcttgccattttcagcattgctgtttcgtgtggtgcgtagacaacatctgttacgataagatcaggacggaagaaagaaggatcaggaatataggtaattccttcgagcggtttcattccaacacctgtggcatttgtgaagagataagatgaatgcatctcttcttttaatttgtccagatcttccagagggtagaatgttgctttacaattggtgttttcgttaattttctttactgtatccagtgcattctgcttgaatttatcgtctcttgcgaagatagacatctcagcgacaccatccagtgcagcctgaatttcaacagcagtagcagctccgccggaacctacaattgtcagtttctttccggtaggatcaatatcattgtcttttaaagactgtacataaccgataccgtctgtgatgtgtccgaccaggtagccatctttattgacgatagtatttactgcgccacagagtttggcagccggagagatttcatccagatactgatgtacgatcgttttgtttggcatagaaacattggcaccacggagtttcagcgcgcgtaagcccttaattgcatcctcaagctcaggtgcatctacttcaaatgctagatttacaatgtcaacaccaagcttttcgtaagctgcattatgtgttgccggtgactgtgagtgacggataggataagccagaagaccgattaattcggtgtgtccggtaatctgatgtctttccataataagaatctcctttttgtaataaaaattatctttatgtttgcctatattttaacaaaatgcagatgtataatcaaatgctaaacagatacggaaacgatagaaaatgactattgatctgtagtgcaagttctataaagagcgaagaagtgcatatactttaacagcacagcaggaaggagcagggaaagtggacacagaacagttatataaagatataaaagcaagaacgcacggagaaatctatatcggtgttgtaggaccggtaagaacgggaaaatcgacatttattaagcgttttatggatgtaatggtattgccgagaatggaagatgaacatatgaaagagcagacaagagacgaacttccgcagtctgccgcaggcaaaacgattatgacaacagaaccaaaatttgtaccgaaagatgcggcagtaatacatctgaaccgggacgttgaagtgaaggttcgtctgatagactgtgtcggatatttggtgaagggtgcttcgggatacgaggaggccgggcatgaacgtatggtaaaaaccccgtggtaccaggaagaaataccatttaccaaagcggcagtgacaggtacccagaaagtgatacgtgagcatgcaacgataggaatcgtggtcacaacagacggaacgatcacagatatcccgtcagataattatgaagatgcggagacacgtacgataagggaacttcagtcgatccggaaaccgtttgtagtattggtaaattcaaaaaaaccgcatggacaggaagctaaagaaaaggttaaaaagctggaagatacctatcaggtcagagcgatgactgtaaattgtgaacaggtaaaagaagaagatatttaccagattctggaggccgttttgtatgaatttccggtatcggaggtacagttttatataccgaaatgggtggaaatgcttccggttacgcataagatcaaacaggatctgctggaacatatacaagaaattcttggaaatcttgaagaaattaaggatgcggtatctttgaccggaagaccggacagttcttacataaaagactggtatgtagaacagatacagatggatacaggctgtgttatcattcggatccatatgtatgaaaagtattattatgaaatgttgagtgagatgacaggaactacaatttcaggtcagtatgatctgataaagacgatgaagaagctttcaatgttaaagaatgaatatgaaaatgtagaagatgcatttacagcagtccggatgaaagggtatggagtagtcagtccgacaaaagaagagattattctggatgaaccggagatcatcaggcagggaaataaatatggggtgaaaattcattcgcaggcgccttccattcatttgatccgtgcaaatatagagacggagatagccccgattgttggaaatgagcagcaggcggaagatttgatccagtatattaaaaatgaagaaaaaatggaaggaggtatctggaaaaccagtatattcggaaaaacagtggaagaactggttatggacggtctgaaaaataagatggcggtcatcaatgaagaaagccaggaaaaacttcaggatagtatgcagaaaatcgtaaatgacagtaatggaggcatggtatgcattatcatttagaaaaaaataaataaatatgaaaaaatacttgaaatctgtgaatgaccgtgtctataatatgaattagaaattggtaaaggggccatactcgtcagggtgtggtctctttttttaccataatagataataagaatctggaggatgataaaaatgaaagattacacgttcaaagtaccgcaggatattgtatttggtgtaggttctttaaaaagactgccggagcttcttgaaaaaagcggttctaaaaagatgatggtagtatcagacagagggctggagaaattaggagtcgtacagaaagtgctggatattgtggagacagaaggtatagaaacagtaagttttcttgatattcttccaaaccctacagtggatatggtaaatgcggcgacaaaggtatataaggaatcaggagcgacaagtatcgtagcacttggaggcggaagcccgatggatgttgccaaggcggtaggtgttctggcaagatacggcggatccattacagagtatgaaggtgcacatcttgttccgggaccgatcgaaccaatcattgcaattccgacaacagccggtacgggaagtgaagtgacggcgttctccgttattacagatacctccagaaattataaactgacagtattcagttacgaattacttccaaaatatgcactgttagatccggagatgatcatgtccgtaccaccgatggttgcggcttcctgcggaattgatgcactgatccatgcatgggaagcatatacatcacttggcgcttcaccgttttctgatgcaatggcagaaaaagcaatggaactgatcggtggtaatatccgtagatttgtggcaaacagaaaggacgaggaagctgcatgtgcaatgatgtcaggaagtatgtttgccggaattgcatttgcatgggcaagactgggagatgtacatgctatgtcacatccggtcagcgcattctttggtgtacagcatggagtggcgaactctattctgcttcctgtgatcgtagagtataatgcgctggcagatcacggacgctatgaaaaaatctacaattatatcagtgaagataaagagccggtaaaagatttcaaaccagagatgctggtggcagagatcaagaaattaaatgcatctcttggtattccaaagactctttccgaagtcggtgtaacagaagacaagatcccacagatggctgtagatgcgatgaagagtggaaatattgcggctaatccaagacagacaacattaaaggatgtggagatgttgtaccgcaaagcactgtaaataaaatagcgaaaaaagataatagaaaaagattcacattttgaccaatattttagaaaatggaaaatgtgaatctttttttgtgggaacatgcggaaagccgtggaataagttttttggcatccgtaagtgtcggaaataaagcttataagattgcattatcatgacaaaagagttaaaatataaaggtatatgactatcacagataaatgttggaggtacaatatgaaagtagcaattattacagcaaatacagatatatacaaagggacaaaagcgaatgaaagcggagaggcagtaaagcttgtagcggaagaagccggactggaagttgtatttatgagagcactgccgctggacagagaagtattgtccgcaattatgaaacgtttggcagatggaaaagcagcagacctgatccttaccacaggtggagcagggtgcaatccggacgattgtacaccggaagcaacgatggatattgtagaaagaccggttccgggaatcccggaagcaatgcgggcacatacaatgaagctcaccagacgcagtatgctgaatagaagtgcggcaggaatctgtggagagactctgattgttaatcttccgggaaaagcacaggcagtgaaggagagtttaagatacttacttccggagcttgtacatgctgttaaggtcatcaaaggagaagtataggagatatgaaggttacatacctggaacatagtgggtttgcagcagaatataaagaatatgtgctgatttttgactggtacaggggcagccttccggaatttgatcagcagaaaaagatttatgtatttgccagtcactcgcattatgatcattttaataaaaaaatcttcgggtggagtgagcaatatccagatgttcggtacatcctttcagcagatattgcaggaaaagaacagtcagaggaacagtcagagcggactgtatatgtaactgcaaataagaaatatgattttgatggtataaaggtacagacacttcattctaccgatgagggggttgcatttattgtgtatatggaagacaaggtaatctatcatgcgggggatctgaactggtggcactgggaagaagaaacagaaagctataatgaacagatgcgtcaggattatcagagggagattgacaagctgaaagatattgtaattgatatagcgtttgttccgctggatcccagacaggaaaatcagtatgcgtggggaatggattattttatgaaacatacccatacaaaatatgtgtttccgatgcatatgtggggagattacgaaatttatgaccgtctgatggagaaccctgaggcagagccatacaaagaacgtgtaatagaggtaaaagaaccggggcaggtatttgaagtgaatgtgtaatgcaaagaatcagaataaaaaagatttgttattttaataaaatagtgttataataataaacgcttttgaaaaaatgcaagtaagacagatgatcgcagctgtaattgccgaaaggcagcaggtgaggaaagtccgggcttcacagggcaggatgccggataacgtccggtggaggtgactccaaggatagtgcaacagaaatgtaccgccaggatctgatcctggtaaggttggaagggcagtgtaagagactaccgccttgctggtaacagcaggggcatatgtaaaccccatccgaagcaagaccggataaagacgatgtggcggcccgtcacgtcttaggtaggtcgcttgaacccgctggcaacggcgggtctagatagatgatcatccaatgacataacccggcttatcgtcttgcttgtataaaaaagagaacttgtcagttgacaggttctcttttttgtcccaaagaaattatttacgtcttccgtcgtatttttcttcacagtatttacagcggtagacttccttttcaggatcggtaagtacaaatatatgatccagtccctgttcgatcgaggtgatgcagcgcgggtttttgcagtggatcacattgcggatctcgtgaggcagatgaagcgctttcttatctacaatcgcggaattcttaataatatttacggtgatgttatgatcaataaaaccgagaatgtccagatccataaagtcgatagggcattcaatcttcatgatatctttctttcccattttattactttttgcatttttaatgatcgcaacacagcagtcaagtttgtccagatgcagatatttatagatatccatgcttcgccctgcctgaatatgatccagaacaaatccttcttcgatacgaccgacagttaatgtattttttaccattgttattatcctcctaaacttcaattcccaaaagtgtaagtatcagtgccatacggatgtaaacaccatattgtacctgcttgaagtaagcagctctcggatcattatctacctctgtggcaatttcatttactcttggaagcggatggagaatatacatgtcttcttttgccagttccatctttttgttatccaggatgtagaagtctttcatgcgtacataatcttcttcgttaaagaaacgttctttctgaacacgggtcatgtaaagaatgtccagatcaggaagggcatcttccagtcgtacaacctcttcgtaaggaatgttctgacgatctaatacatcattcttgatatagcttggaagttttaattcttccggtgagatcaaaacaaaacgaatacccggataacgtaccagcgcatgaatcagagagtgtacggtacggccgaatttcagatccccgcataatccgattgtcatattgtcaagacggccttttaaagaacggatcgtgagcatatcagtaagggtctgtgtcggatgctgatgtcctccgtcccctgcattgatcaccggaatcgtggcgtgctggcttgcaaccatagcagctccttcttttgggtggcgcattgcacagatgtctgcgaagcaggaaattacacggattgtatctgctacactttcccccttggaagcagaacttgaatcggcagatgagaaaccaagaacgctgccgccaagattgatcatggctgcttcgtggcttaatctggtacgtgtacttggttcgtagaaaagagtggcaagttttttgccctcgcatgcatgtgcatatttttctggattggcttcaatgtctttcgcaatatccatcaggttgtccagttcttctacggaaaaatctagtggacttaataagtgtttcatgtaaaaacctcctgttttataaataagttaataaatcacttacggattttctcttaggtgtgtccggatcgatatccggatgtccgatcgcgatgagagcggcaagttcctggtcttccggaatctgcagcagatctgtgataccgtcttcatcccagattcccataataacagttccgagaccggcatcatgtgcggcgagacaaaatgtctggcaggcggcgcctacatcgaacatctgccagcggtcttcttttttggtactgtaagaaccgtcacgttcaaagccgcaacagccttttttgaaagtaactgctatcagcatcggtgcctgctttataatttttgcattgaaatctggggtataatcggtaacgattttatcaagaacagaagaatcttcaattgctgtataacgtgtgatctgggtgtttttccaagatggagaataagatgccgcctcgatcacagattctaatgtggcatgatttacaggatcaggtttgaatttgcgaatactgcgtcttgttttcatacattcaattgtattcatggttttacctccgttttcaaatctttcatacatcatataatatttaacatggattttcaatgtcttgaaataatttttaaagaaatttaatctatgtaatttttgaaatgctatgatacggatgggtagattttatggaaagaatgtattataatttaatagatttgcagattttctgcataatatacataaaggagagagtatatggcatcattggaagagcttagggcacagcttggcagtgtagatgacaagatcgtagaactttacgaagagcggatgaaactctgtgaagagatcggaatctgtaagattgaaaatggctataagacgtttgaccgtcagcgtgaaaaaaatactataacagacgtgatgaacaaggtatcatccgatattaataaaaagggcatcggggaagtgtatgagcagcttcttgcaatcagcagaaagctgcagtataagcagctggttgaggctggagcacttggaagactgccatttataggaattgatcttttggataaagatacagccagagttgtctttcaggggacggaaggtgcttacagtcaggctgctatggagcattatttcggaaaagactgtaataattatcatgtacatacgttccgggaagcaatggaagcaatcgaagaaggtgcagccgactatgcggtgcttccgattgaaaattcgacagcaggtgcagtcaatgagatttatgatctgctggtagaatttgaaaattatattgtcggagagacgatcattccgattaaaaatacgctgtccggattaccggggacagacatttcagagattgaacgagtatattccaaggcagaagcattgatgcaggcatcacattttctgggagatcatggtgactggcagcagatcagtgtggcaaataccgcactggcggcaaagaagatcctggaagatcaggataagcgtcatgcggcagtgtgcagtgcatatgcggcatctgtgtatggtctgtccgtgcttgcagataatatcaatgatgaaaagaacaattctaccagatttatcgtgatcaccaatcagaaagtattcctgaaggatgcaacaaagatcagtatctgcctggaacttccacatgaaagcagttctctttatcatctgctgtcgcattttgcatacaatgatctgaatatgactaagattgaatcaagaccaatggaaggaaaaagctgggaataccgcttcttcattgattttgagggaaatcttgcagatccggcagtaaagaatgcaatccgtggtttgcgtgaggaaagcagaaacttgagaattcttggaaattattaaaagaaaaaacacaacgtcgaagtcatcaggcagaggcagaatggatatatattggaggaaagacgatgagaacaaatgaactgatgttatataaacatatggagaacggacagattctgcaggatatcacattcttgatcgagaattatcagaatgactattataatatggaagatatgaaaggactgttatatgatgcagtcaacgagatcctggagatggcagtcagccatggattcgagggtgatctctggcataattatctgacttacctgatggcaagccatgagaatgcttacagtacatcctgcgaaattgtcgggtcggtagatggaagcatcaatcaggttgcactgcacgatttcgaaatattcaaagaattatttgattatgactttgcagatatggaaagtgtgatgggcgttgactgtatttccatgctgcatgattatgtgggaacaagcggacacggaagtgtgttcaaccaaagaatccgggatcgtatctgcgatctgagcaaatcacttgcaaaagcagagacggcagaagaatttaaggctgttataacacagttttacaaggaattcggtgtcggaaaacttggacttcacaaagcatttcgtattgcgcacacagaagagggtgcattgatcgaaccgatcacaaagattgcgcacgtacatctggatgatctggtaggatacgagatcgccaagaaaaaactgatcgataatacaaaagcatttgttgagggaaagaaagcaaataactgtctgctgttcggtgatgcgggaacaggaaaatcttcttctatcaaagcaatcctgaaccagtactatgaccagggactgcgtatgatcgaagtatacaaacatcagttccaggatctgaatgatgtgatcgcacagattaagaatcgcaattacaaatttatcatttacatggatgatctttcttttgaagaattcgagattgaatataaatatctgaaagctgtgatcgaaggcggacttgaaaagaagcctgataatgtattgatctatgcaacttcaaacagaagacatctgatccgcgagacattcaaagataaagaagacagagatgaagaacttcatacaaatgataccgttcaggaaaaactgtctctggtggcaagattcggtgttactatatactttggaaagccggataagaaacagttccaggagattgtgcgtgaactggcaaagaaaaacggaattgacatgtcagacgatgaattattcctggaagcaaataaatgggaattaagtcacggtggattatccggaagaactgcccagcagtttatcgattatctggccggaaccagataaaatgtaatgtattgtaaaaaatgtgcagaaattaatcctgcacattttttatatttgaaatatcggagtcaatgaccagagaatagtttgtatagtaaacaacgaatcccggctttgccccgttcggcttcttgacatgttttttctggatatagtcgatctccactttgtctgctccacggtttttagagtagtaagcggccagacgacctgcttcttcaaaggtacggtccggaagttcatccccgccgcttttgacgataacgtgagatcccggagcaccttttgcatggaaccaccagtcattgccattggcaaaagaaaaagtaagttcttcattttgaaggttgttctttccaacgtacatatcataaccatcactggaaatgtaatgcattggtttgctggtcagtttaacttttttcttcgtatgttttctgcggatatagccgctctgcatcagttcctctttgatctgagcaagatccgcttcgttcagagcaatgtcaagtgcgttgctgatagattccagatactggatatcatcggcagtttcctggatcagctccgtcaatgcttcaaatgtacgcttctgtttgttgtattttgcaaaataacgttgcgcattctcgcccggagtctgtgtcggatcaagcgggatagtaatctcttcgttggtataataattcagggcagtcagttcttttgatcccggttccagattatagccgtaagtattgatcagttctccgtaaactttatatttgtcacgcttttccgttccctttaactgcttggactgaagatcgtattttttgcggttccgttccagtgctgtctggacaacatgccggagatctgcacttttctgatggattctggtcagtgtgttacgtgtggaataatacgtatagaggacttccgagatggaaaagaactctttttttgtatattcgttaaaatgtgtgaccggaagggcactgaattcctttggtgcatttccattataataaatagaaggatggaaatttccctgtcttacgtcctccatataataggtaaactgacggtacagatgtgtcagtacatcttcggaaagatcatgcgccgtcatggaagagtccacacctgcaagataacagatctcttcggcaatgaccgggctgatacctgtcatgctggaatagattgctttggatatcgtcatcggttttgcaaggattgccgaaatgaattcttcctgcgtagccgtcatcggattctttttcgacatcgtatccggaataaagtaatcgcgtcccggcaatacttcacgtaccgaactcatctgtgcagagacgtgcttgatactgtcgatgatgcgtccgttcagatcacagaaaataatgttgctgtgttttcccatgatctcgatgatcagttttttcctgcacaagtcacccatctcatccagatgctcaatatccaggtggatgatacgctcgagtgacggctgggagactgcggtgatccgtccgcctccgatatgcttgcgcagaagcatgcagaatccaggagccgtcatcggacttggtttgttctcgttggttaaatagataagtggaagagaagcactggcagagatatagagccttttttgtccttcatttccttttattgttaaaagcagttcgtcattttctggctgggcgatcttggagatacgtccgccgaccagagtatgttctaattcctgaacgactgctgcgactgtgattccgtcaaaagccataaaaagaccttcctttccttacagaatttcatatttgtctagtatagcatagttgacgaactttgccaaatgtcttataataaatgctggtttattttaaataatgaataagaagaggatcatatcatgattaagagtatgacaggattcggacgctgcgaagcggctgatgaggaacgtaaattcacggttgagatgaagggagtgaatcatcgttatctggatgccaatatccgtatgccgaagaagcttaatttttttgaaagtgccattcgaagccttttaaaggaaagtgttcatcgtggaaaggtggacatctttattacatatgaagacttttcagagagtcaggtctctttaaaatacaatgagacactggcagcagaatatctggaaaagtttaaaatgatggaagaaaaattctcactggagaatgacatccgtgtatccacattgtcccgttatccggaagtcctcacaatggaagagaagatggatgatgaagaagaactgtggaaaggacttaagaaagcactggatggtgcgatcgcacagttcgtacagactagaaccgtagagggagagaatctgaagaaggatctgatcgcgaagctggacggtatgcttgaactggtcggacagattgaagaacgtgcaccgaagatcattgcggagtacagagaaaagctagaaggaaaagtaaaagaacttctggaggacacacagatcgatgagggacggatcgcatcagagatcgtgatctttgcggacaagatctgtaccgatgaagaagtggtacgtctgagaagtcatgtggaacatatgaaggcaacccttcagtctgatgacagtggaatcggacgtaagcttgatttcattgcacaggagatgaaccgtgaagcgaatacgattctttcgaaggcgaatgatctggagacttccaatatcggaatcgaacttaagacagagattgagaaagtcagagagcagatacagaatattgaataaatcagattgttaagaagattaaaagagggtatcgaaatgagagaaaaagggattctgatcgttgtatcaggtttttcaggttccggtaagggaaccattatgaaagagctgttaaaacagtatgataattatgcattatctatttccgcaaccaccagaaatccgcgtccgggagaagaagacggacgggaatatttcttcaaaactgtagaagattttgaaaaaatgattgcgaaagaagaactgatagagtatgctaggtacgtggataattactatggaacgccgcgtgcatatgtagaggagcagttagaggcaggaaaagatgtgattcttgagatagaaattcagggagcgttgaaagtaaaagaaaaattcccggatacactgcttttgtttgtaacaccgccgagcgcagaggaacttaagagccgtctggtgggccgtggaacagagacaatggacgtgattgaattccgcatgaaccgtgcgaaagaagaagcgctggagatggatcaatatgattatctgatcataaatgatgacttgcaggaatgcgtagaagagatgcatcagatcatccagggtgagcacagaagaagtttccgtaacgctgaatttatagagcatatgaaagaagaattgaaaggagaataagtgtatgttacatccatcttacacagatttaatgaaagtggtaaataaagacgtagaagagggcgaaacaaaagtagttaacagccgttactctatcgttatggccacagcaaagagagcaagagagatcattgacggatctatgccgcttgttgatgcaaagatgggcgaaaagccgctttctattgcaattgatgagatgaatcagggaaagatgacgattattgcacaggatgaagaggaagaagaataaaatctgacaccttaaggatccgttgcagacggattctttcagacacattgctgactgagatacaaaaggcagatgccgcaaggtgtctgcctttcttgaactggatatagcaagatagcaaagatgtgtgccgaatagaatgcatactgcaaaaatcagaaataaataaaaaggagaaccgaatgaatatatttttcgtatcacttggctgtgataagaacctggtagattcagaggtcatgcttggacttctggatgcgaaaggataccagattgttgatgatgagacacaggcagatgttatggtgattaatacctgttgttttattcatgacgcaaaagaagaaagtatccagacgattctggatatggcaagatataaagaagaaggaagattaaaggcattggttgtaaccggatgtctggcacagagatataagcaggagattattgatgagatcccggaagttgatgtagtgcttgggacgacttcgtatgataagattgtagaagcagtagaagaagcactggaaggtaaatcagaagtagaacttgccgatatcgatgcgctgccgcttccggagacaaagagacttgtgacgaccggaggtcactatgcatatctgaagattgcagaaggctgtgacaaacactgtacatactgtattatcccgaaagtccgtggaaattaccgcagtgtaccgatggagcgtctgatcaaagaagcacaggaactggctgaccagggcgtaaaagaactgattctggttgcacaggagacaacggtatatggacaggatatttacggtgaaaaatccctgcataagcttctgaaagagttatgtcagatcaaaggaatccgctggatccgccttctgtactgttatccggaagagattgatgacaatctgatacaggtaatgaaagaagaaccgaagatctgccattatctggatctcccaatccagcatgcaagcgatgcgatcttaaagagaatgggaagaagaacttccaagcagcagctgatcgatacgatcacaaaactgagaaaagagattccggacatcgcacttcgtacaacgttgatcaccggtttcccaggggagacacaggagcagcatgaagaagtaatggaattcgtagatgagatggaatttgaaagactgggcgtatttacttattcgccggaagaagatactccggcggcgaccatgccggatcagatcgacgaagaagtaaaagaagaccgtcaggcagatattatggagctgcagcaggagattgtattcgatcaggcagaagatatgatcggaaaagaagtactggttatgatcgaaggaaaagttgccgatgagaatgcatatgtcggaagaacttaccgcgatgcaccgaatgtagacggactgatttttgtaaataccgatgaagaactgatgactggtgatttcgcaaaagtgaaagttaccggagcagcagaatatgatttgataggagagttgatgtaatgaatttaccaaataagttaactgttttaagagtaatcatggttccgttttttgtatttttcatgctgacaggcgtgggcggagctgcaaacaaatggattgcattgattattttctgcgtggcaagtcttacagatatgctggacggaaagatcgccagagccagaaatcttgtaaccaatttcggaaagtttatggatccgctggcagataaactgcttgtatgttcggctatgatctgcatgatcccgcttggaaaactgcaggcatggtttgtaatcgtaattattgcaagagaatttatcatcagcggattccgtctggtagcagcagacaacgatattgtgatcgctgcaagctactggggaaaattcaaaacggtatcccagatgttcatgctgatccttctgatcgcagatcttggcggtgcatttaacatgatcgcacaggtactgatctgggtatctctggtacttacaatcgtatctttgatcgattatattgcaaagaatgtacaggtactgacacagggcggtatgtaggctcagaagaaatttgtaaaaaaggcagataaggattcttttgaaagaaaacaggtcgaaagagatatgagaaggttcttcttcgggaatggtatttccccgagaagaaccttttgcaaattgtgccaaaaaaagagaaaattccatacaaaaatgtagagaaaaatcaattgacgaatgtcgaaatatatgagaaaataaatacaagtatggatgttaaagagataacaaaccttacgataagcaaacttacatagttgaaaggagttttaaaatgatttattcacaggaagtagaaatgatgtgtccggtagctcagggtgcaaaccacggaccagctccgattccggaagaagcaaaatgggttcaggctaaggaaattaaagatatctctggttttacacatggtgtaggctggtgtgctcctcagcagggtgcctgtaaattaacactgaatgttaaagacggtatcatccaggaggctctcgttgagactatcggatgttcaggaatgacacattcagcagctatggcttctgagattcttccaggaaaaactattttagaggcattaaacacagaccttgtttgtgacgctatcaatacagcaatgcgtgagttattcctgcagatcgtatacggaagaactcagagtgcattctctgaagacggacttgctatcggagccggactggaagacctcggaaaaggacttcgttcacaggttggtacaatgtacggaacattagcgaaaggtcctcgttaccttgaaatggcagaaggatatgtaacaggtatcgctcttgatgagaacgatgagatcattggatatcagttcgtaagccttggaaaattcacagacttcgtaaaagctggagacactccaaacgaagcttgggagaaagcaaaaggacagtacggacgtgttgcagatgcagttaagatcatcgacccacgtaaggagtaatctcaatattttaaggtaatttaatcaggaggataaattaatggctttatttgaatcatatgaaagaagaattgataaaatcaatgaagtattggctggttatggtatttcttctatcgaagaagcacagcagatcacaaaggatgccggacttgatgtatacaatcagatcaaaggtattcagccaatctgttttgaaaatgcatgctgggcatacatcgtaggtgcagcaatcgcaatcaaaaaaggatgtaagacagcagcagaagctgcagcagcaatcggagaaggacttcaggctttctgtattcctggatcagttgctgatcagagaaaagtaggtcttggacatggtaacttaggaaagatgcttctggaagaagatacagagtgtttcgcattcctggctggtcatgaatcattcgcagctgctgagggtgctatcggtatcgcagagaaggctaacaaagttcgtaagaaacctcttcgtgttatcctgaacggtcttggaaaagatgctgcaaagatcatctcaagaattaacggattcacatatgttcagacagaatatgattactacacaggagaactgaaagaagtacagagaatctcttactctgacggactccgttctaaagttaactgctacggtgctaacgacgtacgtgaaggtgttgcaatcatgcacaaagaaggcgtagacgtatctatcacaggtaactctacaaacccgacacgtttccagcatccggttgcaggtacatataagaaagaatgtatcgagcagggcaagaagtacttctcagtagcatcaggcggtggtacaggacgtacacttcacccagataacatggccgcaggtcctgcttcttatggtatgacagatactcttggacgtatgcactcagatgcacagttcgcaggatcttcatcagtacctgctcatgtagaaatgatgggactgatcggagcaggaaacaacccgatggttggtatgactgttgcagttgccgtttctgtagaagaagcagctaaggctggtaagttctaagaaattgaatatttagtttggcttgtataggccggatttgaaaagagagaacgaaaacgttctctcttttttaaatcctaaattatttgtttaagtttttattcgccgtagaaagcatcagtttcaaccggttcaactggttgacttcgcttgcacctgggtcgaaatcaattgctacgatattagactccggatagcgtctgcgaagttctttgataactcccttacctacgacatggttcggcaggcaggcgaatggctgtgtacatacgatatttggcgcaccactgtggatcagctctaacatttctcctgtaaggaaccatccttcaccagtctggttaccaagagatacgatgtccgaagccatctttccaagatcctgaatcttagctggcggtgtgaagtgcttgcttgctgcaaatgcttcagttgccggagcacggaaccattccagagctttgataccaagattagctgttgtggcttttttcttttcgaatccaagcttttcaaccttgaagttctggttgtagaagcagtagagcaggaagtccaagagatccgggacaacagcttcggctccttcactttccaggaggtctaccaggtagttattggcagccggaaggaatttgacgagaatttcgccgacaacgccgacacgaggtttcttaatgtccagtaattcaatgttgttgtcaaaatctccaatgatctcacggcagagacgtttgaatttacgcctgctcgggtagccgttagacaagaagtcctggcatactttcacccattttctgtgcattgcattgacagatccgggaactgcttcatatggacgcagacggtatacacatttcataaaaatgtcaccgaatatagcaccatagatgcctcgtaagatcagcttcggagtcagcttgaatcccggattgtcttccagaccgcttaagttgatggagataaccggaatatttccgtatccggccttcttaagagcacggcggatgaatccgatgtagttggaagcacggcatccaccgccggtctgactgatgatcacagcgattttatctgtatcatatttaccggaaagaattgcttccatgatctgaccgactaccatcagagatggatagcaggcatcattgtttacatatttcagtcctacgtctacagcctgtttgttgtcattaggcaatacctgaaggttatatccggatgcgttgaatgcaggctccagaagctcgaaatggatgggagacatctgtgggcagagaattgtataattcttacgcatttctttggtgaatacgaccttttttattgcagaagaatgaatggtacgtttttccccacgtttctctctgacacggattgcggcaagcagtgatctgacacggattcttgcggcgcctaagttattaacctcatcgatttttaaagaggtgtagatcttgtcagagtcattcagtattgatgccacctggtcggttgtaacggcatccagaccacatccgaaagaatttaactggatcagatccaggttgtctaccgtctttacgtagtttgctgcggcatacagacgggaatgatacatccactggtccataacattgagaggatgctcggcaggatttaagtgggagatggaatcttccgtcaaaactgcaatattataagaattgatcagttctggaataccatggtttacttccggatcaatatgatatggacgtcctgcaagaacaataccacggtttccggtttcgtttaagaacctgatcgtctcttcgccttttttctgcatatcttttctgcaggcggcgagttcttcccaggcggtatgcgttgcttttttgatctcgtcagctgggatatggaactttccggataattcatcaaccagccggtaagagatggtgtcttcgctggaaaaagaaataaatggatgaagaaaatctacttctccgtgaacaattgcatcaatgttattcttgatattttccgggtaggaagttacgatcggacagttgtaatggttattggcttccgcaaattcattcctctcatatggaatgctgggataaaagatggtgtggataccgttgttgatcagccattgtacatgtccgtgtgccagctttgccggataacattcggattcacttgggatggaatcaattcccagttcgtataccttgcggtttgacacaggagaaagaacaacccgaaatcccagttcattaaagaatgtgaaccagaacggataattctcgtacatgttcagtacacgaggaataccaatgattccgcgaggagcattttcctctgccaatggttcataatcaaaatagcgttttaatttatattcaaataagttcggaagcttgttagttgttttctgtttcccgagaccacgttcacaacggttacctgtgatgaacttacgtccgccgctgaaatgattgatcgtcaggcggcagttattcgtacatcccttgcattttgtcatagtagtagaatattccatggcttcaatatcttcgatggaaagcatggttgtaccttcgcagtcaacgtaacgctcacgtgcgatcagtgcagcaccgaatgcgcccatgataccggcaatatccggacgaatggcttcgcagttggcgatcttttcaaagctccgcagtacagcgttgttgtagaatgttcctccctgaacaacgatgtgtttaccgagttcagatgcatcggacaccttgataactttaaataatgcgttcttgattacggagtaagcaagaccggctgaaatatctgcaacctccgcaccctctttctgagcctgttttacttttgaattcatgaaaacagtacagcgggtaccaaggtcaatcgggtttttggcaaataatgcttcatgagcaaaatcttctaccgtataatttagagattttgcaaatgtttcaataaaagaaccgcatccggatgaacatgcttcattcaattgtacgctgtcaaccgtctgattcttgatcttgatacatttcatatcctggcctccgatatccaggatacagtctacatccggttcaaagaaggatgcggcatagtaatgagaaactgtctctacctctccttcgtctaacaggagggcagctttgatcagtgcctcaccatagccggtagagcaggagtgaacaatctccacgccttccggcagtttactgtaaatgtctttgatggcagagatcgttgtaccaagaggatctccttcattattatgatagaaagaatataataaagtaccgtcttcgcctaccagggcagctttggttgtggtggaacctgcatcaataccaaggaatgcttttccctgataagtggcaagatccttcacaggtacctgatgttttgcatgacggttttcgaattctttaaaatctgcttccgttgcaaacagcggctccatacgatccacttcgaattccattttgatctttccttccagacggtgctgcatatcaatgagaggcacgtccagatctttctttgaattcagagcagaaccggctgctgcaaacagatgggaatgtgtcggggcgatgatgtgttcatcgtccagcttcagtgtgcggatgaaagcttcgcgcagttcagagaggaaatgaagaggtcctcctaagaatgcaacatgtccgcggattggtttaccacaggccagtccgctgatagtctggttgacaactgcctggaatatagaagcagcaaggtcttctttggcagcaccatcattgatcagaggctggatatccgtcttggcaaatacaccacatcgtgcagcaatggtatagagagctttataattttttgcatattcgttcagtccggaggcgtcagtctgtaaaagagatgccatctgatcgatgaaggatcctgtaccaccggcacagacgccgttcatacgctgctctacattaccaccttcaaagtagataatcttggcatcttccccgccgagttcgatagcaacgtctgtctgaggtgcatagtcctggagagcagtagatacagcgatcacttcctgtacaaacggtacaccaagatgtttcgcaagagtcagtccgccggaaccggtaatgaccggtgatgcatggacaggacctaatttatgtaccgctcttcctaacagatcggaaagagtttcctggatgttcgcgaaatgcctctcataatcagaaaataccacttcattattctcatctaatatggcaatctttacggttgtagaaccgatgtcgataccaagtgcgtataattctttttgattcatattatgtaactccttatcatgttgatctatatgtctttcttcttattaaatgcattttgcttaattgcaacctgtaacattatacgacaaaagttctcaaaagacaattaacaaatgttgaagatatgttaaaaagagatgaactttacttggcacaattgacaaatatcagttgggaaggtagaatatctacagtgtgagaataaacgtaaaggagcagttatatgaacaattggttagataaacttgaacggaaatttagcagatatgctattccaaatttgatcacatatattataatattatatgcagccggatttgcgctggagttgattaacccgacgttctatagccagttcttaagtctggatgccagcaagattctccaggggcagatatggagaattgttacatttattatccagcctccgtctgacagtctgatctttattgcatttgcattgtatctctattatatgatagggaagcagttagaggcagcgtggggggcgtttcgttttaatctgtatttcttttcgggaatgctctttattgtactgggagccatactggcatatttactgacaggcactgtgttaccaatggatacatggtatctgaatttatcgttattctttgcatttgcagcactgtatccagatattcagctgttattatttttcgttattccgattaagattaaatggctggctatacttgatggcttgtattttatctatgcgattgtgcaggcttttcttccggcctacggcggaggtgttttcggtatatattataaggcgaatgcgcttgcagcatttatctcaatactgaactttatcatttttttcctgagttcacgtaatatgaagccttacacaccaggtcagatgaaaagaaagaatgatttcaaacgcaagatgagacacgcggaaagaccggtaaacagctatgcaaatggggcaaaacacagatgtgcagtctgcggaagaacagaactggatgatccgaatctggaattccggtattgttcaaaatgtaatggcaattatgaatattgccaggaccatttgttcacacatacacatgttaaataatcaagagaggaataggagaaatatgaaaaaaacaaaaattatctgtacaatgggaccaaatacaaatgatgaaaccctgatgagaaagttagttcagaatggaatggacattgcaagatttaacttttcacacggtgatcatgaagaacagaagggccgtatggatatgttaaagaagattcgtgaagaagaaaacaaaccgatcgcaattcttctggatacaaaaggacctgagatccgtacaggtgtattaaaagatggaaagaaagtacagcttgaagcaggagagacatttaccctgacaacagacgagattgtcggagataacaagattgtttctattacatacaaaggtctggtagaagatgtcaaagccggaagtacgatcctgatcgatgatggtctgattgaactgaaagtaaaagataaaaagggaaataacatcaattgtgaaattgtcaatggcggcgagctcggagaaaagaaaggtgttaatgtaccaaacgttgcgatccgtcttccagctatcacagataaagaccgtgatgacctgaaattcggtgtggagcagggtgtagattttattgcagcttcatttgtcagaaatgcagagtgtattctggagatcaaatcattcttaagagaatgtaaggctccgtatattcctgtaattgcaaaaatcgagaactttgaagcaatcaagaatattgatgagattatccgttgcgcagacggaatcatggtagccagaggagatcttggtgttgaaattccggcagaggaagttccataccttcagaagacaattatccagaaatgtaacgataactttaaaccggttatcacagctacacagatgcttgattctatgatgcgtaatccacgtcctacaagagcggaggttacagatgttgccaatgcggtatatgacggaacagatgcagtcatgctttccggagagacagctcagggtaaatatccgttagaagctttacagatgatggttcatattgttgaaaatacagaggagcatctggattatgatatgatccttagaaaagcaggagaacacagacttaagagtgcatccagcgcacttgcaaatgcaacagtaacaacggctaataatcttcgtgctaaatgtatcgtaacaccaactgtatcaggtgctacggcaagagttgtatctaagttcaaacctaagacaggtattatcggtatcagcccggatgaggcaacactgagaagaatgcagatcaactggggagttatgccgctgaaatcagttgctgtatatacaacagaagatatctgtgatacggcaatcgatctgatctgtgcaaagaagcttgcagaagcaggagacatggttgtattaacgcttggaattccatctacaaatgtatctgagaacagaacagtaagtaacatgatgagaattgcgatggtagatgacagaaaataaaaatagtaaataagcaggactgcttataaagaaccagaaagcaacgaggctgaatcagcctgggctttctggtttttttgcatgtttttgaaaaagtttctccttgacatacagcgaaaattcacttatagtgttcctgtagagaactactaaagaaccaaaaggtggatgacgaagatggaacagacatcatttacagagcgcctgatggaattcggactcacaagacaagaagcaagcatttatcagtgcctgctgacagagggaaaggtaactggatacgaagttgctaaacagaccggaatatccagatccaatgcatataattctctggctagtatgacagagaaaggtgcggcttaccttgtagaagaggccagtaccagaaaatatgtgcctgtcccgcttaacgaattctgtaagaatcgtatccgtaagctggaggaatccggaaaatggctgcaggaacatatgccgacggagaaagcgtatgtagaaggatacattacaattgaaggtgcagagaatatactgaataagataaagaatctgttatctcaggttgatcaaagagtctatatcagttgtacaagaaattatctgctgcttctgatccgggagcttgatacattgatggaagaaagaaaaaaagtggtgatcatcaccgatcaaccggcgacctttcacaatgcaaaagtatattttggagaaaacagaggaatgcagataggaatcattgccgattcgaaatatgtactgacaggtgaatacggagaggggagtatgaatacatgtctctattccggacagaaaaactttgtagaattgtacaaaacagcacttgcgaatgagataaagttattatctatacgagaggagaacaaggattgatgaaaaaagaaccatttgtaacaaaagcacagttagacgagattattaaaacttatccgacaccgtttcatttatatgacgaaaaaggaatccgtgagaatatgaaagctttaaaagaagcattttcgtggaataaaggatacagagagtattttgcggtaaaggcaacgccaaatccgtttctgatcaatattttaagagagtatggatgcggatgtgactgttcttcctatacagagctgatgctttccgatgcgatcggggcaacaggagaagatatcatgttttcttcgaatgatactccggcagaggaatttgtactggcagacaagctgaatgcaatcatcaatctggatgatatcacacacattgattttcttgaagaagcaattggacatattccggagacgatcagctgccgctacaatccggggggaatgttcaagatcagtaatgacatcatggataatccgggagatgcgaaatatggaatgacaacagaacagttatttgatgcatttaagattttaaaagaaaaaggtgccaaagaattcggcattcatgcattccttgcaagtaatacagtaaccaatgagtattatccgatgcttgcgaaagttctgttcgaagttgcagtaaagcttcagaaagaaacaggtgtacatatcaaattcattaacctgtccggtggtgtaggtatcccttataaaccagatcaggagccaaatgatatccgtgcgattggtgatggtgtgcgccgcgtatatgaagaagtactggtacctgccggtatgggcgatgtggcaatctatacagagatgggacgttttatgatgggaccttacggatgcctggttacaacggcaattcatgaaaagcatacacacaaagaatatattggtgtagatgcatgtgcagttaacctgatgcgtcctgctatgtacggagcttatcatcacattactgtaatgggtaaagaaaatgcaccttgcgatcacaaatatgatataacaggatcgttgtgtgaaaacaatgataaatttgcaatcgaccgtatgcttccgaagattgatatgggtgatgtgctggtaattcatgatacgggagcacatggcttctctatgggatataattacaatggaaaattaaaatctgccgaagtgcttctgaaagaagacgggactacacaactgatcagaagagcagaaacaccggctgattatttcgcaacattcgactgctttgatatcggaaaaaaactgattgaaaaatagttgtggaaaaaatcaggtttagatataatgatagtgtcctttcaattaagaaacgggcactatcattttttatgaggaggcaataaaatgaaaaaacatggtgtactggcgctggtgctggccggagtgatgttactgttatgcggatgtggaggtatgacaacggacgatgcaaaggattatgtacagtctgccttggattgtggatacaaagcagaagttaagaagtatgccgagataacagagacgacagaaaaagaagccaaaaaagaatacgagacaaatcttgatacaattatgaaagaagccggctttgatgacaccggtgtatcagatgaattaaaagcggactatcgttcgatgtttgaaaaaatgttaaagagtgcaaattataaagtgaaagaagcaaaagaaacagaagatgatgaatttactgtaactgttgaagtgtgtccgtttacggcattttctactgtatcagatgagcttgatcaatgggtgacagacacatattcgaatgtagaaacaattccatcagatgaagagcttaatgaggcgattatgcggaagatgtatgaaattatgagtgcaaaactcgctgacccgacgtatggcgataagatggaaaaagaagttcacgtaaaggtgaataaagacggagcatattatattccgaatgatgatctcacggcagtagatgatgcattgttcccgcagaatcagctttaggttccggtaaacaaaatatgaattaaaaactgaattaaaaactatgtaaaacacaggttttggggattgacatccctggaatctgtgttgtattatatacaaaaataattgaataacattctgttgttcggtcttatttaatttcagataaatgatcaaaaggcaggtcatgcttctcatatgacgttgccagacaacccatttataatctatccaagtgaatatggaataatctgacagattttacgttgtgtttgacatggaaaggaggtatttacaacggtcggattaatataaataacaagaaagagaggaattgtatgacgaagattcaaaaaagtaagaaaacgatagcttcgttactggcagggatattgctatgtcaggtctctgcgtttggcgtgtcacagaccagtgtgaatgcggaaaatccggcaaggaagttgagttttgaagttgtaggagaaggttctgtaacagtaacagatgtagaggattgtataagaacggtccaatcaggcagtgaaataacagtgcctgatggaatgtgtatacgtgtacaatcggatgcagaagaagacaccaggatcagcatgaagatacttgatgaagaaggcagatacgagctggaagacacttcggtgacagaggggaagagttattggcgtgatattacagctatgggtatgaacaagaaagtagtcataacattcggggaagaagcaggaagaagcagtgtatattcaagaagaatggtacaggcgcggggaaatcaacaaaagccggaagtaggggatgtatttaccggaaattgtgtggtcacggctgtgaatggtggaaacggtcatacggtacacggggtaaccatgggcggatttaccggaatccttgccggcgttactgcaaacggagggtgtgcggatcatacggctgctgcgccatatacagggcaggaatgcacctataaatacaccatcactgcagtgaataaagcaacgggagaagttacaggaaacttatactgtacgagtgtgaatggggcaacggatggcgtgacaaaagacagcagcggcaggctgatcgggtatcagagagtcagcggaactgccgtcatacaccgcagttacaacggttatgcaaagttaaaaaaaggaaagacactgacaacgcttacagatggtaatgcagaatattctttggaaggtgcagcctacggagtctattcagatcgtggcgcaacgagagaaaacgctgtatttacaacggataaaaacggagagtctaatacgctggaattagaagaaggtatgtattatgtaaaagaaaagaaagcaccaaaaggatataaactggatgagaggatatatccggtaacagttacatccggacagacagcagaagtaaatgtgaaggatgtaccggtgtattcagatatagaattgctcctggataaaatcgatcaggagagcaaagagggaaaagcacttggcggtggaagcctggaaggtgcagagtttacagtacgcttttatgcaggcagatatacgcaggaatctttgcctgaaaaaccttcgaaagtatgggtgttacgtaccaaaaaggagaatgacgtctgcagaagtaaactgggaaaagagtatcagatatccggtgatgatttttattatgcagaaaatggagataagccggtgcttccgcttggaacagtcagcattgaagaaaccaaagcgccaaaaggatatatgctggaaaaggcttatatagaaggagataacggaaaacttgcagaaaattattacctgacacagatcgttcagaatggaaatcagaccaatatacagggtggaaacaactataaaatagcagaccgtatatgtagaggggatattgaatttcagaaaaaagatgaagaaacacagatggcaatggcaggaattccgtttcagatcacatcggtaacgacgggggaatgtcaccggatcatgacagacgaaaatggatatttttcatcggcatctgattatacgaaacacagcaaagataccaatagcggacaatctgaaagtggtgtgtggtttggaacgaacagtaacggagaaagtgtagaggtaaatgatgcatatggtgcatttccttatgatacctatcggttggaagaacttcgctgtgaagaaaatgtagataaagttctgtataaaggaacattccgtatttccagggaccggtatgttgttgatcttgggacaatacttaatccagatcttacaattgcaacatcagcaaaagatgaagcaaccggaacacattattcaaatgcagatgaaaaagtaacgatcatagataccgtcacttatacaggtttgaaaaaagggcaggaatatgtcatgaagggtacattgatggacaggaaaacaggggaaatgattctggatggcgaaaacagaaatattactgcttctaagagatttaagccgaagacagccgaaggcagcgtggaagtgaaatttgaatttgctgcaaagtctctggccggaaaaagtattacaatatttgaagaatgcatgttggataatacagtgatcgcagtgcataaggatctggaagatgcagatcagatgattcattttccaaaattaaaaacttctgtaaaagacgaagtaacagatatgaagatggtaaaagctgagaaagatatgcggattatagatacggtagaatatcataatctgaaaaaagggaaaaaatacaagattaccggaacgttaatggataaggaaacaggaaaagcagcaagaagtgcgtctggcagaaagataacagaaagtgtagaatttgttgcagaaggaaaagacggaacagcggaagtagaatttgtgtttgatggaagtaatcttgcaggaaagacattggtcgcatttgaaaaattatattatggtgataaattatatgcagtacatacagatctggaagatgaagatcagacaatccatgtgccggcagcaggaacaacggcttctgacaaaaatacagggacacatcatgcatatgccggtgaatatgtagaacttacagatacgatagaatacaggaatctactgcctggtgaaacctacacattacatggaacggtagtcgagaaggagacagaacagcggttgagtgaagaaaaacagcaggaatttattccggaaaaggcagatggcagtattgaaattgcatttgaaatcaatggaactgatctgtcgggaaaaacggcagtcatatatgaagagattaaaatagacggaaaaagtatcgcagaacataaaaatccggaggcaaaagaacaaagtatttatttcccgaagattggtacaaaagctatggataaaaagtcaaagacgcaggaaggagatgcaagagaaaagcagacaatcatagatcaggtgtcttatgaaaatctgctgcctggcgaaacttacatattaaaaggcgttttgatggataaagcagacgggaaagaaatgacagataaaaacaacagaaaaatcacaggcagaacaacatttacgccggaaaaatcagcaggaacagttgaaatgacattcgaacttgatgcacgtgaattgggcgggaaagcggttgtggtatttgagaatctgtatgatgaggaagatcatctgattgcagatgaagcgaatatagataatgcggatcagacaattatatataagaataatgaaaaatctgcagtatcgccgaaaatcaacacagacaatccgaaaccatcttcatccatccgtaaatcaccgaagacaggagtggaaaatcatacatttttatggatgttgacgcttggatctctgggaacagcggttgcggccggaattgcaatttatagaaaaaaacgggattgatgaaagttaagcactagcggaagaaaatagaatcttctgttagtgctttttgtataaaaaaagaaacatctacttcttacgaaaacatagtaacaaaaatagtaagaaaagtaaatgtctctaatcgttaaaccccttgattttactggggtttttgaatgcggatagtgggacttgaacccacacgaagtcacctccgcaagattttgagtcttgtgcgtctgccattccgccatatccgcatatgtgttgttcacacaacaaaataaattataactataaatgtatcgtctgtcaatctttttttaaaaaaaagaaaaggtgaatgtgacagataagggaagaataagtaggagtaaaaattagccttttaaaaagaagcaaattggtgtatagtaagatagtgattttataagaaaatgaactatttaggtggagagataaaatgagcagtaaaattgttctgatagatggccacagtattttgaaccgcgccttttacgggctgccggatctgacgaatgcagaaggccttcatacaaatgcaatatatggatttctgacgattatgtttaaacttctggaagaagaaaaaccagactatctgacggtggcatttgatgtccatgctccgactttcagacataaaatgtatgcagaatataaaggcaccagaaagccgatggctgatgaactaaggcagcaggttcctgtgatcaaagaagtgcttcaggcaatgggagtgaagacgatcgaatgtgcgggtctggaggccgatgacctgatcggtacactttccaagcgttgtgagcgcaaggatatggaagttgtggttatttccggagaccgtgatctgttgcagctggcgactgagcatgtaaagatccgaattccgaagacgaagcagggcagaacggagatagaagattattatgccaaagatgtttttgaacgctatcaggtgacaccggaagaattcatcgatctgaaagcgttaatgggcgacacggcagataatattccgggagttcctggtatcggggaaaagacagcgacaaagatcattacacagtatcactcgatagaaacggcgcacgatcatgtggaagaactgaagccgccgagagcgtctaaatcattaaatgaatactgggatcttgcggtgctcagcaaagaacttgcaacaatcaatgtgaatgctgagttttcatatgaactttcagaagcaaaactgggtaacgtatacactgaggaagcatatgtcttctttcagaaactagagtttaaaaatcttctttccagattcgatgttgcggcaccggcaaataagatcgaggatggtttcaggattatcacttcaaaaagagaggcagaagagatttttgcaaaggctgaaaaggcacagacgacaggaacagtactttttaaagatatggaaaatgtattgccgttatttgcagatcaggccggactcggaggtatcggtctgtgcttctcaaatgaagcaggcttttgtataaaaaccgggaatgatatatcaggagaatggattttggaaaagcttgcagatgtggcagaaacgacagatacattttcgatgtttcatctgaaagaatcaatggatcagattaagatccggaaaccggaaaattgttttgatgtgagtgtggctgcatatctgctgaatccacttaagaataattatacatgggaagatgttgcgagagaacatctggacctgatggttgatgaaaaggcagatcaggaaataaaggcctgctatgaagcttatacaaattatgcatcagtagaagtcctgagccggaaattagcggatacgaagatggataccttgttccgggaaattgagatgccgctggtatttacattgttcgatatggagcagaatggtatccgtgttgaggcagaggcactaaaacagtatggtgatcagcttgccggcaagatcggtgatctggaaaaggagatctacgaagaggctggcgaaacatttaatattaattcgccaaaacagctgggagtggtattgtttgaaaatatgaagcttccgggtgggcgaaagacaaagacgggttattccactgctgcagatgttcttgaaaaactggcgccggaacatccggtagttgcaaagattttggaatacagacagtatacaaagctcaaatccacatatgcggatggactggcaaattatattcaggatgatggaaggattcatggaaaattcaatcagacgattacggcaaccggaagaatcagcagtacagaaccaaatcttcagaatattccggtgcggatggagcttggccgcctgatccgtaaagtattcattccggaagatggataccggtttgtggatgccgattattcacagatcgaacttcgcgtattggcacattgttccggagatgagcatctgatccgggcatataaagaacaaagtgacattcaccgtattacagcatcgcaggtatttcatataccgtttgatgaggtgactccgcagcagagaaggaatgcaaaagccgtaaatttcggtattgtgtatggaatcagttcatttggactgagtcaggatctgagcattacacgaaaagaggctgcaaaatatattgatgattattttgcaacctatccgggaatcaagacatttctggatcatgcagtgacacatgcaaaagaagaagggtatgtggtaacactgttcggaagaagacgtccggttccggagctttcttccagtaatttcatgcaacgttcgttcggagagcgggtggcaatgaattctccgattcagggagcggcagcagatatcataaagattgcaatgatccgggtgaatcagaaactgaaaaaacagaagatgaaatcaagacttgtcttacaggtgcatgatgaacttctgatagaagcatacgaaccggaactggaagcagttcaaaagattttaaaagaagagatggagcatgcggccaaattaaaggtgccgcttgaaatagacatgcatacaggagtgaactggtacgaagcaaaataagaggtgtgagagatgaagattataggaattaccggaggagtaggcgcagggaaaacacagattttggaatatctgaataataaatatggtgcgactatttgtatggcagatgaagtaggaaagaaactgcagaaaaaaggaacagaatgctttgatgaaattgttgcacatttcggagagaaaattctggatgaaaaaggagagttggaccggacaaagctttcagacattgtttttgccgacagggttgaactttctgtactgaatgggattgtacatccaaaagtaaaagaagaaattcagaagaagattgcaagagaagaacgcaaaagtacgaatctgatgctgattgaaggagcacttctgatcgaggatcattatgaggagatctgtgatgaactttggtatgtgtatgtggaagattcgatccgcagaaaacgtctgaaatatgcaagaggatatgaggactgtaaagtggatcagattttcgaagcacaacttccgaaagatctgttcatgcgtcactgtgaccgggtgatcgataacagcggacagtttgaagagacaaagatccagctgaataagatcatagaagacttatagaaaggcagataatatttaatatgagattatgcagtattgcaagtggaagcagtggaaactgcatctatgtaggagatgatcagacacatcttctggttgataccggtatcagcaaaaaaaggatagaagaagggctggcaaaattggagataaaaggagatgaactggaaggcatcctgattacgcatgagcatgtggatcatattcagggacttggtgtgttcagcagaaaatatgagattccaatctatgcgacacctggaactattgcgggaatccggaattataaaaagctgggaaacctcccagacggactattacatgaggtagaggttgatcagccattttcactgggaacactgaacattgatccgtttgcaatctcccatgatgcgaacgaaccatccggataccggatagataacggtaaaaaggcagttgcggttgcaacagaccttggaatatatgatgattataccgtagaacatctaaaagatttgaatgcagtcgttctggaagcaaatcatgacatacatatgttggaagtaggaccatatccataccccctgaaacggagagttatgggagataagggacatctgtctaacgaattgtcaggaaagcttctttgcgatatattacatgatgacttgcagtatgtcgttcttggacatttaagtaaagagaataattatgaagaactggcatatgagacggtcagactggaaatcagcattggtgataatccttataagggaaatgacattccgatgatggtagctaaacgggatcaggtatctgatatcattgcattataagaaaagtagaatgtaagaaagaaacaatggcgaagacaataggaggaaaacaaatcatgaagaaatgtgtaatcacagttgtaggaaaagacaccgtaggtattattgcaaaagtatgtgagtatcttgcaggagcaaatgttaatatccttgatatctctcagaccatcgtagatggatactttaatatgatgacgattgttgatgtaacaaattgcagcaaagaagtggctgtggtttcaaaagagctggaagagatcggaacttctatcggtgttgccattcactgtcagagagaagaaatatttgaaaaaatgcacagattataagcaaattaaaaatattcacggaaaggcaggaaaaacacatgataaacagatatgaagtatatgagacaaatcagatgattgcagaggagaatctggatgtacgtacaattacccttggaatcagcctgttggattgtatagatgcagaccttgataaattaaatgaaaatatttacaacaaaatcactaccgttgcgaaagatcttgtgaagaccggagaggagatcgagcaggaatttggtattccgatcgttaataaacgaatctccataacaccggtagcactgatcggcggtgcggcatgcaaaagtcctgaggattttgttacgattgcaaagacattggataaagctgcaaaagaagtcggtgtaaacttcatcggtggttattcggcgctggtgtcaaagtctatgacaaaaagcgatgagaacctgatctgctcggttccgcaggcacttgcatgtacagaccgtatctgcagctcgatcaatgtgggatcaacgaagaccggtattaacatggatgcagtacgtctgtgtggtgaaattgtaaagaagacagctgatgcaacaaaagaaaatgattctctcggatgtgcaaaacttgtagtattctgtaacgcgccggacgataatccatttatggcaggtgcattccttggtgtaacagaaggagatgctgtgatcaatgtcggtgtcagcggacctggtgttgtaaagcatgcgattgaacaggtgcggggcaaaggcttcgaagagttatgtgagacgattaaaaagacagcatttaaggtgactcgtgtcggacagttggttgccggagaagcatccaaacgtcttggtattccatttggaattattgatctgtcactggcaccgactccggcaattggggacagcgtcgcagagattctggaagaaatcggtctggaacgtgttggtgcgccgggaacgacggcagcgcttgcaatgttaaatgatcaggttaaaaagggcggtgttatggcttcttcttacgtaggcggactgagtggtgcttttatccctgtaagtgaagataaaggtatgatcgatgcagtggaaatgggtgcactcacaattgaaaaactggaagcaatgacatgtgtatgttcggtaggacttgatatgattgcgattccgggtaagacaagtgcttctactatttccggaattattgcagatgagatggcaattggtatggtgaaccagaagacgaccgcagtacgtctgattccggttattggaaaagatgtcggagagacggcagaatttggtgggcttctcggttatgcaccaatcattccggtcaatgaatatgactgcagtgcatttgtgaatagaaaaggaagaatccctgctcctgtacacagctttaagaactaaaaagagaacagagctataagaaaaacgtgtggcatatgataatgaatacaatttatattatcatatgctacacgtttttgtgcctggacaggaaaggagcgctgctgacgaaagaatgatttatatactatacatgtatgatctgcttttggtattcgtttatgaaaggaattccgaacttgtcggacactacgctttcgtacagatctgatgcaaaagtggtctgatccagcattcgtattgtttctggaagaagcgaatctgtctgccctaattttgtaataaccggaatgctggcgttttcttttatctgacgcagcacatcggcatgttctttacgaaatccaagaattctggtatagatgcaggaagattcccggtatctcaacatatcttctttttttacagctaacagaatatgcagcagacatctgctgatacggctataagtcagttcttttgtttttaaaagctgacagaactgttcgaagttcagaaactgattccggtttcggatgatacggtttgcaagatcctcggatatatcctgatactcacatagagatctccgggtttcgcagagcaggcggtattttaataaaagggagaaatcatttgtttcaatgggacaagattgattccatgcatcccgtaacagacgcagggcgttttcaggaagctggttctgcaacagttcggagaatccgtccggtgtctgctgaggatctgccggatatctgctgaatggctgctcctcccaatgtctcagggcattccgaatggcagaggcagaacttgactgtggctgaagttttgtgtcgtggtatccggaagagtcccgctttaacgtgtatggtaccatcctgctgttctgctttttcagtgctttcagatattcaatcccaagaatattattgggttcagaaagaatctgtgaaacggaagcatcaccggttaatttttccaaagcctggtgtctggcggcaggaaaagaatgtcctttttttaatgcatcctgaagcatatggctgtaagtatctgattcggagagaagcagctgtgcaatatgctgtaaaacagaaagctctccgcattcacttccaaagcataatgtatcgatgcatcccagaccttccagaatagagatggcgccttgggcgaagaattcggcactgccggatgcatagcagacaggaagctcgcagatagccgatgcgccgtttagaagtgccatatgcgcacgggaatgcttggatagaagcgcaggagttccgcgctgtacataatcgccgctcatgacgattacaacccggtcggcaccggttagttccttggctctttctatatgataaagatgtccgttgtgaaatgggttatattctgtgataagtccaacagttttcatgaaaatctccttgtataacattctgaaattgattatactatacaatgatttggtatgcaaatgggatgtttgccgggcaagatccgaagaaaggaggaggcatattattatgggagaaaatatgaatgaggaagccttaacggcagacgggcaaaaagacgatgatattgattatgtagaagacagagaagaactgactgaagaacgtattaaggatatgctggatgcccgggaatataaagaactgaaagaagaactggaaacaaatatgtatccggtggatcttgcggagattctggaagaatttgatcagaaacatatggtgctggtattccgtctgcttgcaaaagaagaagcggcagagacattttcatatatgaacagcgatatgcgcgaagacctgatcaatgcactgacggattccgaactggaagagatcatggaggaaatgtatctggatgataccgttgatgtgctggaagagatgcctgccaacgtggtagacagactgctgatggtgacagatgcggaaaaacgtcagcagatcaatcagcttcttcagtatccggaggacagtgccggaagtgtgatgaatgtagattatattgcactgcgaagagagatgacggttgctgattccatattaaaaataagacaggttggtctcaaccgggagacgatttatacctgttatgtaacagaacaacgtcatctgatcgggcaggttgacataaaagaactgctgaccagcagtgaatccaagacggttgaagagatcatggatacaaatatgttgtatgcccgtacgacagacgatcaggaagacgtagccaatatcattacaaaatatggtctgattgcattgccgatcgtagatcatgaaaactgtatggtcggtattgtaaccgttgatgatgcgatgcaggtacttcaggatgagacaacggaagatatcagcatcatggccggtgtcaatccaaatgaagactcgtatttcgggacatcaatattcgagcatgtaaagagccgtattccctggctgttgtttctgatgctgtctgcgacggtaacacagatgatcatgaacagctacgagaatgcactggcactgatgccgcagcttgcaggatttgttccgatgcttaccggaaccggaggaaactgtggatcgcagagctcgacacttgtgatccgcggacttgctgtcggagagattgaattttcggatctgtttaaagtaatctggaaagaaatccgcattgcattctgcatcagcatcatactgtctgtggtaaatggaatccgtatcatgttgatgggacagggagatgccatgatggcatttaccattggtctgacgatggcttgtacagtgttgatcgcaaaagtagtcggatgtacacttcctctgatcgctaagaaaatcggacttgatccggcaatcatggcgacaccgctgatctctacactggttgatatcagcacgatcagtgtatattttgcgatcgtgagttacgtatttcacttataatactgtgaaattgcaatagtttttgtcaaaagcaggataaatattgtacattgtacgcaaaaagagacataagattaccgtaagagcccttgtccgcaagggttctttgtattataatgaaaatactgagaaaaatatttggaaaggagtctatttatcatgggatttatagatgaaatcaaagcaaaagcaaaaagttgtaaaaaaacaatcgttcttccagagagcgaagacatcagaacttatgaggcagcagaggcaatcttaaaagaaggaacagctaacctggtcctgatcggaagcgaagaagagatcgctaagaataaaggggatttcgatatcacaggagcaacaatcgttgaccctgctacatatgagaaaacagatgaatatgtagcaacacttgttgaacttagaaagaaaaaaggaatgacagaagaacaggcaagagagattcttcttactaattacttatactatggtgtaatgatggttaagatgaaagatgcagacggaatggtatcaggagcatgccactctacagctgacacacttcgtccatgccttcagattctgaagacaaaaccgggaacaaaacttgtctcagcattctttgtaatggtagtacctgattgtgatatgggagagaacggaacatttgtattcgctgactgcggactgaaccagaatcctacatccgaagagcttgcagcgatcgctcagtcttcagcagaaagcttcaaacagctcgttggtgctgatccaagagttgctatgctttcttactcaacaatgggaagtgcaaaacacgatgacgtaacaaaagtacaggaagctgttaaaatcgcaaaagctgagaatccggatcttatgttagacggagagatgcagcttgatgcagcacttgttccttctgttggagcagctaaagcaccaggaagccaggttgcaggaaaagccaatactctgatcttccctaaccttgatgcaggtaacattggatacaaacttgttcagcgtcttgcaaaagcagaagcttacggaccaatgacacagggaatcgcagcacctgttaacgacctttcaagaggatgcagtgctaaggatattgaaggtgttgttgcaatcacagcagttcagtgccagaaccagtaagatctaagaaggagaaaatagaatgaaagtattagtaatcaactgtggaagttcatctttaaaatatcagctgatcgatatggagaatgaaagtgttctcgcaaaaggtctctgcgaaagaatcggaatcgaaggttctgcattgacacataaacctaccggaaaggacaaatatgtagtagaaacagctatgccggatcacagcgtagcggtaaaacttgtactggatgccctgatggattccgaacatggtgtgatcgagaatgcggatgagattacagcaatcggacatcgtgtactgcatgcgggaactgtttacagtgacgcaacacttgtaacagaagatgtgaaaaaagttgtacgtgactgctttgacctcggaccacttcacaatccggctaacttaatcggaatcgaagcttgcgaagaagctatgcctggaaaaccaaatgtagcagtatttgacacagcatttggtatgaatatgccgcagaaagcagctatgtatggtatcccatatgaatactatgagaaatacagcatcagaagatacggattccacggaacaagccacatgttcgtatctggcgagacatgtaagatgcttggaaaagatgacgcaaaagttatcgtctgccatcttggtaacggggcaagtatctctgcttctatcggtggaaaatgtgtagatacaagtatgggactgactcctttggaaggtctgatcatgggaacacgtagtggtgatgttgatcctgcagttgtacagttcatttgcaatcatgagaacatcagtgttgatgagatgcttacaatccttaataagaaatccggtcttcttggaatgacaggaatttcttctgacttccgtgacgtaagaaaagcaagcgaagaaggaaatgaaagagcagcacttgcactggatgcttacagatatcgtgtggccaaatacattggttcttatgtagcagcactcaatggtgtggatgcaatcacatttacagcaggtgttggtgaaaactcatgggagatgagaagcgagatctgcgaatacctcggataccttggcgttgaagttgacgaagaaaagaacaaagcagcaatcggtgagcaggcagttatctctacacctgattcaaaagtaaaaattatcgtccttccaacaaacgaagagttggcaattgcccgtgaaacagttaaattagtttaataatttattgttgacaaatcaaaattacatgatataatagtctagtgtgtgaataggagacgatactatgatattaaacctatccgacgttctgtctgaacagcataaaccaatacatcaatctgttccgattgaaatgacttgtttcaggtctgagatgggaaattatgtgattacagataagacaccgcttgagttgtcggtagaatatgcaggcgaccgcaagcttgaagtgaccggaaaagctgagattatatcttctgctccgtgtgacagatgtctggaagatgtagaagtgaaggtgacacttgactttaagcataagattgatacagagtcagatgcatatgatcagtcagaagatttagacgagaataactatattgacggatatagcttagatgtagagcaattggtctacaacgagttattggtagggtggccgacgaaaattctatgcagcgaagactgtaaaggtatttgcaacgtatatggtcagaacctgaataaaggtacctgtaactgtgaagatacggggctcgaccctagaatgtcagttatccgtgatgtatttaagaattttaaggaggtgtaacctatgtcaatttgtccaaagaataaatcttctaaagcaagaagagacaaaagaagagcaaactggaaaatgagcgcaccaaacctggtaaaatgcagcaagtgtggcgaattaatgatgcctcacagagtatgcaaggcttgtggttcatacaacaaaaaagaaatcattgctcaggattaatttttgaaaaatgataaaaaagagacgatcggttttggtcgtctctttttttgattgaattttgtataaaatagtgaaaaaaagataaaatgattacattttgtgttgcaacattttctgaaagtgttataattttaaccagatatagaacgtagtctataaataaactgccgatggggaaagtgaaaattcattttacaggcaaagagatggactatgtagctaaggaggaaaacagaatgacagaagtagcaaagcgtattgaaaagcttcgcgcactgatggcagagcagaatatcgatgcatatgttgtaccaactgcagatttccatcaaagtgagtatgtaggagagcatttcaaagcaagaaagttcattactggattcagtggttcttacggaacggctgtaatcgcaaaagatgatgcaggtctgtggacagatggaagatatttcacacaggcactgaccgagatggaaggcagtggtgtccgcctgatgaagatgtttgttgatgatactccatctacgacagagtggctggctgagaagattccggaaggcggtaaagtcgcatttgatggtcgtgttctttctatgggagaaggacaggaatacgaagaggtactcggcgcaaaaaatatcacgatcgaatatgaagtagatttgattgaccagatttgggaagatcgtccgaccctctctaagaaaccttgcttcttcctggaagataaatacacaggagaaaatgttgcatctaaattaaaacgtgttcgcgaaaaaatggctgaatatggagcaaccgtacatctgattgcttctttggatgacaatgcatggcttttgaatttcagaggagatgatattgacttcttcccattggttcttgattatgtgatcgtacgtaaagacagtgtagatctgtatatcgatgacagcaaactgaatgaccgcatcagagaagagatggcaaagaataatgtcaacattcatccatacaatgacatttacgaagatgctaagaagattggtgcagatgaggttgcactgattgacccgatgaagatgaactatgcactgtataagagtcttccatgtaaggtagtagaaggagctaatccgactatcttgatgaaagcaattaagaatgctgttgagattgaaaatatcaaaaatgcagaattgaaagacagtattgcactgacgaagttcatttactgggttaagaaaaattatgacaagatggagattacagagctttctgcttcagataaactgacagctctgcgtgcagaacaggaaggatatatccgtgactcattcgaacctctgcaggctttcggtgagcacgctgcaatgatgcattatgcaccgtctaaagagacagacgttgtattaaaagaaggcggtatgcttctgagcgatacaggcggcggatattatgaaggttctactgatattaccagaacaacagtactgggacatatcacaccggaactgaagaaatattacacagctgtatacagagcaatgcagcacttaagcgcagcaaacttcctctatggtaaccacggatggtctctggatgtattggcaagacagccaatctgggatatgaacaaagacttccagtgcggaaccggacatggtttcggatatcttggaagtatccacgagccgccaacaggattccgctggtacatcgttccttctaagaacgaacatcatcagtttgagcctggtatggtaattacagatgagccgggaatctatgaagaaggagattttggtatccgtatcgagaacaacctgcttactgtaaacggtgagaagaataaatatggacagttcatgcactttgagactctgaacttcgtaccaatcgaccttgatggtatcgatccggaagaactgacaagatcagagaaagaatggctgaatgattatcacaaagcctgctacgagaaggttggtccatatctgactgatgaagaaagagaatggctgaaagaatacacaagagctatctaatacttctaaagtacatagaaaaagctgcaagtaagtaactttacttactcataagaaaatttaactgacaaggggtgtcagaaaattataataaaaaaatgccgcggaccagcggtctgcggcgtcttttaagaaaaggagaatagataaaatggcaaaaattacagaaggatatatgcctttccatggctatcagacatattacagaatcgttggagaacagaaagataacggaaaagctccgttgatctgcttacacggtggacctggatctacacacaactattatgaagtcctggataacgttgcagatgatgatgatcgtatgatcgttatgtacgaccagttaggatgtggtaaatcttatcttgacggacatccggagatgtggacacaggatctctggctggatgaattagatgctttaagagaacaccttggattaaaagaatgccacattatcggacagtcatggggcggaatgatgcagattgcatatgccatcgagcgtggagcagaaggggtaaaatccttcatcatttcttccggacatccaagcagcagcctgtgggcaagagaaggtatgcgtagaattaagatgatgtctgaagaggatcaggcagcaattaacgatgctctggagcgcaatgacttcacaggagaagcttatctgaaagcagtagataactatatggacagatactgtaattactggagagaagatcttccagagtgctgtacaagacctaagaaatccggtggagaagcttatctgtatggatggggaccgaacgaattcgttccatctggtacactgaaagacttcgagtacatcgacagacttcacgagatcaaagttccatcactgatcatgagtggtatctctgatctgtgctcaccattagttgcaaagactatggcagatgaaatcccgaattctaaatggatcctctgggagagagcaagacatacaacatttgtagacagacacgatgactactgtgtagaactgatcaagtggatgaacgaatacgataaataaaatacataaaatgatttgaaaaagatctccgtcatttgacggggatcttttttaaatgcgatatctgtaaattaatagtgacttcactgcgtaaatgtgataaaataaatcgtctggcatataagaataatcaatgcctgataatataatcttataagaaagagggaaagttctgattgattgtaatcacaggaaatcagagctgaaagagagatggaaaaagaaaaaaataacagaagttccttttcaggaaaaataggattcgttctgtctgcggcaggcgcatccgtcggtctgggaaatatttggagattcccctatctggccgcaaaatatggcggaggtatattcctcctgatctacatcctgcttgcgctgacgtttggctatacaatgatcgttgcggaatcagctcttgggcgtatgacaagaaagagtccggttggtgcctttagagcctttggcaaaaaggccggatggttgtcgttcggtggatggatcaatgcgattattcctgttttgatcgtaccgtattattctgtcatcggaggatgggtaattaaatattttgtggaatacctgaaagggaatggcgcaaaattagcagaagacggatatttttcaaaatttatatccaatggactttctacggaaatatgctttattgttttttgcatgttcacattgatcattatctacgcaggtgtccgtaatggaattgaacgtgtttcgaagttcatgatgccgatactggtggtactgtctgtgatcattgcgatctattcggtgacaagaccgggtgcactggctggtgtgaaatacttccttgtaccaaatcctaaaaacttttcatggatgacggtagtaacagccatgggacagatgttctattctctgtcaattgctatgggtattttggtcacatttggctcttacatgaaaaaagacacgtccatcgaagattcgacaaggaatgttgaagtatttgatactgcaattgcaattatggct

SEQ ID NO: 2800 - DNA, 6748 bp, Unknown
  gut microbiota DNA sequence
gaaatgtcaccagcagcttccttgcatactttgacatataaaaaactaccaggataaaacttggtagtttttataaagcggagagggtgggattcgaacccacgcgccctctcggacaaacggttttcaagaccgcctcgttatgaccacttcgatacctctccaactatttatttgtctgccgcttccgtatcacctcagcgacaagatgtattctatcatagctttttgctgtcgtcaatactttttttaaacttttttatttttttgtatttttcttattttcctgtattttttgtatataaatacagttctttgcaaagacttattcacagactccggtcagctttttatatgctcaataaatccttttgccgtatccagatcttccggtgtcgtaatcttaatattacagtaagagccttcatataatttcaccggaatctgcatttcccgctctaccaccatggcatcatccgttacattttccctgtcatgttccatcagattcttatatgcctgcgtaataagctctgtctcaaatacctgcggagtctgtacaatccatacatatttacgtacaggtgtattgaccgcaaattgattttcatctacgatctttactgtatccttgcttggcacacctgctacacatgctcgatttgcctttacgcatgcatagcctctctttataatctgttcgtctacgaacggtctggcaccgtcatgaatatagacataaccttcttttgcctcttctccggccataccgtcacgaatagcctttaacccattccaaacagaatcataacgttcttttccgcccgggattactgcacgcactttcccaaaatgatatttatttacaatttcttctgtcacatagtcttcctgcccggctccggctaccatgatcacatcatcaataatttctgacttttcaaatgcttccaggcagtaacagataattggttttccacatagttctatatactgcttctggatagatgtccccattctttttccctgtcctgccgaaagtacgatcgccacacatcgcttcttcatttgttgttcaccacctgtttcttggaattaacgctcaccgagtttcagattaggaaccgcatttagatcccatccgcttctggttccattcatgtattcgtaataagccgctaccccgatcatcgctgcattatccgtacagaaaatcggagatggataatagaattttactccccgatcttcacatgcttctttcatagctgcacggagagcactattcgatgccacaccgcctgcaatggcaaatttatctaccttatattcttccaccgcatgcatagctttcgcaaccagtacatcggtaactgctttctggaaagaagctgcgatatctgcctggttgtattcttcacccttcatcctgcatccgttgatataattcagaacagctgattttaatccgctaaagctgaagtcatatggtgcatcttctatatttgcacgtgggaatgcgatagcatccggatttccttccctggccaccttatcaatcttcggtcctcccggatagcccagtccgattgcacgggccaccttgtcaaatgcttctcctgcagcatcatctctggttcttccgatgatatcaaatttaccataatcttttacacgtaccagatgtgtatgtcctccggatactaccaatgagaaaaatggtggttctaattctttgtgttctataaaattggctgcgatatgtccttcgatatgatgcactccgaccagtggcttacctgcagcgtatgcgattgcttttgcttctgcaacccccaccagaagtgcacctaccagccccggtccgtaagtcactccgatcgcatcgatatcatccagtgttacctctgcttctttcagtgcttcctcgataacctgattaatcttttcgatatgttttctggaagcgatctcaggcacaacacctccatacagcgtatgtagggcaatctgtgaagaaatgacattggacagtacttcccttccattctttacaactgccgctgctgtctcatcacaagagctttcgatcgccagtattaatacatcttttgtctcactcatattttccctcctaatcttcaaataccagttctaccgagcgcttatcttttgctgcgattgaattcgggaatattgccttgacatcgtccatatattcctctggttttgtcagtgacgggctataatgtgtcagccacatttcttttacttctgcttcttttgcaagctgtgccgcttcatagaatgtcatatgcttatattctttggctttcttctgcttatccttttcgccatacattccttcacagataaagagatcggaatgctttgcattctgcttaatagattccgtaggtctcgtgtctgtggtatacgtaagcttgattccttttcttgccggcccgagtaccatatccggtgtatatacatgtctctttgtctccaccgtctcgcctttttgtaatattccccagtactcctgtggaatattcgatgccttcgctctttctacatcgaattttcctgcacggtcgatctccatcgtataaccataacaagtcacattgtgatttacacgaaatgctctcaggcggtacccattcatctcaaatgtctgctctgcctccgtgatttccatatatttaatctggaacggcagttccggtgcgatcacgcgcagtgcattcaccactcgttccagtcctttgggcccgattaatgtgagcggcttggtacggtccgcatttcccatagtgagaaggagccccggaagtccgctgatatgatctccgtgataatgcgtaaaacagatcacgtcgatcggtttaaagctccatcccttttcttttatcgcaatctgtgttccctctccacagtcgaccagaagactgcttccattgtaacgcaccatcagggatgtaagccacctgtacggcagcggcatcatccctccggttcctaacaaacatacatctaacataattttcctctattcctcttccattttaatcttaaagttccttgtcagttcatcataacaggattcacaaaggtcaaaatgatctctccggttatctttttccgaaaaatatccccatcgcttatccactgtcaggacgtcttcctgcggaaccccttctacgaccggaatcactcttccacatttgttacatacaatactggttacttcttttacttttcttgtctgttccttaaactggcgcataccattcctcctgtaatcctgtcaccgttttttccggtgtttttcatacattacatcgttttcttttcattattctctgtctgtaattttctcagttacgcctatattatagcttttcatctgtatgctgaccagtggaaagtgctgtaagaattaccattgtttcctacagatttacggacatcaaaacagcattttctttgggattctcatagtaattcctgcggatcccatctttcgtaaatccacattttccatagaattgtctggcagcttcattgttttctcttacttccagcatgattcttgttatcttctgctcccgacagaagtcaagcagtttccggaacatctgactggctgccccttgtctgcgcacagaatgtgccgttgcaatccttgcaatttcaccttcctctaatacgtaatagaagataagatagccggccattccttcttttgtctttgctacaaatattgcggcattcttctgcttccacgtctcttccagacttttcagactccatgcatcaggaaatatctctctttccaatgcagcaatctctggaatttccggaaaatcagcctcacttatttcgatcattttatctgattccatctgattttctaacattccatgatatcccttatcaattcatctaccacttccggttttgttgcccagcttgtgcagaatctgactgcgctttcggtatccgataccttctcccagaattcaaatacatatttttcttttaatttttcgatatgactgtccggaaggatcgggaactgctgattcgtataggaatcgtaacgcagactatatcctttttccagaaatatctttttaagcttcattgccaattcgtctgcatgtgcggatatcttaaaataaagatcatccgtaaacagcgtatcgaactgaataccaagaagacgtccttttgccagcattccgccattctgcttgatcatatagcgaaaatctttcttcaatgcccggttagtgatcacaacagcttcaccaaataatgcgcccaccttagttccaccgatataaaatacatctgtatactttgcaagatctgcaagtgtgatatcatttgtctctgccatcagcccatatcccagacgtgctccgtcaagaaacaataacataccatattttctgcatacttcatgcagatccgctaattctttctttgtatacagtgttccgttttccgtcggatgggaaatgtataccatccccggctgtaccatatgctcctgacttccatctgtccagtgagcatggcacatctcttctacttgtgcggcagcaatctttccatcttcacttggaagcggcagtactttatgtccggttgcttcgattgcccctgtctcatgtacattgatatgcccgcttaccgctgcgaccgctccctgatatgggcggagtgccgcactgatcaccgttgtattggtctgtgttcctcctaccaggaaatgcacatccatatcctgacattcacacagatccttaatcttctgtcttgcactgtcgcagtatggatccaacccatatccgttggtctgctccatattcgtctctatcatcctctgcataattgccggatgtgctccttctgtataatcgcactgaaatctatacatgctccattctctccttccgttctctttctgcctgagacacacggagatactccggttcatgctccatcgcagtttcaatctttccttctttataatactgcattcccagtgttcctacggatgcagctctctgccggttcatatttgccggcgcaaatgtaaccgcttctcccggcaggatctcttctgtgatctttgtcttatgcacagggaccccgtcgccaaggaaggttactcttcttccttcttttaaatactttttcaacttttctcccagttcttctatcggaactgccatctggtcttccagtatgtgaagcttctgcccgtcaaattcatagattcctgcatacacctgcccgcgtcttgcatccataatcggacatacaacatctgcaattccacacagattgcaggcaagtccctccaatgtcggaatatgaatcagtggtttctcaagcgcaagtccaagtcccttggccgttgcagaaccgatacgaagtcccgtaaatgatcccggccctccggctaccgctatcgcatctacggtatgcagatccagttctgtcatcttcacgatctcgtccagcatcggaagtaatgtctgtgaatgtgtcttcttataattgactgtatattcggcaatgacctggtcatccactgccccgtcttctactacagctacactggcgaccagtcctgagctgtctaatgctaatattcgcatattgtaatcctccggtaatcgaatcctttttccagatccttttctatcttaatctctgtgtaatgttccggtaatatctcttcaatcagattagcccactcgatcaggctgacgccctctccgtaaatgtaatcttcatagccaatctcatccatctcttccacatcaccgattcggtacacatcaaaatgataaaagggaagtcttccttcatcatagatctgcacaatggtaaatgtaggactgctgaccggttcatctatccccagtcctttggcaagacctttggtaaatatcgtcttcccgacacccagatctcccaccaatgtatacacctgccctgcacaggctttttcacccaggctaaatcccagatcccaagtctctttctcactgtttgtctctattatcataaactctcccttcccattttttgaaatcgttactgtattcagtatctttaagtataacacatctttttttcttctgctactcatgatatactttctgataacagcttaaatatattaatttttatcaataatggaggaatctgtatgaaattcacattttatcacaataacattaacgttgctgatcttgacaaatctatcgaattctacaagaaagcacttggacttaagattacaaaagagacagaagctgccgacggaagcttcaagctggtattcatgggagatgataccaccccgcacaaattagagctcacatggctgcgcgatatggacagaccttacgatctcggagacaatgagattcatctggcaatgcagacagatgatatggacgcggcactggcattccataaagagatgaattgcgtctgttttgagaatccggagatgggtatttattttatcaatgatccggatgggtattgggtggaaatttgcccggcggaataaatttaattgggatttaattcaggaaggctgtggatacccgaaccggaataaagcttggaaaggcgttcctgttcaggttccatcggcgggtcaattctaaaggggcaaaattctgctaaaagcaggctttcaaaatttgaaact

SEQ ID NO: 2801 - DNA, 44103 bp, Unknown
  gut microbiota DNA sequence
gatgatatatgacagcgtttacacttacggtaatgatgaggaaatgtgggtacgaggaattacctccgtacattctatagaacttttcatgcagacatccgagaaaatgctgttgattgtattcccattactcattgttctgatcggagccatcggatattttatgatcaagcgggcattgagacaggtggatcttatctgcgatgaagttgaaaacatcagcaatggaaaagatctttccaaacgattgtctcttccaaaagcaaaagatgaattatacgaattgtcggagaaatttaacgaaatgttcgagcgcttggaattttcgtttgagaaggaacgtcaattcacatcagacgtatcccatgaactgcggactcccgttgctgttatcatttcccagtgtgagtacttattggaaaatgaaaacttatctgcggaagataaggaagagattgcagtcatcttaaagcaggcaaaacgaatgtcaaagctgacaagcgaaatgctaatgatcgccagaaacgaacagggcgagcagcatctgatggaaaaactggattttggattattaagcgaacttgtgatagaagaactgcagacaaaagcacaggaaaaaaatatcgagatcaccctgcaaaagcaggacgacttatttatgaacggcgaccagacattgattttgcgtatgatgatgaatttaataaccaatgccatcaattacggaaaaataaatggacatatccatgttatcctgaaggtcgaaaatgaccagattgtcggtgaagtgaaagatgatggtattggaataaatgaggaacacctggacagaatctgggagcgtttctatcgcatagacaaaagccgttccagagaaaatggcggtaccggactcggcctttctatggttcgttggattgtaaacctccacaatggaaccattcacgtcgaaagtatcgaaggtatcggaacgagttttattttccgatttccgaaaatataaggagctatcgctgtatatccaattttttttaccaaagagaagggttcattattcaatgtgaaggtttggatgaagctactggtgaaaaagaaaggcccgtatccgttcaggatatgagccttgcaagaattggagaattgtaatccgtagattttacaagtaaaatctctccagttttgttttaaaaaattgaattaatgggccgttgaagcaggcatttataattgtcccaatccctactaccgaccagatacccgccccagatgcagtggcaaatatgattccgataatcacgacaacaacatctgaaagaatccttgctttatggaatggaattttctgatgtgtcagtttctcgattataattgcgacactgtcatatggagcgattcccatatctgcgaccatatataatgccactcccatagatgccatcagctgagcaagcagcagtgcaaggatacgcagtggcagattcatctgaatctgcgctacatcattcgctacataacaaataaagtctgcaatgtatccgacaaataccatattgataatggtccccgcaccaatgcaggatcttgcctgaaaaaatacaactacaaggatgatcgcattgacaagcaactgccacgttccaaagctccatccgataaatccgctgattccaagattcattgcactgaatggatccacgccaaattgtgaaagtcgtaagaaagatacacataatccaataaacaatattcccagtaccattccgccggttctttttgtcttcgtcatgatctatcttccctcctgaacttttttgcctttcagcatatatattctagattcaaaatcggtacaaggagtcacattccctggcacttcaccagctgtcacatcggatgtgatcaatccataattcatcaattcgtctccgtaattttctgtatgattccatacattttcataaatcatatccgggttcaatccctgtaatctgacacggctatacggctgattcactccatttaaaacacgatagtagcctacgatcgcaagcgtgcggtcttcatttgtcaccatccataccgtctcatttccttcgaatggacttttcagacgataaaatgttccaaactgtaacacttctcggtattctttcataaatgtgatctgttcttttacttctttgatctcttcttctgttaatttgttgagatccagttcgtatccaaaagttccaaagtatgctacattcgctcttgtatgtaatggggtattgcgaaatacctggtgattcgggacaacagacacatggcttcccatactgctgagcggataacacatagaagttccgtactgaatcttcagacgctcaattgcatccgaatcatcgcttgtccatccctgtggtgcataatacagcattcccgggtcaaatcttccgccaccgctggcgcaggattcgaataatacttctggaaactcatttgtcaaacgttcatacagatcatatacacctaaaatataacgatggaacacttctccctgtctgtctgaagaaaatttgctgctgtagcattctgtaatgcttcggttcatatcccatttaatatatgagattttcgactccgataataactttgccatcattccgtaaatatgatctactacttcttttcttgcaaaatcgagtacatactggtatctgccgtgtgatgtatttcttcccggtgtctgtaagatccagtctggatgtgccctataaagatcagagtctttatttaccatctccggctcaaaccaaagaccgaattttaatcctagtgcttcaattctttctgacaggcctttgatgccatttggcagaagctcttcatttgccacccaatcaccaagaccagctctgtcatttcttcttgcgccaaaccatccgtcatctaagacaaacagttctactccacattcttttgctttccttgcaatctctacaaggcgatcttctgtaaagtcaaaataagttgcttcccagttgttatttaaaatcggtcttgccttatcacgccagtaccctcttgcgagtctctttgcatacaacttctggaatgtctgactcatgccatttaatccattttcactgtaaaccagaactgcttccggtgtctgaaagctttctcccggttctaatttccaatcgaatccttccggattgatcccggctgtaattcgtgtcacatcatgtgtatctacctctgcctgcatacggaaatttccactatatacaaggcttattccaattgcttctcctgcattttcatctgtgttgtgacgttttaaagcaaggaacggattatgttcgtgagaagaatttccgcgcatgctgtcgatagctgttatgccttgctccaatgttcgattctttatatagcgctctctggaccacgcaccggacaactgcatccattcataatccttatccggaagatccaggcttaagctcatcatatttaatacatgcagatttttctcaccggcattttcaatataagaacttcttgcaattgcactatattcatcaaaaatcgtatataaaagcgccagttttgcaccagtcaaagcgtctttcaggaagatgcgcaatgtctgcgcctccccctcagactctgtataagttgccggcaatccggggagctttggttttccatcaatgatctcataactgtcatattggaactcactaatcctgctgccgttttcctgcaacaattcaattgccggatgtctgtaatctgtcgtaccgtaaaccggatattcctgtcggatatgttccaatgaaaaagtacgatcccattcatatatatatgatgtcattgggcgttcacatttttcaaccagataagaaaaatctgctttatcatgaagttgttttccaaaatataattgtcccagatgtccattttctaatacacataagatataactgattttttcattgtataaatggaaagttttcgtttccttgtgaaaaataatctgtctcatataataccccttttacaattgaatcgttgtctcttaagctgtctgttttttcacatgcatttcatttacttttcttgtgatttcttccatcttttcaccttttaaagtgtagtattttttgtaaataccaaagcttgcaaatgcaagaatgattggaatcacaagcattaacacacgaatacccattacggtcgctgcgctctgcgttaccgcttttgcgttgtatcctacaatctgaagaccaattcctgttaatccacctgctgctgccgtagctgccttcataagaaatgtctgtgcagagcatgttacgctttcatttcgtacaccaaattttacttctccatagtcgataacgtctgccatacagcatgttgttactccaagtgaaagacctgatccgaagaaaagcagtgcacaacatacaacaactaacaccttactctgtggtgctacatatcctgctgcaccgagcagtacaaatccagcaattggaagtccacatgcaactgcgtatactttttcacggctaattttttctgcaattttcgggaagaataaaagtcctgccatctcagcaataatcgcaaatccaaaaatagaatacagatattcatcatggcatacacatttgaaataatatacagcaaagctttttgcaatctgtgtacaaaggttaaatgtcaaaagtaatccgataaatgcaagcagctgatcattttttacaattacctgaaatgcctgtttcagacttgtcttttctgctgatatacctaatgttgattcctcttttacattaaatacagtaatgccgattgtaacgatgaaaataactgcgataatgattgcgaaaagtgtatatcctttttctgcgtagagattgctctcgcctgcagctttattcaggtaattgataatgtaaagtccaaatgttgctactgaaaatcctgcaagacttgcgaaaaatcttggaattacggatactttctcacgttcgtgcggatcatttgtcaagttcggaagccatgaccagtaagggacatccatgatcgtataagtcattccatataagatatacataacggatacatatacgtacaatgctgttcctgacaggttaaaactgtggaataacaaaacaaatacaactgaatttaccaatgttccgattacaagccagattctgaatttaccaaaacgtgtatgtgtattgtcaacgatcattcccatcatcgggtcattaatcgcatcccatattcttgctacaaaaaacagtacgccgacaaatgccggtgccagatacaaagtatctgtaaaataaagcattaaaaatgctcctactaaattacaaatcgcatctttaccgattgccccaattccaaaacataatttttctcttgtagacgcatatttatattgcggatttttctgagtttctttttgatttcccatgattctcctcctctaatactcctttgtttatttgttatttgagtgaagaaacctgtgcacgtgttccttatgtttgttgatacaagtatagcgtacaaaaaaagacatccgttatacctttttgttaagtgttatatctcaaatgttaggtaccggatgtctttttcaacatttcgtctattctttttcgacttctcctacataaatttttttatgtttcttgtattctttcagttcgttttgtgcactgatcaatcgttctcgggcagcctttctgttatcattacgatattgggtcggcgtcattcccattttctgcttaaatactttgccgaaagcaagtgaattacgataaccacaagaaactgcgatttcctccacagagagatctgtaagtgtgagctgctcctttcctctggaaattcgaaattccgtcaaaaaatccttcggcgagattccaagactgttcttaaatattgtatataaataacttcggttaagtgccagataatcagctatatcttccactgtgattttctgtgaatagcaattctttatataggcaattgcttcctgtacatgtatactttcttttgtatcatccgcatattgctgaatttcaatcccgcgagccagtactgagaaaaactgatagagcttcccctggagatagtaaagattttctgcagttgaacatgtatgatgaagcatttcaaatacaatttctttcagttcttctccatattcacattcgcatgtaagctgacgactgttcagtccaagatctctgacaaatctctgtgcttccgtaccaccaaatcctacccaaaggtaagaccatgggtccgttttatctgcctgataaaaggtaaggctttccggctcgatcagaaaggcctgtccttctttcagctgatacttcgtttcgccgacctgatagatacctttgcccttcattacataatgcaaaatataattgggtcttgcggctggcccgtagctatgtaatggcttgcattctgcaaatccgcagaaacacaaatgaaaatctttaaactttggttttaacaattgcaatacgtaagaatcttccataatctgtatcctctcttaatccctaagatcacaagcactttccagtcatgcttacttttgctgttgctcactcagcaatagttagtttaaccattttccttattctatcacagtatcgtgttattcttccatcagttttcaaaccaagtattaaacggtgcctcttcctttataagtttccacaaaaaagacaatgtgttttttcttgtatgcaaagaaataaggatgtaaaataaaattagttttcaaataaaaaatagtaataagtgaaatggcaaattctgattgtagaactgacatgtgattataaggaaggaataatatgagaagaaaagatagagaaatcacagatatacacaagattgaaaaaatattgtcgagtgcaaagtatttacatctgggggtattagatgatgaatacccatatgttgtgccgcttcattacggttatcagataaacggcgggaaactaacattttatgttcatagtgcgaaagaggggcataaactggattgcattcggaaaaatgacagtgtttttgtggaaattgattacggagaaaaacttatagaagcagatgttccctgcaaatatagtgctgaatatgcgagtgtcatgtgccgagggaaagcaaaaatcctccagaatgcagcggataagtgcgcggcacttcgcattcttatgagagcgcaaaccggagaggaacacgaaattaatgaaaaaatggtaaatgcggtatgtgtaattgaaataaatgtagattcgtatacggcaaaagcgtgtgtaaaataaatttcagttttcggcattattgcttccactggtgattagcctgtattatatttgtattcgtgcattacataaaaagacagtaaaaaagccataaacaccgtccccagtgctgcgatattatgttaaaatgaagtaaacaagaaaactggaaaaacaaaaagttgttcaagatatacgggatgagagggattggttatggatgattttaaacaacttacagagcagcttttaaaattttatatcgacacggaatccatagatgatacaggctttgaaaacttctttgatgataacagcagtataatcggaacaggaaagcatgagtttttccggaatctgcatgaatttcaggaatcatataaattcgatgtaaagcgaagagaaaagatcagacttcaaataagggacttacagcaggaagaaacagagcttggagatgcccaggtccttgcgtatggaacggtagtttttaccggtttatttgaagatgggtccgtctgttttgagatggacacccggtttagtattatccataaaaaggtgaacgggaaatggctggttcagcatctgcatcagtcagtaccggacagagaccagatgacaggggaagaattcccggttacgctgggaaaacaggtggaagaggcacaccgggcaatcagtgcattaggtaccgcttattatcatatctcacgtctggatttaaagacaaagaagatcgaacttgtgaaaagatcccggaaaatggagctgggcatttcccaaaaaagcgcagactggaattcgcagtttgaggtcatcaaagatgtgatagcagaaccgtttgtacaaaagtacatagatttttttgatacacagaccatggccgcacggcttcgtaataaagagtccatgtcttttgaattcaaaaaaaaggatgggaaatggttccttgccatgatcgttccacagaactatgataaagacggaaatgttacatcggtgctgcttgcaaaccgggatgtgacagatgaaaaactgcgggaattgaggcaggaggaagaactgcgggaagctaaattaaatgcggaaactgcaagtaaggcaaaatccgcatttcttttcaatatgtcccatgacatcagaacgcctatgaatgcgatcatcggttatgcagatctggcatccagacacctggaagacacagaaaaacttagcagatatgtcgataacattcagatatgcgggagaaaactgttatcgttactcagtaatgtcctggatcttgcaagaattgaaaataacaaggtcgaaatgaaatatgccgtgtcggatgtccgggaagactttacgaattgtgttacaatgttccagcaacaggcagaaagtaagaaccagactctgtgtatgacagaacatatcctgtatccgtatgtatatgtggatgaaccacatttatcggaagtctgcatcaacatcataagtaatgcggtcaagtatacaaatgcgggcggtacaatatcctgtaaggttgcacagagaccttgtgagaatgaagactggtgtgatatgatcatcagtattaccgataatggaattggtatgacagaagagttccaaaagcatatctttgaagcgtttgaaagagagcggacttctacgattacccatattgagggtatcggcatcggcatgggaatcgtgaaaaagcttgtggatctgatgggtggtacgatagaggtggaaagtaaacttggtgagggatccacttttacagtgacgatcccttgcaaaaaagcatcaaaagaagaagctttagagaagaaaaatcagaatccacgaagtaagaagtcgctaaaaggcgtccgggtcctgctggtcgaagacaatgagatcaatgcggagatcgcgacagaactgttgaaagaagaagggtgtattgtcgaagttgcaactgacggagttgcatgtatcagcatgattgaaaaggcagatgcggactattacaagatgatccttatggatattcagatgccggttatgaatgggttcgatacgacattaaccatccggaagatgaaggatgataaaaaagcgatgatcccgatcatagctatgactgccaatgcctttgcagaagacagacagaaggcgctttctgtcgggatgaatgatcacgttgccaagcctgttgatatgaatattcttgcgccaacgatgatgaaatatttataaaagtggggaataaaaaaatgaacaaagaaaaaaaacaggttgtcacaccggacaatctaaaagaaattgccgtcatgacgatagcagtggggatcatcgctgcggccgtgtatttctttctgattccgagccagacctcgatcagcagcgtatctgcgctggcgatcattattgcgcattatgtaccgttacatgtatcaacggttacgatgatactgaatgtggtcttactgctgatcggatttataacctgtgggaaagaatttggggcgaagacggtatatacaagtattttgctgccactatatctggcagtatttgaacatgtatttccggattttgaatcgctgacgaacagtacggaactggacgtgttatgttatgttctcgtcgtaagcttcggactcagcatcttatttaatatgaatgcgtcatccggcggactggatatcgtggcaaagatcatgaataaatatcttcatgtcgaactgggaaaagcgatgtccatctcaggaatgtgtgtggcactttcttccgcattgatctatgataaaaaagcggtcgtactgagtgtgcttggtacatactttaacggtattgtgctggatcattttatctttggacagaatgtgaagagacgtgtctgtatcatcacaaaatatgaagaagaggtacgccggttcattctgcatgagctgcacagcggggcaacgttctacgaggcagtaggtgcttacaatatgcagaaatacagagagatcattacaatcgtagataagaacgaatatcagaaactgatgaattatgtcagtaaaaaagatccggaggcattcgtaaccgtatacacggtatccgatatgcgctaccggccgaaagttaaatcattttaacggaggaaaacatatgaagacaaaagctaaaataatcatcgcggcagttcttgccattgcgatcagcatcggttcgatagccatatataagcatattaccggtccgaaagaagagagcataccgcttgagacgacgctggaagatgcagcggagctgacgacacagaagatgatcatctcggatgtattcaggagcacaaagggagagatcccgctgatcaacaagaacagatttctcgtacaatacaagacgacagtgactgcgggactggatgtacagaaagctgtcataaaggagacagacgacaagatccagatatctattccgcactgcacggtcaatgaggattctattaagatcaaatccagtgatctgaagatatatgatacgaattttgcgattatgagtatcgataaagaggcggttatggaacttgtcgcagaggctgagaagaaagcaaaggaaaaagccggatcggatgaatacggatttcttgaaaatgcggacaagaatgcaaagaaagtaatcaagggcatgttcgaaaatgtatcgaatggaaaagaagtaatcgtgtctttccagaattagaccggaaatgaaggaggtaaaaaatgacaatacaggaatgctataaagcgattggaggaaactatgaagatgtcttaagacgccttcgcagtgaagtactgatccggaaattcacattaaagttccttgaagatcagagttatccactgttaaagcaggctttgggggataacaattatgaagaggctttccgtggtgcacacacactgaaaggtgtatgtcagaatctttcctttgaccgtctgtatgaagtgagcagtgagctgacagagcttttgagagaccggaccggagagaagccggggataccggaagcaatggaaaaagtaacaaaagaatatgaggcaacaattgaagaaattaagaagctgcaggagtaatctcctacagcttcttttttaacatttccggattggatgcataagcaagtgccgtgtcagcagtaatgcgtccgtttttatagagcgaaagaagactggaatccatagagaccagatcatttcccgcagaggaatagatgagaccgtcgatctgcgggatcttgttatcacggatcatattgcggatcgcaggattgacgatcatgatctcgaatgcaggggtgataccaccgtcagcagtcatcacaaaggttgaaggtgagaagggaacgattaatggagctaatgtaacattagatacacttgcacctgagtaacaaaaaagtaataaaaatcaagaaaaggatcacggaccggaaaaaggaccggccgttcttttttgttgagttaaccggggaaaaggattataatagagaatgcgtggaataagacgcaggaaagacaggaaaagggcaaagtatatgtaaacggagaaaaagtaagatacaacggagagatcggaacggtgaaggtgtccgatattaaaggaaagattgagtggtatatgggaagaccataacgaaacgacagaggagaatagaaattatgcgggggaaaaaacagatagcagccgtagttcttgcggtgatacttgcggtggcagcaggtataccgcactgtacggtatacgcagagccggacagcaccgggaatgcgcaggcagcagatgcagcggcagatgatacccggaaagaagagaaaaaagaagaagacatgactccggaagagctggagaagaaggcagaagaagatgcttataagatggagatccagtcgaacagctggaagaactggccgcaaggaccgggaacatacggagaagcagcgatcgtgatggatgcaggaaccggaagtatcttatatgcgaagaatattgacgggcatgaatatccggccagcatcacaaaagttctgaccagccttatcgcattaaaatatggcagcctgtcagatcaggtaacattttcgaatgattgtatatcttttatgcagccgggagattcttccgtaggattaaaagaaggaaatgtgatctcactggaacaggcgttgtatgcgacactgcttgcctcggcaaatgaagcagcctatgcggttgcggaaaatgtcgggaagaatgccgggcacgattacaactggttcatacagcagatgaacgaggaatgcaaaagtctcggcggggagaactcgaactttgtcaatgcgaacgggcttcatgatgacaatcattatacctgtgcgcgtgacatggctttgatcggcagggagatctggcgttatccggaattcttaaagatctgtcaggagcagagttatacgatcccggcatctgatacaacggaagaacacgtatttccgcagcatcataagatgcttataaaagaaaataaaaattattaccagtatgcggtcgcaggaaagacgggatatacatccaatgccttatccacactgatcaccatggctgataacggcaatatgaaactggtatgtgtcgtactcaggacgcatggagcgaatatatatccggatacaaagaatctgttcgaatacgtatttaataatttccagaagattccggtggcagatgagaagaaaccggcggaagtaaaagaattcataacggcatcggatgaaagtgaggatgccggatccgcacagacgggcggaaatgagtatcaaccgctggaagatggctatgtgatcctgccgaaggatgtctcatacaaagatacagactatgagattacagacgtagatgaaaagaccggagaagggacgatccaatatacttatgatggtcatccggtaggaagtgcgacagcaaagttcacggaagaatacctgcagaaaataagtacgggtaaagaacgtgtggataataagaaggagaatgtggataactccgggacaacgaagaactccggtggaaaattaagtgcaaagagcatctgggcgaatttcgtgcagaaagcaaaagcggcatggacgttcagtcagaagaaatttgccgggaaatcagcttcggaacaatatatgatcgccgggggatgtgtggcactggtgatcctgatcttcagtctgatcgttgtattgatacgccggagaagataaatggcagaggatacatgaaaaataagggaaaaccccttgacggattttaggattgttgcatataataaagagtgtgaaaaacgctgacgaagacagtaggatataacagaacgcagcagcgagccggggatggtggaagtccggtgcaagtaagatatatctgaatatcacttctgagttgcagattttgaaaggtttcggtaagatgtgtagaaagatccggtgaccgagtaaaaactgacggcattcctccgttacagggaagacatatgatggtatgttaggtggtttataaacgtaagtacagctttcgtcctatacagggcggaagcttttttaattttatgttttaattttatggaggtaaatatgtataagaaagtttctacggatcttaattttgtagacagagaaaaacagacagagaaattctgggaagacaatgacatcttcagaaaaagtatgcgtgaccgtgaaggcaacgagatctatatgttctacgacggtcctccgacagccaacggaaaaccgcacatcggacacgttctgacacgtgttatcaaggatatgatcccaagataccgtaccatgaagggatacgaagttccaagaaaggccggatgggacacacacggacttccggtagagctggaagttgagaagcttctcggactggacggaaaagaccagatcgaaaaatacggtatggaaccattcatcaagaaatgtaaagaaagcgtatggaaatacaaaggtatgtgggaagacttctctaataccgtaggtttctgggctgatatggatgatccatatgtaacatatgataataactttatcgagtctgagtggtgggcactcaagagaatctgggacaagaagctcctgtataaaggattcaagatcgtgccatactgtcctcgctgcggaactccgctttctgcacaggaagtagcacagggctataaagatgtaaaagaacgttctgcgatcgttcgtttcaaagtagtaggagaggatgcatatttcctcgcatggacaacaacaccatggacacttccgtctaacatcgcactctgtgtgaacccggaagaagactatgcgaaagtaaaagctgccgacggctatacttattacatggctgttgcacttctcgataccgtacttggcagacttgccgatgaagaaaacggaacaaaggcttacgagatccttgagacatacaaaggaaaagatctcgaatacaaagagtacgagccattataccagtgtgcttacgactgcgcttccaagcagaacaagaaagcattcttcgttacatgcgatacctatgtaacactgacagacggtaccggtgtggttcatatcgctcctgcgtttggtgaagacgatgccaaggtcggacgcagatatgatatgccgttcgttcagttggtagacgaaaaaggtaacatgggagagacgactccgtttgccggattattcgttaagaaggctgatccggaagtattaaaagacctcgacggacgcggacttctctacgatgcaccgaagttcgagcacagctatccacactgctggagatgtgatacaccacttatttactacgctcgtgaatcatggttcatcaagatgacagaagtaaaagatgacctgatcgccaacaacaatacaatcaactggattccggaaagcatcggtaaaggacgtttcggcgactggcttgagaatgttcaggactggggtatcagccgtaaccgttactggggaactccactgaatatctgggagtgtgagtgcggacaccagcattcgatcggaagcatcgaagaactgaaagaaatgtccgacaactgtccggatgagatcgaacttcaccgtccatacatcgacgaagtaacgatcaagtgcccatgctgcggaaagcagatgcacagagtaccggaagttatcgactgctggttcgacagtggatctatgccatttgcacagcatcactatccatttgagaataaagagttatttgaaaagcagttcccggcagacttcatctccgaggctgttgaccagacacgtggatggttctactcactgcttgcgatctctacactgatcttcaacaaagcgccatacaagaacgttatcgtacttggacacgtgcaggatgagaatggtcagaagatgagtaagtccaaaggaaatgcagttgatccattcgacgcactggagaaatacggagcagatgcgatccgctggtacttctatgtcaatagtgcaccatggcttccgaaccgtttccacggaaaagccgttgtagaaggacagagaaagttcatgggaacattgtggaacacctatgcgttctttgtactgtatgcgaatatcgatgatttcgatgcaacaaaatacacactggaatacgacaaactgtccgttatggataaatggcttctgtctaagctcaattccgcaatcaaggcagtagactatgatctgtccaactacaagattccggaggctgcaaaggcacttcagagcttcgtagatgacatgagtaactggtatgtaagacgtagccgtgaacgtttctgggcaaaaggaatggaacaggataagatcaatgcatacatgactctgtacacagcactggttgagatctgcaagacggcagctccgatgatcccgttcatgacagaagagatctatcagaacctggtaagaagcgtggacgagagcgctccggaaagtatccatctgtgtgacttcccggttgtaaatgaagcacacatcgatacagagctggaagctaatatggacaacgttctgaagatggttgttatgggacgtgcatgcagaaatactgcaaatatcaagaaccgtcagccgatcggacagatgtatgtaaaagctgattttgaagtaccggaattttacaaagacatcgtaaaagatgaattaaatgtaaagaatgtaacatttacacaagatgttcgtgactttacttcatatacttttaaacctcagttaaagacagtgggaccaaaatatggtaaaatgttaggaggtattaaagcagcactcgataacctcgaaggaaatgcagcaatggatgagttaaatgctacagatgccctgaagcttgatatcaatggacaggaagtgactctgttccgcgaagatctgttgatcgaatctgcacagatgccgggatatgtatctgagaatgacaacggaattacagttgttatggatacaaacctttccgaagaacttctggaagaaggatttgtacgtgagatcatcagtaaagtacagaccatgcgtaaggaagccggattcgaagttatggataagatcgcagtatcttatgaaggtacagaaaaagcagagaaagtatttgcagacaatgcatctacgatcgcagatgaaacacttgcactggaagttacaaaagcagcaccagcaggctacacgaaagagtggaagatcaatggagaagctgtaacgatcggtgtggaaaagagataatcaaagcccagttttttagaagggaagtagaaaatgtataatccaagatttgaaaaagacgtatttaaaagagatgtacggaacaatgtaaagacattgttccgtaaggaagtagaagaggcaactccgcagcagttgttccaggcagtttcttatgctgtaaaggaagccatcatcgatgactggcttgcaacacagaaacagtatgagaaagacgatccgaagaccgtatattacatgtccatggaattcctgctcggaagagctctcggaaacaacctgatcaacatgacggcatataaggaagtaaaagaagctctggaagagatgggaatcgacctgaacgtgatcgaggaccaggagccggatccggcacttggtaacggtggactcggacgtctggcagcttgtttcctggattctcttgcaacactgggatatgcatcttatggatgcggtatccgttaccgttatggtatgttcaagcagaagatcagagacggctatcaggtagaagcaccggataactggttaaaagacggcaacccgttcgagcttcgcagaccggaatatgcgaaagaagtacgttttggcggaaatatccgtgtggaatacgatgagacaggaaagacacacttcgttcaggagaactatgaatctgtaatggcgatcccttatgattatccgatcgtaggatacggcaaccacatcgtgaatacactccgtatctgggatgcagaagcaatcgtagacttccagttagattcctttgaccgtggagattatcacaaagccgttgagcaggagaaccttgcgaaaaacatcgtagaagtgctttatccaaatgataatcacatcgcaggaaaagaactgagactgaaacagcagtatttcttcgtatcagcaagtatccaggctgcaattacaaagtttaaaaagaaacatggtgatatcagcaaacttccggagaaagtaacattccagatgaatgatacacatccgacagtggcggtagcagagctgatgcgtattcttcttgatgaggagaatctcggatggaatgaagcatgggatattacaacaaaatgctgtgcatatacgaaccatacgattatggcagaggcacttgagaaatggccgatcgatctgttctcaagactccttccacgtatttaccagattatccaggagatcgaccgccgctttgtcgagcaggtaagggcacagtatcctggtaatgaagagaaagtaaagaagatggcaatcctgatggacggtcaggttaagatggcacatcttgcgatcgttgcaggctattctgtcaacggtgttgcaaagctgcatacagagatcctgaagaaccaggaactgaaagacttctatcagatgatgccggagaagttcaacaacaagacgaatggtatcacacagagacgtttccttatgcatgcgaacccgctgcttgccgactgggtaacagagaagctcggaacaaaagagtggattacagacttatctaagatgagcggactgaaggaatggctggatgacgaagaggctctgaaagaattcatgacgatcaagttcaagaacaaagagcgtcttgcagcttacatcaaagagcacaacggtgtagaagtagatccaagatcaatcttcgatgtacaggtaaaacgtctgcacgaatacaaacgtcagctgctgaatatcctgcatgtaatgtatctgtataaccagatcaaagagcatccggagatgtccttctatcctaagacatacatcttcggcgcaaaggcttccgcaggatatatccgtgcaaaagagatcatcaaactgatcaactcggttgcggatgtgatcaacaatgaccgcagtatcaacggcaaactgaaagttgtatttatcgaagattaccgtgtatcgaacgcagagctgatcttcgcggcagcagatatcagtgagcagatttctacagcttccaaggaagcttccggaaccggtaacatgaagttcatgatgaacggggcaccgacactcggaacaatggatggagcgaatgtagagatcgtagacgaagttggaatcgacaatgcatttatcttcggactgagcgcagatgaagttatcaactacgagcagaacggtggatataatccatacgatatctacaacaacgatccggatatcagaagagtggtagaccagctggttgatggaacttatgcaaacggtgataaagagatgtatcgtgacctttacaacagccttctgaataatcagggtggtgcaagagcagatatgtactttatcttaaaagacttccgttcttatgcggatgcacaggcccgtgcaatggaagcttataaagacacagacaaatgggctaagatggctcttaagaataccgcttgctgcggtaagttctcggcagacagaacgattcaggaatatgtagatgatatctggcatctggatcatgttgtgatcaatgaggatgaactggaatattaaaaaaaaccctctcataccttaaggtatgggagggtttttttgtgccaatggggacggggaaagtggctctgctgtcggggaggtatgcaatatatgagacgatacaggataataagtgaaaaagtgaaacgggccggctgctggctgcttatcatagttctgcttccgtatatcataaccgtatttataaacggaccgaaggttatcactgcttcaaaagcagatgaaacgatggtgaaaataaagaaaaacggaaagatgcctgtggaagagtattgtatcggagtactggccagggatatgccggcagattatgagaaagaagcgctgaacgcacaggcagtgctcatccggacagaagtataccgcatgattcaggaagccggtggagacggtatactgccggaagaagcggcagacgaattctggacagaaaagcagatgaaatctgcatggggcatgcggtatgcggaaaattaccggaagttaaaaaacgcactggaatctactgcgggacaagtgctgttctatggaaaagatctggcaatgacaccattttttaatctgagtaacggatatacaagagacgcaaaagaggtgcttggaaaggaagagtatccttatctgaaaatcgtggaatgccccggggatgtaaatgctgagaatgagatacagacggtgatactggaagtgaagagtgaacaaaaaggcgaaaatgagggaactacaggtatcgaaacgctggatgtggagatacaggagacggattccgtgggatatgtattgaagatccgcgtgggagacaaggtaatgagcggggaagaattcagaaataaatatgaactggcttccagttgttttacgctgcaaccttataatggaaagttaagagtaaccacaagaggagctggtcacggaatcggtatgagccagtacacagcgaatgagatggcaaaaaagaaacaaggatatagaaaaatattaaaatatttttttgaaggaacggatataaaagaagtgacagaaattataaaaaatgtataactacatcacgatctggcaaaaatatggtcagaggtggtgatgaaatgaagaaaaacgaaaaaacgtctatgtccaaacggcgtgctaccgtggcagcagtgttatgttttgtggcggcaattgcaatagcaggaacatatacatttaacgattacaggaaaacgcagaaaaatgagctggcgaaggcggaagaaaaaagcaggcagaaagagacaaagaaagacaacaaagacaacagcgatctgacaagagaaaccggaacatcaaaagtaaaaagtgagaataccggaagcagtacggagaaaagcacaacaactgagagtaccgataatgaaaaaaacggatcagacggaaccggaatgacagatcagccagaacagaatggaacgggaacacaggcaacagcaggaaagagtcataatatcaattttacagaagacagctacatcctatggccggtgaacggggctgtgatcatgagttacagcatggataagacggtatatttccagactctggatcagtacaagtataatccggccgtgatcatcgaaggtgcagaaggagatcaggtactctgcggcgcacccgggatcatcaagtcgatcgatgtcagtgcgcagacgggaacaacggtcaatgtagacatcggaaacggatacgagttgttatacggacagctgaaagaagtacctgtgaaggttggggattatgtagaagcgaagagcgtgcttggctatgtgagccagccgacgaagtattacagcaaagaaggctgtaatgtatattttgagatgcgcaaaaacgggcagccggtgaatccggtggagtatacagcggatcaggattaaaagaaaaggacagggattcccggaaatctctgtccttttcttgtgcggtccttcttttgggtggataaaattgactttccgcaggataacggataaaataaagtggattattacaggaaaaatcagaccgattgtggataagtggggacagctacatgaattatacctatatcataaaatgtgcagacagtacgttatacacaggctggacaaatgatctggataagaggataaaagcacacaacagtggaaaaggtgcgaaatacacaaagaccagaagaccggtgaagcttgtgtattacgaagaacatgagacgaagaatgaggcaatgagccgggaatatgcgatcaaacagttgacacggagagaaaaggaactgctgatcaaaggaaacggaaacttatgtgaaaaagagtgtggataaggagatcgagattggagagaagatcccgaatgaattcgaactcgcagaataagtaaaaataaatgatattaagtgaaaaaagctgccaccggcagcttttttcatatgaatttcattaaagtacaaaagcatacatcaccacaaagtggcaggcgcttccggccatcacaaacagatgaaagatctcatggcttccgaaatatttgtgcttactgttaaagatcggaagcttcaaagcatagatcacaccgccaacggtgtagatgataccaccggccagcagccatacgaaagccgccggacttaaagaattcagcaattgtgtaaatgccagtacgcaggtccagcccatgccgatataaagtacggatgaaacccatttcggacagtatacccagaatgctttgatcaggattccggcgatggcaaatgaccatacgatcgcaagaaggatgatcccggtcctgccgccaagtactaacaggcagatcggagtgtagcttccggcgatgagaacgctgatcatcatgtgatcgatctttttaagaatggtatttactttttttgatttatcgaatgtatggtaagttgtgcttgccgcatacagtaagatcagacttgccgcatacacagcaattgcgataatgtaaatcttacttggttcgcgcgctgcttttaaaagcaatgggattgctgcgaatattgccatcagcattccgataaaatgtgtgatcgcacttcccggatctttaatgtgttcttttaactgctctgccatagtcatgcacctcctgaatgtcgaaaatatgacatgtagtttttaatactatatttactatatgtgtatattataccaggaaaagaaaaaaatcaagcagaaaaggaaaatatttttaaaatcaaaataatccttttccgcttgattttttatatatcaggttctaatttattttcagtgcgccagcttcttggagaagttccataggtattcttgaatgctcttgaaaaatgtaactgattcggatatccgacggcatttccaatatccgcaatggataaagaggttagtttcagaagctctgcagccttcgtcatgcggtaactgatcaggaattcctgaggagattttccgatggagtcgtgaaaaatctttccgaaataactccggttcagaccacagaaagaagcaatgtcttcaatggtaatattgttctgaaaattttgctcaatataagataatgcttctttgatgtaaaaatctctgatcttcccgctatggttcatgcgcactgtagcagcagaacgcatgaaataatccaaaaagagatacaaatgtccgattatatggaacggtgaatcggaggaggaaccggaatgtctggcaatatataacatttcgttcatcatttcattgcggagatctttcgaaccggcatgatagaccggatgatccggactgagtccggcagtagagacaatctctttggcacggagtccgtcaaattcaatccaggtatattcccatgggagatcctgatctgcgatgtaagtattgatctgattaggaaatagcataaaaccctgtccgcttttcacctgatattttattgtattgccggaagaatcgtcggccattaaagttccggttccggatatcacatagtgaaagatataatggtttctggcggcaggtccaaaagaatgggaaggttcacattgttcccagccatactgataaagtccgatatcgacaaaattttcattttggaaaacggaaaataaaagattactcataggaatcctcctttttaaaacagtatataccaaaatgctagataacttcaatatataacggaaaaaatcgcattttgcaataaaatatataatatgaggatatttatagacgcataatggtatgttacaatttaattgtaaataaaaaacgaaaaaaacctgacgatgaaaacaagagaatatcccgggaaaggttcaaaatcaggaaggaacggagcaaaaggagtgtgaaaacatgcataggaagtacaggaaactggtaagtgccggactggttcttacgatggctggggctatgacgttgcagggatgcggacaaaaggaagagacaggaaagacagaaatagaacttgtgcagtataagccggaagcagtaaaaacatttgagaaaatagaagaagaatttaaccgtacacatgatgatattcatcttacaattgaatctccgaatgatgcaatgacggttttgaagacgagatttatcagggaggataatccggatattattggaatcggaggagacgtgaactattcaaactttatcgattctgatatgttgatggatatttccgactataaaggtctggaaaatattaaagaggcatataaagaaattgataaaaatctggaatttgttccggaaaaaggaacttatgcggtaccatacgttgcaaatgcagcaggaattctttacaacaaggaaatgttcgaagaacatggatggaaaataccaactacatgggatgaactcatgagcctgtgtcaggagatacagaatgcaggaatccagccattttattttggatttaaagatacatggacttgtcttgcaccgtggaatgcggttgcggtagatcttgcacccgcagatgtgtgtgcacaggtgaaccgcggaaagacaacattttcgaaggaatataaagaagtggcagaacgtatgctggagctgcttccatatggaccggatgacccgtttgcatatgattacaacggggcgtgtacggcatttgcaaaaggtgaatccgcaatgtatacgattggaagttatgcaattccacagatccagacggtgaatccggatatggaaattgattcatttgtaatgccggcaagtaataacaaggaagaaaataagttgaactcaggaatagatcttcagttctgtgtaatgcaagactgcaaaaataaagaggcagcatatgaagtattagattttctcctggaagatgagaatgtacaggcatatctggatgcgcagaaggcggttgcttgtaaagagggagattttgaactgccatcaacccttgaaggaatgaaagaatatataaaagaaggaaaaatgtcagactaccaggatcattattatccatcggaaatggcagtagatgcccagatccagacattcctgatgaaaaaagacagcgaggcatttcttaagaaatttgatacagactgggtaagatataatcgtgatattatccgtaaagtggaagattacgagaaatcgcataatgactaagagagataagttaccggtaatacggaagttcaaggagttagtataatgaaaaagaataaattaaatgatagaaagcggacatttcttctgatcacgattccgattgttgcattatttttctgcttcaatacgctgccgctgatcaaaggtgtaatctatagttttaccaattttaaaggatatggaagttatgactgggtagggcttcgcaattataaagacctgtttaccgattccagggtcggaggctcatatatctttacatttaagttagcaattgcggcgacaattttgacaaatgtattgagtcttttgctggcactcggactaaatagtaaaattaagttcaaaagcgcactcagaggtgcatattttatcccgaatgtactgggagcactggtagtaggatatattttcaactatttctttacgtatatcctacctgtatttggaaaaatgatcggaagtaagacatttagttccagtatgctttctaataccaatcttgcgtggatcgcgattgtgatcgtgtgtgcatggcagtcgatagcaatgaacacaatcatttatatttcgggacttcagacagttccggaggatgtatatgaagcaggtgccattgatggcgccacaggatggaagaagttcaggaacctgacatttccactgatcattccatttttctctattaatatggttctgagtgtgaaaaacttcctgatggtatttgatcagatcatggcattgacaaaaggaggccctgcccagagtacagaatccatctcatacctgatctataataacggaatgagcggcggacagtttggcttccaaagcgcaaatgcagttattttctttatcgtgattgtagtgatttcggtaatgcagttgactatcacaggtaagaaggaggaacagttgtaatgaaaaaagttgggaaagaaagaataaactggcctgtaacgattcttttgatcactgggctgatcactgtagtatttccattgtatatgactgttgtcattgcgctgaagaaaccttcggaaatgacgaatgatgtcgcaggaatcttatcacttccaaagcatttcagtctgagtaattttacagaggcgatgaaagtgacagatttctggaactcattgggaaacagtctgctgatcacagttgtgacggtagtgcttgcaatgctgatccattcactgcttggatatgcaattgcaagaaataaggcacatagtaaattttataagtttatttatttttatgttgtcagtggtatgttcgtaccttttgcaatcctgatgatgccggtcgtaaaacaaacggcgcagatgggacttgcgaacagagccggagtgatcatcttatatctggtattttatatgccgatgaatgtgctgctgtattccggatatctgacaaacattccgagagcgctggaagaggcagcatgcgtggatggagcaagtacatggacaacttattggaagatcatctttccgatcatgaaaccaatgcatgcaacggttgcggttctgacagcacttggaacatggaatgacgttatgacaccgttggttattatgtcaggcacaggaaagaatacactgccgctggcacagcttaatttccagacacagtttggaacgaactataacctggcatttgcctcttacctgttggcacttctgccgatactgattttctatctgatctgtcagaagcatatcctgaacggtgtggtaaatggagctgtaaaataaagaaaatacaaaccggacaaaagacacaaaaaggagactggaaaatgggaattgtttacagtaaagcagacaggacatttacaatacagacaaagaatacaacgtatcagatgcaggtggacccttatgggttcctcctgcacctgtattatggaaagaaaacagatggaagctgcatggattatctgctgacgtattatgacaggggattctctggaaatccgtttgatgcaggggatgacagaacatattccatggatgcactcccgcaggagtatccttcctacggaaccggagattacagaagcacggcactgatcatcgaaaatgcagatggaagcacagcgtgtgatctgcggtaccgttcgcatcatattttcaacggaaaatataagattccggggcttccggcagtctatgcggatgagacggagagccagacactggagatcgtaatggaagatgcggttacgggcgtagaagttacattgcagtatggtgtgctccctgattatgatgtgatcacaagaagtgagaagatcatttatcgtggcgaaggaaagatatgtatcaggaaagcgcagtctgcatgtctggattttgttcaggggaaatatgatcttctgacattttacggaagacatgcaatggagagaacgatgcagagagagccggtcacacatggaagtcatgtgatcggaagtgtgagaggaacttcaagccatcagtataatccgatgatgatccttgcggatgagaatacgacggatcagtatggaaattgttatgcgatgtctttcgtatatagcggaaattttaaaggtgagacactgaaagatcagtttggacagacacgtgcgcttatggggctgcaggatgagatgttttcgtatccgctggcagaaggagaaacattctatacaccggaggtacttcttactttttccggaagtggaatgaaccttctttcacagaatctgcacagatgtatcagacagcatatctgcagaggaaagtacaaagaaagtgtccgtccggttctggtgaacagctgggaagcatcttactttgattttgatggtgataccttatacgaactggcaaaagaggcaaaaaatgcaggcattgatatgctggtgctggatgacggatggtttggaaaacgtgatgacgataacagcggtctcggggactggtttgtcaatgagaaaaagcttggggggacactgggagatctgataaagaagatcaatgatctgggtgtaaaattcggaatctgggtggagccggagatgatctcggaagacagcgatctgtacagagaacatccggactgggcatttactattccgggaagaaatccggttcatgcaagaaatcaactggtgttggatttctcgagaaaagaagttgtagatcatatatttgaccagatctgtaaagtcctggatcagggaaatattgagtatgtgaaatgggatatgaaccggagcctgatggatgtgttctcaagaggaacaaaagatcagggaagggtcatgtatgattacgttcttggattatatgattttctggaaaggatcgtgacaagatatccggatctgctgatcgaaggatgcagcggcggtggaggaagatttgatgccggaatgatgtattatacaccgcagatctggtgtagtgataatacagatgcattggacagattgcagatccaatatggtacttcattcggttatccggtatccgctgtggggtcacacgtatcagcagtgccgaatcatcagaccggaaggatcacatctttgcataccagaggtgtagtggcaatggccggaacattcggatatgaattgaatcttggaaaactttccgaagaagagaagatggagatccggttacaggtagaagaataccgaaagtttgcaccactgatccagacgggattgtactaccggttgtctgatcctgcgagggaggaatatgcagcatgggcatttgtatccgaagatcagaaagaagttcttctgaatgtcgtactgcaggaaattcatggaaatatgaccgtgaattatgtaaagcttcaaggattgaaatgtagtgcgatctatcgtgatacggaaacaggaaagagctataatggtgcagcacttatggaagcaggaattccgatgcctgtggaaatgggagaattcaaggcataccagacgcatctgacagcagaagagtagagtataaaaaatgagaaaaagagtagaaaaaaataatagtatttttcaatataggttagagaaacatcatgatgaactcaggtggctttacatggaactttatcagaatgatgatatgtttgcggaactgtgttccaggatgtatgagtattacagacaccggagtatcaaactaaaagaaagagatgcgaaaagagagaaggaagccgactggtatcacaggaaagatatgcttggcatgatgctttatatagataattttgcgggaaatatgcaaggtgtaaaagaaaaaatcccgtatctgaaagaatgcaacattaattgtcttcatcttatgcctttcctggatacgccaaaaggcagatctgatggcggttatgcggtggcagatttccgtaaggtacgtccggatctcggtacgatgaaagatcttgcagaactggcagaaaagtgtcatgaggaagatatcaatgtgtgtatggattttgttatgaatcatacgtcagaagatcatgaatgggcgaaacgggcaagagctggcgaaggagagtatatgagccggtatttcttctatgataataatgagatgccggagaaatacgaggagacagtaccgcaggtatttccgacaacagctcctggaaactttacgtatcttccggagaacggccattatgtaatgacaacattttatccgtatcagtgggatctgaattaccgcaatccgagagtgtttaatgagatgatgtataatttcctgtatctgacaaatcagggaatagatatcgtaagaattgatgcggtgccatatatctggaaagaactaggaactacctgcagaaatctcaaacaggtacacacgatcgtccgtatgatgcgtatgattgcagaaatcgtatgtccgggtgtattgcttcttggtgaggttgtaatggaaccggaaaaagtagtgccgtattttggtacggtagaaaaaccggaatgtcacatgctttataatgtgactaccatggcaacgacctggaacagcatagcggcacaagatatccgattattgaaaaagcagatggatgttctgaatcatctgccgaaacagtatgtatttttaaactatttgcgctgtcatgatgatatcggatggggtttggattatgagaccctgaaacagtgggggatggaagaaatcccacataagcgttacctgaatgattattttacagggaaaatagcgggaagtataagtcgcggagaattgtataatgatgatccggtaacgcaggatgcacgtttctgtgggacaacggcatcgatgtgtggaattgaaaaagccggatttgaacaaaataaagaagcaatggaaactgcggtcagggaagatcttatgctacatgcatatatgttaacacagtcaggtattccgatgctatacagtggcgatgaactggggcaggtgaacgactatagttataaagaagatcctgctaagtgtgcagattcaagatacatccatcgtggtaagctgcagtgggagcttgcagagaataagaatgatcccacaactgttcagggaagtatcttccagactcttgaccggctggaaaagatccgcggacaggaaataacatttgataaagatgcagatgtgtatacatacgatgtgcatgatgacagtgtcctttgcatattacgtgaatataagggaagaagattttttggaatatttaacttcagtgatcaggagaagacagcgtggatgcaggaagatggagtatatcgtaatctactgacgagtgaaaagatggaattaaaagatataagattaagagggtacgacttcctttggtgtgaaaaataaactggcctgtatgaaaatgttacaactggctgtttggacgaatccactatcgtgctaatatattcagcagaatttatttttcattacatattacaacaggaaggaagagtacaatgagtacaaatacagcagcaggaaagaccattcataatgataaggtgaagaatctggtgatcacggcattctttacagcaattacatttcttggaatccagtctttcaggattccgcttccggcagcagtcggaacaccatttcttcatttcggacatatatttgtcgtaatgggattgttacttcagggaggaaaaagaggagccgtatccggaacgctgggacttaccatctttgatatgttaaatggatatatgcaggatgcgccaaagacgtttgttgagacggcgctgaagtgtctgatcgtcggagcactctttgtgatgctgaagaaaaagacagccggtgataaaaagaaagaatacggagcagcgatgatctgtgccgtggtttacggatgcatcaacgtgatcatggaatttattatgggaaccatatctatgatgatcatgggaagtggattcgcagcggctgcggtgggagcatttacatctcttccggctacggtgatcaatgcagtctttatggtgatcgcaattgcggttctgtatcagctggtgaaaaaaatctatgtgcgcatggcatagagcgggatagtggaaaaaaataatgaattgaacaaaaagagcggatacgccgtaagtggtgtatccgctcttctgatatctgaatccgttatttttatccgaaatatctgttaagaagtccttcgaaagctcttccgtgacgggcctcatctttagccatctcatgaactgtgtcatggatcgcatccagattagcggcttttgcacgttttgcaagatcgaacttaccagctgtagctccgttctcggcatctacacgcatctcaaggttcttctttgtgctgtctgtaacaacttcgccaagaagttctgcgaatttagcagcatgctcagcttcttcccaggcagctttttcgtagtataatcctacttcaggataaccttctctgtgggcaactcttgccattgcaagatacataccaacttctgaacattctccttcgaagttcgctcttaaatcagctaagatatcttcgctgacaccttttgcaacacctacaacgtgctctgcagcccattctctttcacctgtctgctctttgaacttatcagccggtgcgtggcagattggacattcagccggtgcagcttctccttcgtaaacatatccgcatactgtacatacaaattttttcataatgttgttctccttttctttgaaataattttttgatttattaaaattaatattagtaattgttactgatattaatttagcacgatattactattttgtcaattagtttttgataaattttattatttattctcgttctttttctttatacagtcggcacaaagaccatggaaaagtgtgttgtgagattcgataattccatcaaaacatgcgttggcatcttcgttgatcttctggatataagaatcatccatttccagatcgaatacttttccgcaattcgtgcatactacatggtaatgaggttcacagcgcccatcaaaacggtcgccaccggcaggtgtcggaatccggagtgcttcaccgatgtcggcaagcagattcaggttgcggtagacggttccgaggctgatattcggaaattcttcttttatatgaagatatacggtatcagccgtaggatgtgcggttgtgtgtaataaatactctttgatagaggctcgctgtttactgtattttaaagcagccataacatcctccttccaataacgataataattactataattgatatctttagtatagtgttgtttatatcatttgtcaataaggagaaataaatgtaacaaaatgtaataaaataaaaaaatgaaacgaatggaagatagaggaatatcagatgatacgcttgaaaataaaagaaatacttgacaaaatgtattcagatgatataataacaaacgtaacatatgtaacaattctgtaacaattacaaaagacgagaaaacataaaggagggagtttatggattcgattcttaaaaaaggagtgctcctggttagtgtgaccgggatcatgacagcatttccaatggtggtgcatgctgcagacatagatgatacgcagaatataccagcggcggaaagcacacagatattggaagattgttacacatcagataagacaatatcggtaaaagatcatcttgtaccggaacaaaagggtgagtattcagatatggcattcgcaaatgtacaatcgtttctttatataagaagtgaaccaacaacagacagcgaatgggttggaaaactatatccggattatgcggcaaagatcaccggtcctgtgggagaatggacgaaggttgagtcgggaaatgtgaccgggtatgtgtattccagatatataacggtaggaaatgaggcacagaagaaagcagaagagttagtgcagaacaatgacacgggaaatgcagaagatgcatttacgtatgccgaatcgagagaagaagaggcggcaagatttcaaaaggagcaggaggagcagaaggcgcaggctgcgggaaacgggcaggcaattgtagattatgcgtgtcagtttatcggaaatccgtatgtatggggaggtacgagcctcacaaacggggcggattgttccggattcgtacagtcggtatttgcacattttggaatcgcacttccgcgtacgacatgggatatggagaatgcgggaacggcggtaagttacgatcaggcagttgcgggagacattatcttatataatggccatgtaggaatctatatgggaaatgggcagatcgtaaatgcgatcaacagtgcaaaaggaatcgggatcctgccggcaacctatacgaatattgtgaccgtaagacggctgatataagaaaagagaccggaggaatttatgaaaaattccccggttctttttttatccacattatccacatgaattgaaagttatccacaatatacaaaatccacaaaaatcgatatatttctgcaaaaaacaaaaaatacaaaaaaattcatgaaaaaagttatccacatcaaaaaatgcaaaaaatgtagaaaaatggggattttcacaaagttatccacgttatccacacccaaatcgggaaaaacgggggattattcggggatagaaaaagaacgcacgttttgtagagttgttataaaaatgaagaaatgtcgaaaaaaagagttatccatattgacatttgagtagtcaaatattaagaataaatttgcgtaaaatgtttacacaatggtaaaaagctactataatggaaacactgaaataaaaaggaggcgataagatggcacagattacaaaagacatgacatttggtgaactgctttccaaatattattctacatgtccaaagcttgttgacgatctgatggaagcaggaatgggatgcatcggatgcccacattctcagatggaatctatcgaagaaggcgctatgggacacggaattgatccagacctcttagttgcaaaactgaatgcaacactggaagcaagccaggcataatataaaaataactacaaaaaactctacaggattcctgtagagtttttttgcagttatttgtaaagaactgccgctagcagatctttatgacaattccggatcataattccggctaaatattggcgagctgctgaaccgcatctccggaaagaaatgtcttgcagtgttcttccaggaacgcgaaagttgcgccggacgctctttctaaagcaccgtattcagacaacatattgcagatccgattgaaatctgcggcggagtgatcggaccgggcaagtgccagcagatacatctcctcctgttcgtctttgtataaagtattggaaccgtggtacatcggagccagaagtctggcggctttcagtacattctccatcacagggaaagaaaagagccggatattgttaccggaatcctttttttctgtatcatcaccggaagcagatgtggtatccgaggcagacttcactgcctgtgcttcaaatgattcctgaacctttccgagcagatcgagtaaactttctgctccttccagcttgcccggagtattctttttcctggcatcagcaatggaagaaggtgcaaattttgaaaatctggtatcgagttcctcaggatcctcgacttttgtaattatcagcacgatcgaatcggcggaagggattgcctctatcatgagaggaatgtcttctgcttcgaatccgaattcgaaggctgcctgttgcatcatatcgcggaaaagtgattttgctttttcggttccgtatgccagttcactgagctgtaactgacggtcagccagatcggcgcgtgtcaaagtacaacggatctggttgtcactgattttttcaatcttcataatcatcacttccttctaaaatagtatatcatagaaaatgtttgatgttcaataaatttagtataaacaaaacggaataataaaataaaaaaagacttgattcttcaaattttatcagatataatgacgctactggaagatagttttccctgataactatgttgttagaaccaataagggagaatttcttgaattttaattttggggacggaacagaacgccgtaccaggcatttatatttcaattccacgttccgggtgggatggatctatcaaaagcaaatcagattacacagccgtttcaggcagacatttcacagtataattttgacataatatgaaaaatatttaattgccggggactatttccagttgaaacataatttgttgctgcataaaaacagcattgtatcacgggcatctccttcgctgcagatatgcgcaacatccatagttatcatccggtaaaaaggaggaaggaacatgggggacaatgacgaatggaagaatatgttccaggaactgacaggctatgaaaagaaaaatataagcctcaggatcaatggaataccagccagccccatgcagattgtgcaggcacatacgatgtgtgaaaatcaggcatatatgagagattatgtgctcaatgacaaaggtgatgtaaaagagttgtggtttcagaatatagcaatttaatcaggaaaaatatgtaaataccccgcagattaagacgaaagttttaaggaaaatgtcgaaatataatgacgtgtatcttacgttttgttataatgtgacctgtaggaggtgcagcatggaagacagaggaagaagtagccgcacatatgaaaaccgaagaacatatggaaaatcacaggaaagaagaccgtcagacaatcatccgccaagaagacagagaactccggcggagcgtgcgcgtatgcggcggagaagaaaaagacaacgcatgatacgatttgtcctgttgatcatattaatcattgcagcaattgcaggaatcattttgtggaaacgttacagcccatcaaaagaacaatatgatatgaagaaatattatgggatagaaaaggatggacaggttggtatcacggtggataataaagtcgtggaggcagaaggaaaactggcaggtggaaaagtatatgttgcatataatattgtaagagattatatcaacagccggttctactgggatccgaatgaaaatgttctgttgtatatgctcccggaagatatgatatcggtagatgtcggcagtaaggattactctatatccaaaaaaaagaaaagcgaagattacgttattttaaaaacagaaggaaacacagcatatattgcattggattttgtccagcagtacacgaatattgattatgaagtgtcaaataatccggatcatgttatgatcaggacaaaatggggaaaaacggatgttgcaactgtgaaaaagaatacacaggtgcgttatcagggcggagtaaagagccctgtgctggcagaacttaagaaaaaagatgaagtaacagtcgttgagagtgaacagaactggaaaaaggtacgcacagcagatggtgtgatcggatatgtaaagaacaagactctgaagaacgaagaaaagaagaatattaccagaaagtttgaagagcaggattattccaatattaccaaagattacacgatcaatatggcatggcataatgtgacgaaccaggatgcgaacaatgcggtggcgcagaggatcgcccagacgaaagggcttacgacactggctccgacatggatccatgtggcagatacgaacggtaacatcagctctatcgcatcggcagattatgtgagttacgcacataagcagaatgtggaagtgtggatgaccgtcagggattttgacggaggcatcagttcggagcaggaatcttacgaactgctcagctatacatccagacgtgagactttgatcacgcagctgatcgcagaggcactccgtgtcggcgttgatggtatcaatgtagacttcgaaaagatttccgataagtgcggagaacattatattgaatttatccgtgaattatcggtaaaatgcagacagaacggactggtgttgtcggtggacaactatgttccaaagagctttaacacacagtatgaccgtaaagagcagggaattgtagcagattatgtagtgatcatgggatatgatgagtattatgcaggttcgcctgaagcaggtccggtatcttcttacaattatgtaaaagaaggaatcacagagacgttaaaagaggttccggcggagaaggttatcagtggcattccgttctttacacgtctgtggaaagagactccgaagacggaagaagaattgaagagtgataaaggaacggatgcggaacagtattctacaaccgtagagagtgatgcatatggcatggataatgcacaggccatcgtcaaacaggccggagtcgatacgacctgggataagaaggccggacagaactatgccacatgggaagcagacggatccaaatatgagatctggatggaagacagcaaatcaatcgaagcaaagctcaaactcatgaagaaatataagcttgcaggtacagctgagtggtctcttggacaggagagttcggatatctggaatctgatccagaaatatgtcaattaatcaaacagaataacagataaaatatctcttgcagtcatatagtagaatatatgaattgcaggaggtatttttatttgtggaaaaaaatagaatttgcaatagtattgctgctgctggcggtacttatcatgatgagtaatcatctggaggaaatggtatcaagcggaagggttacaggaaggaatccatgtattgtcctggacagcggacacggcggagaggatccgggaaagatcggtgtgaatcaggcaaaagaaaaggatgtaaatctgaaaattgcaaaaaagacaaaagagagactggagaaaaaaggatggaaggtcgtcatgacaagagaaaaggatgtaatgcttggagattcggctgcaggaaataaaaaaatccatgatatgaaagcgagagtggaacggatcaataagacgatgccgcaggctgcggtcagtatccaccagaacagctatcaggatgcgcagatccacggggcgcaggtcttctattattcacattcggaagagggaaagcgaatggccgaagtgatgcagaaagcactgctgaaggcagatgaagagaataccagacaggcaaaagcgaatgatacctattatcttctgaaacggacggaagtaccgacgatcattgtggagtgcggattcttaagtaatccggaagaagccgcaaagctggtcactccaaagtatcaggagaagcttgcggaagcgatcgcagaaggaatccttgcttgtatggaaaactagagtgtagtataataacaatcatgaaaacaatattagaaaaaattgataaaaatcaaaataatacagatattataagagaagcaggacggatcttaaaagaaggaggtctggttgcatttcccacagagaccgtatatggtctgggagcagatgcattgaatgaagatgcggccaagaagatatatgccgcaaaaggaagaccgtctgacaaccctttgatcattcatatcacgaatatgaaagcactggaaaaaattgtttccgaagtcccggaaaaggctgtaaaggttgctgaaaaatactggccggggccgcttacaatgatatttaacaaaagtgatattgtgccgtacggaaccaccggaggactggatacggtagctgtccggatgccggtagatgcgatcgcaagagaagtgatcgatgcgggcggcggatacattgcggcaccaagcgcgaatacttccggacggccgagtccgacaaccgcacagcatgtagcagaagatcttaccggaagggtagacatgatcgtagacggcggggcagtagagatcggggtagaatctacaatactggatatgacggtagaaccaccgatgatcttaagaccgggagccattacaaaagagatgttcgaggaagtgatcggagaagtcacgatcgacaggacgctgatcagaccggacagcaggcaggttccgaaagcaccgggaatgaagtatcgtcattatgcaccgaaagcggatctgaccattatagagggtccactggagaaggtgacggcagagatcaataagcgtgcaaaagaaaagtcccgtgcaggctataaagtcggcattatcggaacggaagagactgtagcagaatataaggccggtgacgtaaaatgcatcggaaccagagcggatgaatcaaccatcgccgcaaatctgttcgggatcttaagagagtttgatgacgatcaggtagattatatctatagtgagtcgtttgatactgcaggaatcggaagcgcaattatgaaccgtcttctgaaagctgcaggacatcatatagaaaaattggtatagaatcatttcacaacaaggaggagaaacatgtcaaaagtacaggttatggatcacccgttgattcagcacaagatcagctacatcagaagcgaagaggtagggtcaaaagaattcagagagatcgttggggagatcgcatcattaatgtgttatgaagcaacaagagatctgaaactggaggatgtcaggataaagacaccaatctgcgagatggtgggaaaacaattaagcggtaaaaagttagcagtagtgccgatcttaagagccggacttggaatggttgacggaatgctgaatatgatcccgtctgccaaggtcggacatatcggtctttacagagatccggagacatatgaaccggtagaatattactgcaaacttccgtcagattgtgacgaaagagaagtatttgtcgtagatccgatgcttgcaacaggcgggtcctgtgtggcagcacttcagatgctgaaagataaaggtgtaaaacatatgcgttttatgtgtatcattgcagctccggaaggtgtaaaacgtctgcaggaagcacatccggatgtagatatctatatcggtgcactcgatgatcatctgaatgagcataaatatattgttccgggactgggagatgcaggagaccgtatttttgggacaaaatagtggcgaggtgacgtatatgggagataaaagaacagattatatcagctgggatgagtattttatgggcgttgcaaagctttccggaatgcgttccaaagatccgaatacacaggtaggatgctgtatcgtcagtcaggataacaagatcctgtcaatgggatataacggacttccgacaggatgctcggatgatgtatttccatgggcgcgggaaggagaagatcctttagagacaaaatatgtatacacggttcacagtgagctgaatgcgattctgaattaccgtggaggaagtctggaaggggcaaaattgtatgtctctctgttcccgtgtaacgaatgtgcgaaagcgatcatacaaagcgggatcaaagaggttatctatgacagcaacaagtatgaaggtacagcagctgtaatggcttccatgaagatgttcgattctgccggcgtgaattatcataaataccatcggacagaacgggaaatcaagatttcgttataaaataaaaagcagatcagagatcatgagacaggtttgaaaaaagaaaaagttttcaagcctgtttttttagatgctttttgataattatgaaaggtataagacagatacagatcatcatataataaaaaaacagagtaataaaaaagagaaaaatatgaaaaaaaagggaacaaaaatcattgtaaattttctgattcgtggaattattgggttcgcgatcatattttttgtaaatgaatttcttgacggacagggaatttctgcctgtgtcgggatgaatccgatcacttttttgacatccggatcctttggatttcctggggttgctctactttacggtataactttttatcaaattatgtaaacattgcacaaagattgaaaacttttaaaaagggcatagacaaatacaaatcatccagtatataatcagcctacaagttacgaagtagcttgcatctgatttgtagttctaattgttagattcaaaaaattcaagaagtattcaatgccgtatcggcaaacgtttcagattttgtgtaaacgtgttgaaggagggatagtatgtggtaagcagaaatctggtgatttgtgaccaggaagtgagatacgctgcggcccttgcggaagtttttatgaaagcgaaggagctggcacttggcgtacaggtatgtaacagtgttgagcagactgtaaaactgcaggaggaatcaccggttgatatcctgttgatcggaagcagttatccggtagaagacaggaagaagataaaggccgggaatgtgttcgttctggcacagtcggaaaatgcagtacatgagacaaatgagaaacttatcaataagtaccagtccggagaggccattatgggagcggtgatcgaacagtgtacgcagtccggggaaccggaaagatttttccttaggacagcgaaaaagcagaatgtcaggatcatcggaatcttttccccggtgcaccggagtaagaagaccgggtatgcattaaagctgggaaaagaactggcaaggacgtacaatgtattgtacctgaatcttgaagtatatggagggatcgggggacattttccggatgccggacagacggtagcggatgcactttattattccagacaggagaagaaacacttaagagcagctctggcaggtatggtaaaacatatgggaccgcttgactatcttctgcctatgcggatgtcggaagatctgaaggcagtggagatcgaagagtggacagggtttgtggaacagattgcagaacagagcatatatgaagtcctgatactggatatcgatgaagggatccgtggagtatatgagctcttgaggatgtgtacggagatacatgtggcagtcataaaagaggaggtggcgcaggcaaaattattccagtttgaagaagaattacatctgatgggttatgacgatgtaaagcagaagatggtaaaaaaagagctggaaggatgaggaaaatgatagaagcagagcagctccatgcaaggatattatccagactggatatgacaagggacatggaggacgaagaactgacagagttgatctatgaagtacttcaggaagcttcgcaggaagaatatctgccgttggatcagaaaacaatgcttggaaaggaacttttcaatgcattccggaaattggatctgctgcaggaatttctggaagacgaacagatcacagagatcatgatcaacgggacgcagaatatatttattgaaaaagcaggaaggatcatccagtcagacaaaagattcttatccagagacaaactggaggatgtgatccagcagatcgtggcaggatccaacagactggtaaatgaggcatcgccgattgcagatgccagactggcagacggatcgagagtcaatgtcgtacttccgccggtcgcattaaatgggccgatcgttacaattcgaaaatttgcaaaagaagcaattacaatgaaaaaactgatggaatggcagtcaatcaattcagaagtatcgggttttctggctttattagtagccgccggatacaatatattcatcagtggtggaaccggatccgggaaaaccactttcttgaatgcactatcgcaatatatacccaaaaatgaacgcatcataacgatcgaagacaacgcagaacttcagattcaaaatgtaaagaatctggtaagactggaagcaagaaatgcaaatgtagaaggaacaggagaagttaccatcagggatctgatcaagtcggcacttcgtatgagaccggacaggatcatcgtgggggaagtgcgctcggcggaagcaattgatatgcttcaggcacttatatgtactatataacaattatatatataacgtatataaggatggaaaatatagattagagggaaggcataggaacgatatgaacattaagtataggttattgtgtaaaaggttaatagaggaaaggaagagagtaggtgtcattcaatattataatgtactgttcataatggagttattgtcagataaagacatatgttttttagaacagtgggtgaacggtataaataacatatatatgaaggatatacataactggtgtagaatgcattttgttaaatatcacactgtatttgtttacaggaaagagtatccggtaaaagcaaatatttggaatggatattcatatataaggtggcggatggagcgtatgatgaatttggaataagataaaatagtgcttgcatgaaagggag

SEQ ID NO: 2802 - DNA, 33669 bp, Unknown
  gut microbiota DNA sequence
gtttgagccgaatggcgagttgcaaatttcggaagcccgtttttagcataattttgacgctttagtatttcctaccgacggaacctgaacaggaacggcttcctactttttatgcaggtccgggtagtcatgccttctaaattaaatcccaacgatatttccttccagatccttccaggtgaattcgccgccctcgcagatcatatatccatgagcagaaccttccttaggaattgatacagaacctggattcatatagataaaatcccccatatcttcatttgcaggaatgtgtgtatgaccattcagaagaatatctccttttttcaacatcggaggattctttggattgtgatgatgtccgtgagaagcgaagatggtgcgcccgtcaatttcaaggaagcagtagtcggcaagaatcgggaattccagtaccatctggtctacttccgtgtcgcagttaccgcggacacagagcagctcctgtttcataggatttaacatggcaatgacttcctttggattgtaatcttttggcaggtcattgcgtggaccgtgataaaggatgtctccgagaagaagaagacggtcagcaccttcacgtttgtaagcgtcaagcattttacggcagtagtaagcggagccgtggatatcggatgcaatcattaatttcatatgtatgtacctcactttgatatgatataaattagttgttattagaacatctagaagaattttaacataaattcaaagaaaaaatataacaaaattaagaacattatattgtcgacattcgccaatatacatttggcaaaggatgatttacaataagaatatgaaatgcagaaagcgaggaagtaagatgaaagcttacgaaagatttttaaagtatgtgtccgtatggacaacaagcgatgagaacagtgagactgttccatcagcagacagagaactggtacttgcaaagttactggcagaagagatgaaagaactgggaattgaagatgcaagagtggatgagaaaggatatgtatacggatctgttcctgcaacaccgggatgtgaaaatgcacctgcactgggactgatcgcgcatatggatacagcaccggatgcgccgggagacaatattcatccgcagatcatcgagaattacgatggcaaagacgtagtacttggaacaagcggaaagacgatcaaagtagaagaatttccatatctggcagatttaaagggacggacattgatcacgacagacggaacaacacttctgggcgcggatgacaaagccggaattgcagaagtgctgactgtcgtagatgagattttgaaagaaggacttccacatggaaagatctgtatcggattcacaccggatgaagagattgcaaggggagcaaagcattttgacgtagaaggattcggagcagattatggatatactttagacggaagcaccgaaggtgagatccagtatgagaactttaatgcatcaacagcatgtattacgattcatggtgtcagtgtacacacaggaactgcaaaagatgtactggtgaattcgcagacgatcggaacagaattccaccagatgcttccggtatcagaaaggccggagacaacggaagggtatgaaggattctatcatcttgtaagctttaatggaaatgttacagagacaaagatgaaatactttatccgtgattttgatacagaaggattccatgcaagagcagcaaaaatgcaggagatcgcagacagtctgaatgaaaagtatggagcaggaacggttgaaattgagatcgtagaatcttattacaatatgcgcgagaagatcgaaccatgcatgcagctcattgaatatgcaaagaaggcagcggaaaatgcagatatcattccggatgtcgcaccgatccgcgggggaacagatggtgcaagattaagctttaaaggacttccttgtccgaatcttggaaccggcggctatgcattccacggggtatatgagcacattacggtagaaggaatggataaagcggttatgatggtaaaagatatcgttggtatgtttgcaaaataaacagggatttctttggcagttggtgcttgtttgcaatgacgatctgctgtattatggggaagtacagtaaagaaccgtttacacttgtaaggcaggaacggaacaaaacggaagatgaagaggaatataatggaaacaaatatcatatcagaactgacaacatttatagaacacgcaccgacagcatttcatgcggttgcagaattaaaagagatcctgaagcaggaaggattcgaagaattaaaagagtcagaaaagtggaagatcaaacctgggaaaagatactatgtaacaagaaataattccagtatcattgcagtaaaagccggaaaagaactggacaactacagtttccatgtgacagcatcacacagtgattcgccggcatttaaactgaaagagaatgcggagattgaggtcgcaaagaaatatacggtactgaataccgaaggttacggcggtatgatctgccagacatggttcgatagaccattgtcactggccggaagagttatggttaagaatggggaaagaatcgaaaccagacttgtgaaggtggacagagatcttctcatgatcccgagtcttgcaattcatatggaccggaaagtgaatgaaggaagagctgttaataaacagattgatatgttaccgatattatcgggaagcgtgaaaaaacaaggagaggtaagatccttagttgcagaagaactgggattaaaagatacggatatctatggcatggatctgttcttgtataaccgtatgggagcggtcagatggggaagtgaccgtgaatttatcgggtgtccgagactggatgatctgcagtgtgcatttacatccatgaaaggattcctggcagcggaaaatgaacagaatatcaatgtctatgcctgttttgataacgaagaagtgggttcgggaacaaagcagggagccgcatctacatttctttatgatgtattgtggcgtgtgaataaagcactaggaaagggcgaagaagaattctaccgttcagtagcaggaagttttatgctcagctgtgacaatgcccatgcggtgcacccgaattacaggcagaagacggatgcgacgaactgcgtctatatgaatgacggtattgtgatcaaatcccatgcggggcagaagtatacgagtgatgcagtcagtgtggcggtattcaggatgatctgcgaaaaagcaggcgtaccattacagtatttttctaatcgttcggatgaagcgggtggaagtacattggggaatattgcaatgacgcaggtgtccatgaatacagttgatatcgggttgccgcagcttgccatgcactcggcgtatgagacggccggtgtaaaggacacggagtatatggtaaaagcggtagcgacattttatgcatcgcatatccaggctgattcggatggaaattatcagatttactagtatttagaaaaataagacgggataacagaagttatgacagaattaggatataagacattacgtgaaagtattgtagatattataagaaaacggatcattaacagggaattgcagccgggacagaagattgtcgaacaggaactcgcaaaggaattcaagaccagccgtgcaccgatcagagaggcactacgcgaactggagaatgaaggcctggtagaatatgtaagaaatgccggatgttccgtgaaagagatcacatttgaagaatcatttgaaatctatctgatgcgtgcgaattatgagattatggcggtgcgtcttctgggaggaaagataccggaagaaaccctgcaggagatggaagaaatactggaacgcatgaagagtctgaatgtggatgaatatgatcagctgttttcatatgataataagtttcacagctgtttgatcagaatgaccggaatgaaaagtctgtataaggcatggaaaagtctgaattatgggaatatcgtgacaggttataatctggcatcggacaaaaaagcagtgatcaaacggcaatatccgatacataaagaactgctggaagcatgcaaaagcaggaagaaagaagaaatctgcagggtattgtcggatcattatatgggtacgatccacagacttttgaaagagcagggaatgacggaagcagacacgaagttttcactggactttctgatttcataaagaagtcatagtgggattttggagagcatgattccgggaaaatgaatgatggatgaaaaagacaaatgttgtgcataaaatacaaaaatagatataaaatataaataatatattgaaaaacgcacaaaaatatgctatattacattcaagtattgacgattgtcgacaaaaattatttctaatcacggcagcaacccggaaattaaaccgtctggttgaaggagaagaatagaaaaatatatcatctgaagcagttaccggaaggaagtaagcaaaatgagtctttggaaatataaatattttttagatgtagtggaactaaagagctttacaaaagcaggagcgagaaattatgtgacgcagacggcagtgagccagcagatcgcgtctcttgaaaagatggcgggaggcacgttgctggagagaggaaatggtgagatctgcctgacagagttaggtgagattgtctatgagcatgccagagagatggtgctgatacatgagcggatgctgaatgagatagaaagatacaaagaaagcagcgtgctccgtatcggaatcgacagttcgattaataaattattctgggcaaagatgcagaagatgattaatgataagcattccgaaaaagacttccgtttcagtaaactggattcctacataggcagccggatgctgagagaaaatacattggatatttatattggatacggactgaatgatttggagcagccggatgaaataggagaaaagccgctgatatccagccggatcggggcatatatcggacatgaatcatcgataaatgagcatccggagtttaaagcaaaggatcttgagcgttatgtcagatatggaacaaagttatatttatgcagtgtaatgaatggacaaaagaatgatccacagttgcttacacaaggaatagaattagttgacaatgtggataccatgaaattaaaggtagaatttaacgatggatatgcactggcagacagtcggtatttctcttattatgatggagatatgcttctgcttccgggatatgacggagagtgcgtgatcaaagcattctacagaaaaaaaagaaacaaaaagaaaataaaagagattctggaagaacttcagaatgtagtgaaatcataagaaaaagttatcgactgtgaaagcggccggtaatttttttgcgcatacctaaatatacaagagaagtttctggtggtaaattctctgcattttgagctgaaagattgtattttataaatatgacataatatggaatagtacataagctttgcttataggttatacctttttctcgttggatatattgtatgaacagagatacaatttttcgtagaaagactgcgagatacaaaggaggagagaaaagatgcagcgaaaaaatatgtggaaagaatacacagaagatcagcagaaagaattagaagagctgagtgtccgctataaggaatgtctggatatcggaaagacagagcgtgaatgtgtaaagcttggaaagaaaatggctgatacgtggggatatcagaatctggaagagtgcatttccaaggggattacattaaaagctggggataaggtatatgcagactgcatggggaaagcatttgttatgttccagctcggcaagaaaccgttagaagaaggtatgaatattcttggagcacatatcgattcaccaagaatagatgtaaagcagaatccgttatacgaagacagtgatatggcatatctggatacgcattactatggtgggatcaagaaatatcagtgggttacgattccgcttgcgatccatggaacgattgcaaaaaaagacggaacagtgcgggacattattattggggaaaaggaagatgatccggtacttgtgatttcagatcttctgatccatctgtcacagcagcagattgagaagaaggcgggcgtggtagtcgaaggagaaggattggatatcctcgttgcaacaaagccgcttacaggcgatgcagaattggagaaagaagaaaaagagctggtaaaggcagcggttgttcagttcttaaaagagaatcttgatatggaagaggaagatttcctctcagcagaactggagatcgtgccggcaggaaaggcgagagactgcggactggacagaagcatggtgatcggatacggacaggacgacagggtctgtgcatttacttcgctttttgcaatgctggaaacagagaatccggaaagaacaagctgttgtattctggtagataaagaagagatcggaagcgttggtgcaaccggaatgcattccagattttttgaagattatgtggcagaactgatggcacttaccgaagatggtaatccattaaaagtcagaagagcactgagaaattcttatatgctttcttctgatgtaagcgcagcatttgatccattgtatgccgatgcatttgagaaaaagaataccgcatactttggaagaggtctggtatttaacaaatttaccggaagccgcggaaagaataacagtaacgatgccaatgcagaatatatcgcaaaagtacgtcaggtattagacaataatgaagtcggattccagactgcggagatgggtagagtcgatcttggaggcggcggaaccatcgcatatatcatggcaaattatggtatgaatgttattgacagtggtgttgctgtgctttccatgcatgcaccgtatgaggtgacaagtaaggctgatatttatgaagcttacagaggatataaagcattcttgaaagatataaaataagacagagaaggatatatgtacaaaataaggaagaagaaataaaagtacataaaaagtaaggactaaatttagaaaaaagtgaggaaaagaatatggagacaaaaaagaagggcttcccggtagcgttctgggtatgttcctgctcagagatttttgaacgtctggcgtattaccttggacgttcgctgattttgatttttgtaactgcttcggtggcaaccggaggactcggactttcagatacggtggctgccaacatgcagtcgaacctgaccgcattttcttatctgcttccactgtttggggcagtgatcgtagataagtatatcggggcaagatacacgacaccggttggtatgtttattgctgcggcaggatatttcaccggcggaatcgcaaagagtgccaccggagtatatgtgatgatcttcctggtaagtcttggacttgcattattcaaaaatggagcgatcatcggacgtgttattacagacaaatcacagatggacccggcattttccatgcgttatacactggtaaatgtgggtgcattcatcggaacattcctagtgggaatcctgtataaggatgtatttgcaaaagatggtgtactgggattcgcaccatgctttaagatggcagcactgatgatggttctcggaggactttggtacatcttcgtatgctggagattcttaggtgaccttggaaagcttccattcaagaagactctgacagaagaagaaaaagctgcagaggcaaagaaaaaagaagaagcaggaacaaaacagccgcttacaacgattgagaagaaacgtatcggtgcaatctttgtagcttcattattctccatcgtattctggatcttctggtatctgggatatatgccggtatatttttactgggcagagaatatggactgggtagtagcaggttatcaggtaccgtctacatggtttgatgcagccaactcactgttctgtgttatcctgggacctgtaacagcagcgttatggaagaaactggcggcaagaccacagggggatatgagtctgttcagaaagaccggacttggaattgcaatcatcggtgtcggatatctcttctatgcagcaattgatattatgcgcggtggggaaaaggcaagcgtgttatggctgatcgtgttcgcattccttctgacaatgggagagatgttcttctcaccattgggacactcgtttatcagtaaatattcaccgagccgttatctggctgtcatgatgtcggtatggggatttgcgacatttattgcagcaaagagttatggtccggtatatggattgctgtttggcggaaagattgaattcaaagtagcatgtatcggagttgcggttgtatcgtttgcagcggcgctgatcatgatagctctggacaagaaattatcggcattggtggactaaccgccgggtgctggataaaaacaatgataattgtatagatatgcctgaaacagatttaggcatagacacccttcagaaaaagatgtactcctctttgcacaaaaaagaggagtacatctttgtgcagaaatattgaattaaggaagaatgaaatgaagataacaaaaaaagaatttattatgatgctgggcggcatgttcttaatgtcggcagctgtatattatgaaatgatgccaaataatctggtgcttggaagtctgtcaggactggttcttgttctggtaaagatcattccgttgccggtatcggcaattacctttgccttgaatatgatactgttggtcatcgggtatatttttatcggcagggagttcggtgtaaagaccgttcttgcatcacttatgcttccgatgtatctgaggatttttgagatactgactccgcatgtggaatccttgtctgggaatatcgtgatcgatctggtatgctttatgatcgtggttggcgccggacaggccgtcttatttaacatgaatgcatccagcgggggaattgatattgttgcgaagttgatcaataaatatcttgggttcaaaataggacagagtattacgatcataggtgtgcttatatcgctgacggcgatctttgtatatgatcgggagacaatggtaataagtcttgttggtacgttgatctacggtcaggtattagaccggttctgtgatggattccatgtgcgtaagaaagtatccattctttcaaaggagcatgaaaaaattcagaattatatcgtaagggaattacgcagaggtgcgacgatttatccggcatatggaggcctggatcatgcagagcatttagaagttgtaacgatattagaaaagaatgaatatggaaaattattatctttcatccacgaaacagatgaacatgcatttgtgaccgtcagtaccgtaaatgaagtagtcggagcatggaatacagtgaagaacagataaaaatacattcccggataactgaaacatcgacgaaaaaagagaaattggatttttaccgggaatgtatttttatctatgtactatttaaggatggctgatgttcatattatttctgtttatatccgtcaaggaatgttcccatccggcggatcgcatcacttaagacatctgcctgcggaagcatgacgatacggaaatgatccggatctttccagtcgaatccactgcccggaacgagcaggatattggtggcatccagcagatcatgagcaaactgtttgtcatttgtgatgttaaatttcttcacgtccagtttcgggaagacatagaatgcagcgtcattttttacaaatgacaggccattgatcttctcgagttcacgaacagttgcttcacgctgttcatagattctgccgcctgggcggatcatagaagcaggagtctccatatcatcaagagcagcagggatgacaatctgagccatggtattggcacacaggcggagagaagttaactgaatgattccctgtctgtaatcttcggtcagttctcttggaccgctgatgaccatccatccgcaacggtatccacacagacagtgtgatttggacagaccatttaatgtaatgaccggaacatcctctgtcagtgaagcaagagagatatgctgcttaccatccataacgagacggtcatagatttcatctgcaaagatcagaagtccggattctcttgcaatctggatgatctcaagaaggagttcctttggatagagtacaccggtcgggttgttcggattgatgatgacgattgcttttgtcttctctgtgattttggaacggatatcctgaatgtctggataccagttggccttctcgtcacaggtgtaaaagaccggtttaccgtcttcgagatatacggaattgccccagagggagtaactaggagaaggaaccaagacttcatctccatcatttaataaaggtgttaaagcgaaagatacaacttcactgacaccgttaccgataaatacgtcatccggcgtgattcctgtaattcctttactggtctcatagtcacagattgcctgtcttgcttgtggcattcctttgaagtcacagtagccgacaccatcttgcatgtgttccatcagtgcattcttgatgctgtcaggcaggccaaagccaaaggttgcaggatttccggtatttaattttaatacatcgatgccctgtttctggcgtttcatggcttctacgaataatggaccacggatatcagagtgtactggtttcatgcgctcggcgcgtaatattggtttcataattttattccccgctttgtatcttatattttatctttattccaataaaaccccaaattcatattggaataattgtttcgtcgatataatgatacgcccgtggggatagataatccaatatctatagtgttataataattataagagtttgactatggctgtcgttggcaaaggggatgcaggtgatagcaaaatatgaggggtttagtgtatgtttacatggaaaaaatatgtttatgaagtatataaagaaagaagttttaccaaagcggcacagaatctgtacatcagtcagccgtctttgagtgcaaggatcaaaaagattgaagagattatcggggaaccgttatttgacagaagtacaacaccgctccagcttacagaggttggaaaagtatatatcgaggcagcggaggagattacccagatcgaacagcgggtggagaattacatcaatgacctggcgggtctgaagacaggaaatcttgctgtaggagcaagtacgctgttcgccgcatatgtggtaccgtctctgatcaccaagttcaatcagaaattcccggatgtacatattcagctgatcgaggggaatacagccgagctggaagaaatgctgggcagtaatgcgctggattttgtcattgataattatcactatgacagtattctatataataaagaattatattgcgaagaaaatatattacttgcggttccgaaacatttttctgtgaatgaggaactgaaagagtatcagctttcttatgagaatatcaagagcaaaaagtatctgagccggaaatatccggcagttccgttagagagatttgcgaatcttccgtttattatgctgacccagggaaatgataccagaaccagaggagacaggctgtgccgaaacgtcggatttaagcccaatatcgtgctggaattcaaccagcagtcgacagcatatatggcttcgtctacgcagcttggagcaacattcatcagtgatatcctggtaagccagctcccgacatttgaaaacctggtgtattacaaattagatggagaagaagcgaagagaaaagtcttcttttactacaaaacacacaagtacaaaacacgtgtaatggaagaatttatcagaatgatgcatgaacaaatttaaaaaaaatgacaatatataaaaattaattgaaatgtaacataacttcagagaatagtaaaaaaattatgctataattatcatacattagataaatcgaatatcggaaagtaaatttcctgccagataataaaaagggggcttttgatatgacagagaatttaatcaaagatgtaaagaagatccagcaggcacttattaataaagaatctgttggggacgagtttgaagagaagatggaagccatacataaattagaagaagttgcggattatctgaaggatgcacttggaagaggcattgaattctaaaatggatataaaagcattgatattcgacatggatggtctgctgtttgattccgaaagaattgtacagcgttcatgggagatcgctggtaatgaactgggaatccaacatatgggggaagttatctatcatacacttggaatgaaccgcacaggtcggaatgaatatttccggaaatatatcagggaagattttccgttcgaagagtttggagaactgacacgggataacttctggaaaatcgtggataaagaaggtcttcctttgaaaagcggtgcaaaagaactgctggcatacggaaaagcacaggggtataagatggcggtagcgacatcttcgagcagagagtatgccatgaggaatctgatccgaaccggaatagatgcatattttgacagtgtgatctgcggagatatggtaaagaaagccaagccggatccggagatatatcagaaagcaagtgtaagtatgggaatgcagccggaaaactgtatggcttttgaagacgctccgggtggaatcctgtcagcacatcaggccggaatgcgtgtgattatggttccggatcttgtacagccgacggaggagatacggaaacttacgtatcgggtttgtgattcgttagcggatgtaatagagatatggaattgagttattaacagatttattctttacagaataacaaaaaaggactaagatgcttttataaaataatttataaaagaggtctgatatggcaggacgaaatgaaaaaaagaatattacaaaatctaaaattgtaaactatatcatcaataataaaattacatcaaaagcagaactggcgcagaatctgagcttgagtatgccgacggtgctttctaatgtaaatgaactgattgagcggaatatggtcatcgagataggagaatatgaatctaccggcgggcgtaaagcaaagcggatagggattaatccggcatataagtatgcagttggtgtagtgattacagcaaatcatctgggaattgtgttgctgaatatgcagtatgaaatagaaaaaacagtccggatgcgattaaaattttcaacagaaacatcttattgcttagaagtagcagaacaggtggaaaactttctgaaagatgtagaagaccgggaaaaaatattaggaattggaatttcaatccctggtattattgatcaggagaatagactggtcatgaaatctcacacactgcaagtggataatttcagcctgagttttctggaacaggcattttcttatccggtatattttgcaaatgatgcaaatgctgcaatgatggcagaagatctgcatgagtatcaggatgcggtgtatctttcgctcaacaatacattaggtggtgcattctctattaatgggaaactcgtaactggtcagaatcagaaagcaggagaattcggacatataatcctggtgccgggaggaaagaaatgttattgtggaaaagcaggatgcgcagatgcctattgtgcagccagtgcattgactgatgaagagcaggaaatgacactggaacaatttatgaaaaaagtggaacagaaaaatacaaaagctgtggaaaaatggaatcagtatctggataatctggctattctgatttccaatctgcggatggcatacgacacagatatcatacttggcggagaagttgggggctatttatcagagtatatgataccgctgggggaaaaagtgatggcgtataatggttttgaacacgatgtgcgctatttaaaaaattgttcttataagagagaggcatcagctgtcggagcggcaaaacatttcctctctgaatatatacagcatttatagaacagatatgttgtataaaaataaataagaataaaaaactgaggtgaaattcaaggtttgtaatgattgcagactttgaatatttacctctttttttattgtcgtgcgttcggaagaagttgccggtgacaggtgttgtagataccataatatgcaagagaagttgcaaggtttagagatatcaatgtctgcttattatttgagttgtaaaaagatattggtaaatatgtataaaagaagtcgataaaacttgtgcaacaagcagaaataagcattcatatattgacaaaatagaatcgatgtacaataatgtaattactttaataaaacatttaataaaagataaaataaaagattaaaggaggaaaacattatgttacagcaggtaatgacaaaaccaggagagattattttcaaagaagtatcagttccggaggtaaaagatgatcaggtattagtaaagattatgaatattggtatttgtggttcagatattcatgtatatcacggaaagcatccatttacatcatatccggtaacacagggacatgaagtatccggtgaagttgtaaaaattggaaaagatgttacagcatttcatgaagggcagaaagtaacaattgagccacaggtatattgtggaaaatgttatccatgcagacacggaaaatataacttatgtgaggaattaaaagttatgggattccagacaaccggaacagcatcagagtatttcgcagtagatgcatcgaaagtaacgccgatcccagaagaaatgtcatatgaggaaggtgcaatgatcgaaccgctggctgttgcagttcatggagtaaagcaggttggtgacgtgaaaggaatgaacattgctgtacttggggcaggaccgatcggtaatcttgtagcacaggcagcgaagggaatgggagcagcaaaagttatgattactgacgtcagtgacctccgtctggataaagcaaaagaatgtggaattgatgtctgtgtgaatacaaaagaaaaagattttggtgaggcaatgattgaagcatttggaccggataaagccgatgtgatttacgattgtgcaggaaataatattacaatgggacaggcaatcaagtatgcaagaaaaggaagtattatcgtgttagttgcagtgtttgcagggatggcagagattgatcttgcggtggcaaatgatcatgaactggatatcaagagtacgatgatgtaccgacatgatgactatgttgacggaatcagacttgtaaatgaagaaaaagttcatttaagaccactgatctcaaaaacatttgcattccaggattatctgaaagcctatcagtatattgatgataaccgggaaacaacgatgaaagtaatcattaatgtacaggaataaaaattagatcaggagagaatagaagttttatcataaactctgataaggaggaaccatgggaaacgagtgtaagaatgggaaagtgccattgatcagtaaaattgcgtatggatttggcgatgtcggatgcaatttcagctggatgtttgtaagtaattttttgatgatattttatacagatgtgtttggaatcagtatggcggctgtttcagcgttgatgttattttcaagattttgggatgcgattaacgatccgatcgtcggtggtctgacggataagacaaaaacgcgatggggacgttatcgtccatggctgcttgttgcggcacctattacagccgtgcttttaatgttgacattctgggcacatccggattggtcagatacggcaaagattatttatatggttattacatattgtctgcttgtactgggatatacatgtgtaaatattccgtatggaacactttgcggtgcaatgacacaggatattgatgaacgggcaaaaatcaatacgtcacgttcagttgcagctatgatcgcaatcggaattattaatattattacggtccctttgattggaaagctgggaagtcagagtgcaaagagtggatatttatttgtagcgattatctatggttgcatatttgcagcgtgtcatttcttctgctttgcgaagacgaaggagcaggtgacaattccggaaaaagaaaaaatatcaattaaagtacagttaaaagctgtgatgcagaataagccgtatatacttgctttgatcggacaagttttattcggatttacattatatggaagaaatgctgacattttatattattttacatatgtagaaggaaatgcatcttattataccacttattctatgtgcattatcattccttccattatcggtgctgcatgttttcagccagtatttcgaaaacttaataataaagggagaacagcttcgatatttgcctttttaacaggtatttcaatgttggcaatgtacttctttaacgtaaaagattcggcagctgtattctatattctggcaggtgttacacagttctttttctctggatttaatacagcaatttatgcgatcattccagactgtgtggaatacggagaatggaaaacaggacttcgaaacgatggattccagtatgcatttgtctctcttggaaataagataggaatggcaattggtacagcaatgcttgcggcattacttggaaaatatggatacgtagcaaatcagacacaaaatgatacggttatcagtattatgaaacatgcatttacaaccatcccaggcattctgtggattgttacggctgtagtattattcttctaccggttaaataaaaaacggtataatgaaattgttgaggatctgaagcagggaaaaagaggctgaattccggcaattccacagaggaaagatgtagaggagttttatctgactcattaaatgatagtgaagaaaaaagtcacagaacagagcaaagagaggccatctgtttctgtgacttttgtctcaccgacggaatctgaacaggaaagacttcccctgttttatggaggcccgggtgatcagttctttaaacattaaactgcttcccatcttccagaagccccacaaggcagcaccaacccagagtgcgtaaccggaagcccaatctcctgtgaatccacatgtccgttccatttcttaagctccgttccaagcatataagtcagaacagccggtgccagtccggttgtgtaagagttgaccaggaagaataatgggtcatccgacagaatctgtgtacacagtttgatcagcggatgaattgcatcttcgatcttccaaatttcacctttaggtccacgtccgtatgacggaggatccatgatgatggcatcatagtgattgccgcggcggatctcacgttctacgaattttacacagtcatcaaccagccagcggatcggtctgtcagatagtccggaagaagctgcattctcttttgcccacgcaaccatacctttggatgcatctacatgtgtcacacttgctccggctgccgctgctgcgagagtagcaccacctgtgtaagcaaaaaggttcagcactttgaccggtcttccggcatttctgatcttttcagagaaccagtcccagtttgttgcctgttccggaaaaagaccggtatgtttaaaactaaaaggcttcaggttaaatgtaagctctttataatgaatctgccactgttccgggaggctgaagaattcccattctccgccgcctttcttactgcggtgatagtgaccgttcatatgtttccagccgcgttccgtcttcggagtatcccaaattacctgagggtccggacggaccagagtatattttccccaacgctctaatttttcacctttactgcaatctattacttcataatctttccattgatctgcaatccacatagaattataatcctctttcttttttaataatataagctctatttatttcccgttttataatatgtaatgagaacatatccaggaaaagatttccggacagtcctgtagaggaattatagcatgaaaaaaccagaaattcaatttgaaagcattcatagctctccaacatacgaaaaatctgactttacatttctaaacaattcctgcatacactttacatacatttaacaatcaatagatttcggatttaacatacgccatttatgatagctattgtcaggaaggacaaagacaaaataaatcatgaatgaaaaatcaagaatctaaggagagtatgattatgaaattgaaaaagtttattgcaattttatccgtagcaacaatgacagcaggacttgcagttggatgtggaagttcatcagacagtggctcatcagacagcagttcagcagatagtaagagcagcgactgggattcttcaaatgatatcaccatcgtttcaagagaagatggttcaggaacaagaggagcattcattgaacttttcgggattgaagaaaagaaagacggcgaaaaagttgatatgacaacagatgatgcacagatcacgaacagcacatctgtaatgcttacaacagtagccggagatgattatgcaatcggttatgtatcactcggatcattaaatgatacagtaaaagctttaaagattgacggagaagaagctacagagcagaacatcaaagatggaaaatataaaatctgcagaccatttaacattgcaacaaagaaaggtgcagataatgaagtggcaaaagacttcatcgcttatatcatgagcaaagaaggacagcaggtgatttcagacaacggatatatcggagacgattcagcagaagcttatgcgggaagcaagccatccgggaaagctgttgtcggcggatcctcttccgtatcaccggttatggaaaaactgatcgaggcatataagaaagttaatacaggagcagagattgagcttcagactacagattctacaacaggtatgacatcagcaatcgacggaagttatgatatcggaatggcatcacgtgaattacaggatgaagaaaaagataaactggacagccaggtaattgctacagacggtattgcagttattgtaaataaaaacaatacaacagatgaactcagcagtgatcaggtaaagacaatttacactggtgatgcaaccacatgggatgaggcagtgaaataatatgaaatcaaaagcatggacagagaaattcatgcagggagtgtttgcagttgccgcctgtgcttcagtactggcggttgcactcatttgtattttcttgtttgcaaatggaattcctgcaatgagtaaaatcggattcggggaattcctgaccggtgaattatggaaaccaaagaatgacatatacggaatctttccgatgatcattggaagtctgtatgtaacggctggcgcaattatcatcggtgtaccgattggaatcctgacagcagtattcatggcattctactgtccgaaagtagtctataaaccactgaagatggcaacagaacttctggcaggaatcccatccgttgtctatggatttttcggtcttgtagttctcgtaccgtgggtaagggaaatcggaagaacacttcatcaggggggaaacggaagcagtatgatcacagcatccattcttctgggaatgatgatcttaccaacgatcatcggacttacggaatctgcgcttagagcagttcctacacagtactatgaaggtgcggtagcacttggcggaacacacgaaagagcaatctttactgttgttttaccggcagccaaatctggagtagtggcagctattgttcttggaatcgggcgtgcgatcggagagacgatggcagtgatcatggtggctggtaatcagccgagaatgccggaaggaatcttcagaggagtcagaacactgacagccaatatcgtaattgagatgggatatgcatccggacttcacagagaagcactgattgcaaccggcgtagttctcttcgtatttatccttcttctgaacttctgtgtagcacttttgaagagggggaagaattatgagtagtaatgaagtaacatggaaagataagttaaaagcatataccagaactcctggatcactgatcgtaatgcttcttgtcatgctttctgcaattatgacatttgcagtacttatatttctgatcgtatatgtgctggcgcatggtgttccgtatttgaaaccatccattttctcacttcattatacatcggaaaatgcctcgctgatgccggcattgatcaacacagtgatcatgaccctgttatcgcttctgattgcagttccatttgggatctttgcagcaatcttccttgtggaatatgcaaaacgaggtaataaatttgtagaagtgatcagacttacaacagagacgcttcagggaattccatctatcgtatatggactgtttggtatgctgttctttgtaaatacctgtaaatggggattttcgattctggcaggagcgtttactcttgcgatcatggtattaccgctgatcatgagaagtacagaagaagcattgaaatccgtaccggattcttacagggaaggaagcttcggacttggcgcaggaaaattgcgtacagtattccggatcgtgcttccatcagcaatacctggaatccttgccggtgtgatcctggcgatcggacgaatcgtcggagagacagcagcactgatctatacagcaggtactgttgcgaaggtgcctgagaatgtattgagttcaggaagaactctggcagtgcatatgtataatctgtcaagtgaaggtctttatatgaatcaggcttatgcaacggctgtagtactgttggtgctggtagttgtgattaataccctgtctggcatgattgccaaacggattacaaaagcatagcagctgtgcagagataaatcagaaaaaacaggaaggaatcatacatgagtaaaataagtatcaagaacatggaacttcattacggtgatttccatgctctgaaaaatgtgaatcttgagatagaagcgaataagatcacagcattcatcggaccatccggatgtggaaagtctacattattgaaatccatcaaccggatgaatgatctggtagaaggatgcaggatcgatggccagattcttctggacggacaggatattttccatgatattgatgtgaatctgcttagaaaaagagtgggaatggtattccagaaaccgaatccatttccaatgagcatttatgacaatgttgcatatggacccagaacccacggaatccgttcgaaagcaaaactggatgacctggtagaaaaatccttaagagacgcggctatttggaatgaatgtaaagacagattaaagaccagcgcacttggaatgtcaggcggccagcagcagagactttgtattgcaagagcactggcggtgcagccagaagttctccttatggatgaaccgacatcggcactggatcctatctcgacatctaagatagaagaccttgcgatggaattgaaaaaagattatactatcgttatggtaacacataatatgcagcaggcggtacgtgtgtcagataatacggcattcttcctgttgggagaagtcattgaatataatgaaacagaaaaattattttcgattccggcagataagagaacggaagattatatcacagggaggtttggctaggatatgcgtaatcggtttgatcagcagctggagttacttaatgagcagcttacacgtatgggagagttatgtgaagttgcaatcggaaaagcaacaacagcattaaaagaaggaagtatggaacaggcacagaaggtgattgaggcagatgaagagatcgatcaggcagagacagatattgaaagactctgtttgaaactgcttcttcagcagcagcctgtggcaagagatttaagacagatttcagcggcactgaaaatgatcacagatatggaacgtatcggcgatcaggcttcggatattgcagagatcatcattacagaggagaagtcggaagcgcaggacattccaaagatcatcaaaatgtccgaagcagccggaaagatggtgcgtgacagcgtcaatgcatatgtggaaaaagaccttgaactttccagaaaagttatacaagatgatgacgttgtggatgaactttttgaagaagtgaagacaacactaattggctttattgcggaaaataaaggagcacagggcgtagaggcaattgacctgatcatggttgcaaaatatctggaacgtatcgcagatcatgcaacgaatatcgcagagtgggtggaattctctatcacaggaatccacaatgcttctgtagtataaagaaggagaaagaggaatgattttttgtgtagaagatgacagtaacatacgggaactggtggtgtataccctggagagtacagggtttcaggcgcgcggattcgaagatggaagttcattccttgaagctctggcattagagacgccagagcttgttttgcttgatattatgcttccgggagaagacggaatggagcttcttagaaagttaaaagcatctaagaaaacgagagagattccggtcatcatggttacagccaagggagcagaatatgataaagtaaaaggactggatgccggtgcggatgattatgttacaaaaccatttggcatgatggaactgatctcacgtatcaaggctgtattaagacgcagcgcgaagggaagtgtatccggtgaggatacatttgagattggagaaatccggctggatccgaagaagcatgaagtgaccgttcacggagaagtagtgaacctgacactgaaagagtatgaattactgaaacgcctgatgaaaaattcaaatattgtccttacaagagaccagcttctggaagatatctggggatatgatttcgacggggagacgagaaccgtggatgtgcatgtcagaactttaagacagaaacttggagatgcaggcgaacagattgagacggtccgcggagtcggataccgtatgagcaggtaataatatgaaacaaagtatgagaaaaaagatccaaagcagcatgattcttgtcattaccctgacgttgatcatagcttatgcgatcaccacgctggttgtataccgtcagacgattcatatcatggaaggagaggtaagacaggaagcggactatattaacgtagcactcgatactttcggggagtcttatctgaagacgatggataacgtgcatgcggacacaagaattaccctgatcgatccggatggtagggtgaaatatgactcaaaagaagatgatgtaacccttcagaatcacaagaaccggccggaagtaaaagctgcgctgaaaaacggaagtggtcaggatatccgtgaatcgaatacattgaataaagagatgttctattatgcagtgaaattggaaaatggagatgtcctgcgagtatcaaagacggtagatactgcattccggacagcaatgaaggtattcccggcgatggggctgatcgcattgatcatgctggcatttgcgggaatccttgtaaaatggcaggtaacgagattgatccgcccgatcaacagactggatcttgagaatccattggagaatgacgtgtacgaagaattaacaccgcttttacagagtatcgacaggcagaataaagaaaaagatgcggttgccaatatgagaaaagaattttcggcaaatgtatcccacgaactgaagacaccgcttacatcaatttcgggttatgcagaaatcatgaaaagcggactggtaaaaccggaagatatgaaaggttttgcggaaagaatttataatgaagcaaggcgtctgatcacgttggtagaagatatcatcaagttatcaaaactggatgagggcgatgtgcagctggaaaaagaagacgtagatctctataagctgacgagggagattctgaccagactttcaccacaggcagcgaagcggaaagtgcatgtagaggtgacgggagaaccggtagagtatgtgggtatccgtcagatcctggatgagatgatctacaatatctgtgaaaatgcgatcaagtataacaaagaaggtggaaaattaaccgtctgggtaggcaataccctgcagggaaagaaggtctgcgttacggataccggaatcggaatcccggagaatgagacggaccgtatttttgaacgtttttatcgtgtagacaaaagccattctaaagaaacaggtggaacaggtcttggactgtctatcgtaaagcatggagcaatgcttcatggggcgaagatccatgtggacagtaaactgggtgaaggtacgaagatagaacttatattttaaaaaataacagaagtttttaagaaatcttaagaattatttgcgtatgtctttaagaaacgaagcctacaatagcatcaagaaaaagatgaggaggcttattgttatggacaagatcagtattatcatcccgtgcttcaatgaagaagaagcattgccaatttattatgcagaaatgaaaaaaatcatggacagcatgaaaaaacagaccagttttgaactgctatttgtagatgacgggtcatccgatagaacatatgagattatgaaagacttacacagaaaggacggaagatgtcagtatctatccttttcaagaaactttggaaaagaagctgcgatctatgcaggacttcagaatgcaggcggcaattatgctgcgatcatggatgtggatcttcaagatccgccgtcacttctgccggaaatgtaccggatattgaaggaagaaccgtatgacagcgtagctaccagacgttcaacgagaaagggagaaccgaagattcgttcattcctatctaaagagttttacaacgtgattaataagatttccaggacagagattgtaagcggtgccagagattaccgcctgatgaaccgtaagatgatagatgcagtgctggaaatgagtgaatataaccgcttttccaaaggaatcttcggttgggtaggattccgcaccaaatggctggaatatgagaatatcgaaagatctgccggagaaacaaaatggaatgtaaagaaattattcatttactcgttggagggaatcacgggattttctgtagttccgctgtcgattgcagcgtatatgggagttttgttctgcggattatcattcctgatgattgttgcgatcgtagtccgtacattaatctggggagatccggtggccggatggccatcgatggtttgtatcttgtttggcgtgggtggtgtacagcttctgtgtaccggaattctgggacagtatcttgccaagacatacctggaagtaaagaaccggcctgtatacttgttaaaggattccagtaaagaagaacagcggatcatgatgatgccattatcacaaaatctgcggaggaagagttatggacaaggttaagagatacattccttacctgctgcttacaggcttaacactctttttttgccggatgtttgtgggcagatatggaatctttggagcaaaggtagactggctcagtcagcatagtgtgctgccggattatttccggcagcagttttatgcaaccggaaagttatttcccgaatttgcggcgaatctgggcggcggccagaatatttatcattttgcttattacggactatatagtccgttgattctgccgtcatatctgcttccgtttgtgaaaatgtcggattacatcatggcggtcagcataacaggtctgattgcttcggtactgctgttttattactggctgaaaagcagaaagacggatgcaggcactgcttttatcctgtcactgatgttcctgctggcaggaccgatgatcggtcagtacagcgggcagatcatgtttgtggattatatgccgttcttatgtctggcactcataggtgtggaccggtattttgagcaagaaaaaagtggcctttttacaatcagtgtatttctgatgatcatgaccagtttttatttcagtattggtggaatgctggcattggttctttatggcctgcaccggtattttgaacaaagagaagaatgcagggttacggtcagcacttttttgatagatggattgtgtttcgtgcgaccaatgcttctggcagtacttatgggcagtttctttctggtaccaacggcacttgcgctgacaggagggagaagtaaaggacagaatatatcgcttgcttcctttattattccgcagatcacagtagaacgatttgcttacagtatctatggaatcggacttacgacactggtgatcacagttctgctcacgggattgttgtatcggaaagtatatgaaaaggtactcacatatggatgtgtgatcgtacttgcgattccggtatttgcttacttattgaatggcggactatatatcagggataaagtctttattccgtttctgccattgctttgttatctgatttccatttatctggaaaagtgcagaaaaagagaactgtcttttattgcaggaatcgttccatatatcatcacaacgatattcgtttatatagcaaggaatcagtttgtttcgaaaggcatagggaaaagtatatggaaagtcctgcttgcagaaagtattctgtttctgatctgttacgtgctgtattgtgtgatgaagagataccacaaagaggcgaaagagattctgatgctggctctgccgtcggtgatatgtctggcagtcacgatgaacactttttatcagatgaatccggacagatatgtcagccgcaaattgtaccgggatgttgtgggagaacagaatagacaggcggtaaaagaagcattgaaagatgatgatggatattaccgtacagaacagatgggaagtgatgatgaaaatgcagcagatttaaaccggatctgggatgtggatcagaatattacttccatctattcatcggcatacaatccggactatcagacattccgtcagaagacatttagactggaagaaccgttccgcaatgggatgatgcagtctgtttcgaaaaatccggtatttcaacggatgatgggagtgcggtatatcgtatcagattcggatgtgccaggatatactctggttaagaaatgcggcacaaccggtatatatcagaataaagacgcagcaccggtcatgtatgcaacagatcgtgtgatgacggaagaggaatataagaaacttgcatttccatataatcagacggtatttttggaatatgcagttgttggagaacatacggaatcttcagaccagaacataatgacagcttataagcctgttagcatgaaaaaggctgatactcaagatggttggagaattcatacaaagaagatgaaaaagacaacattttccatccaacagctacagcagaaaataacgcaacaaggacagtgtggcatggaaacggcacagggaaaaaaacagaagaatcgggttctttttctgaaattacgggtagacaacgcacatccgaataaggatgtagcagtctggatcaacggaatccgtaacaaattaagcgcgaaagatcatgtatattataatgaaaataagatatttatctatgcagtgccgttaaaggatggagaagataatatttctgtgacatttggcaaagggaaatatcgattaaggcatgtacaggcatatctcggcagtctgccggaacggtcagaattgttatatcagtcagaaatccaggtggacaaaaagcagacagaagataacgtgatccaggggacaattcgtgtaaagaaagatggatggtttattacgtccatcccttatgataaacattttaagatttatattgacggaaaagaaacagagatacaaaaagtaaatacggcatttctggggtgtaagatcgaaagtggtaaccatgaagtgaagatcatctatcatgcaccgggaacaacaacaggaaaagtattgtcactgattggaatagccggattcgtgttagtgcttgtacgggaaaaaagaaaacaaaaaaatacaaggtagtatacgttgatatctatatacagcagcagatttgcggaaaattgctgctgtatatttgcattttataaaaaagaagagtatgatgttaaatgttttttatacttgaataaggaagaaaaatggaaacagacaacagggtaagacgaggatgagaacatgaagatcgtagaaacatatggaaattatatagaaaaatggagtaatgaggatccggacagagccagatggcttttaaagaccggatggaaggcacagaatctgaagttccggtttgccccggacaaaagactgatgccggcagaccggtatcttgccagacttatgatggatacgatgcttatgcctttggaaaaaccacaggagagtgcaatagtcagcatctttactccttgcgaactgttgcaggaggcaggaatccatccgtataatgtggaaggattttcctgttatctttctgcatcaaaggcagaaagagcatttttacagcaggcagaaaatacaggaatttctgagacactttgcagttatcataagacatttatcggggcggcacagaagaaagtgcttccgaaaccaaagtgcattgtgtacacgaacctgacctgtgatgcaaaccttctgacgtttaaaaagttggcgaaaatgtatgaagtgccaatctttgcaattgatgtcccgatgcagcagaatgaggacaatgtacagtatgtgtcagaccagcttcggaagctgaaagagtttatagaagaatgtacgggtaaaaagattacagacgaggcattaacagaacggctgagaagaagcaaacggacactggagaagtttgcacagtatgagaaagaaagtgcagataaatatgtttcggcagatctggttacgcctctttatgtgggaatgaccaacaatcttttgcttggcacaaaagaagaagaggattatgtggaccgccttttgaaagacgtaaagaatgctcctgcaaaaaaaggaaagaaaatctactggatgcatacgatcccattctggtctgatgcggtgaagaacgagctatgctttcaggaaaaagcacagattgtcggctgtgaactgagtcacgtctgtgagccggattttgatccggagaagccttatgaggcaatggcgagacgtatggtatatcatgcattaaatggaagcgcgatcagaagaatcgaagcaggaatccgtcatgcaaaggagacaggagcagacggtgctgtttggttcggacactggggatgtaagcatacccttggagcagcacagcttgccaagcgcaaattcgaagaacagggaatcccgcttctgatcctggacggcgatggatgcgacagaagtcatggcggagaagggcagacatctaccagactcggggcattcttagagatgctgaatacagaaacggatgaaaatacggacagacaggaggaatcgcacgatgaataaaacatattatgtctgtaaatataccccaatcgaactcttagaagcgttcggcggggaatgtcagaacctgaatgagatgccgcagggctttgaccatgcggatcagatagcgcatccgaatatctgtggattcggcaaggcccttctggaagctgttatgagtggaaaagtaaaggaactggtgttggtcaactgctgtgatacgattcggagtgtgtatgatattctggaagacagtgggaaactggatttcttatatatgattgatgtacttcactgtgatgcagaatgcagcagggaacgtacagcagtgcagttaaaaggtcttgcgaaagcatatggagaatataaaggtaccagatttgatgaagagaagttccggcaggcattcaagaagccggaacgcatcgtaaagccgcatatcagtgtgctgggtgcacgtatgggaaatgaactttttgatatggtacagaaaagtatgccatatccggtggaaaatgatacctgtgtcaataaccgttcggtgggcgaggcagagccgccaaaagatctggaattcgatgagctgatggcatggtatgcgaaagaacttctcggacagattccatgtatgcgaatgatggatcacagcggaagaaagagattatataacgatcccggattaaaaggaatcatttatcatactgtgaaattctgcgatttttacagttttgaatatgcacagatcaagcagaatgtgaccgtgccgcttctgaagatcgaatcggattatacggtgcagagcagcgggcagcttctgacaagattagaagcatttgcagagagcatgaatatggaacaactggaagggaaggaactgaagatgggaaaaggatattttgccggaatagacagcggatcaacaagtacagatgtagtaattcttgataaagaccaaaatatcgtgacagggatcatcctgccgacaggtgcgggagcagcaatcggagcagagcgtgcactggaagaagcgctgaaggatgcgggacttcaaagagaagacatcgatgcaatggttacaaccggatacggaagaacggccatttctgatggagataagagtattacagagattacctgtcatgcaagaggggcacatttcctgaacccggaagtccgtactgttattgatatcggaggtcaggacagcaaggtcatccgtctggatgagaacggggctgtagccaatttcgttatgaatgataaatgtgctgcaggaacaggaagattcctggaaatgatggcaagaacgatggaaatgagcctggatgatatgggaaaggcaggtctgtcatataaggaagacattacgatctccagtatgtgtaccgtatttgcagaatccgaagtcgtatcactgattgcacagaataaggctactgatgatatcgtacacggactgaataaagccgttgcatccaagacggcagcactggcaaaacgtgtcggcggcgaggaacgttatatgatgaccggaggcgtgtccaagaaccagggattggtgaagacactggaagagaagcttggtacaacattggtgatcagtgataaggcacagctttgcggagcaatgggagcagcattgtttgcaaaggatatggttatagaataaagaatcttagcaagatcttagcgaaagaaaaatagatgggattagaattttgtgataatataatgaatatattgaatagtcagaaaactgtagaaaaattaacacagaaaggcatgaatatttattgaaattatattggacaaaattaatggagaaattaaaagagtcattggaagcggtggtgccgatcattgtgatcgtattgattttaagctttacgatcgcaccggtgccgccgggcattctgatggcttttattattggagcaatccttctgatagtaggaatgatgttctttacactgggtgcagagatgtcgatgacaccgatgggagagaggatcggaacccggatcgcacagtcaaaaaggctgccggtgatcatcgggttgtgttttgtacttggatttatcatcacaatatcggaaccggatctgcaggtgctggccgggcaggtaccttcggtatcaaatagcacactgattctggcggttgccgtgggagtcggaatctttctggtggccgctgtattgcgtatgttattttcaaaaccgctgtcctatatgctgttgatcttttatccggtggtgtttatcctgacattttttgtatcgaaggattttctggcgattgcatttgattcgggcggcgtgacgaccggaccgatgacggtgccgtttatcatggcactgggaatcggattctctgcggtacgtagtgataaatacgcagagacagacagcttcggtctggtatcgttgtgttcgatcggcccggtgctggcggtattgcttcttggtattatctatcatccacagggcggcagctattccgagaatgtaataccggatgcagagacatctgtagcattgtggaaattattcgagtccggaatcccacattatatgaaggaaatcggtggctcactgcttccgatcattctgttcttcgcattctttcaggtggtatccctgaaattaaaaaagaaaacgctgatcaaaattttggtcggtatcctgtatacatatattggactggtattattcctgacaggggtaaatgtaggatttatgccggtaggtaattatctgggacaggtgatcgcagggcttccttaccgctgggtgatcatcccgatcggtatgctgatcggttactttatcgtaaaggcagagccggcggtatatgtgctgatggagcaggtagaagagctgacctccggagcaataccgggaaaagcaatgggatatagcctgtcgcttggcgttgcattttcccttggattggcgatgatacgtgtgctgacaggtatctcgattttgtggtttctggttccgggatatgcactggcgttggttctgacgatatctgtgccaaagatatttacggcgatcgcatttgactccggcggtgttgcatccggaccgatgacggcaaccttcttacttccgtttgcacagggagcctgtgaagccgttggcggaaatgtagtaaccgatgcattcggagtcgtggcaatggtagcaatgacaccgcttatcacgatacagatcctgggtgtggtgtatcagtatcaggagcgtaagaaggataaagaagagatgctcgcgcagcctgttaaggtattaccgctggaggcatatggggatgcggatattatagagctgtaagggagaatttatgagtaaggtatatatgatggtgaccatcacgaacagaaacaaacgaaaagatttccgaacattttttaaagaacacggtcttcccgtattcctggaaacgaccgggagagggacggcacagagtgaagtactggattatttcggcctggaagaatcggaaaagttgttatttcttgcaatcgttacaggagagacctggaaaaagctgcgccggggactgatcacgaagatgctgatcgatgtaccagggacaggggtatcattcattgtgccgcttagcagcgtgggcggaagaaagacactgcagtttcttgtaaatgaacaggaatttgaaaaagaggaggagacagcgatgaaagatacagattatgaacttctggtagcaatcgcgaatcagggatatatcgatacagtcatggatgcggcaagagcagcaaaagccggcggagggactgtgatccatgcaaaaggaactgggatggagcttgcaaagaaatatctcggggtgtcactggtggaagaaaaagaagtcatactgattgtaacgaagagcagagagaagaatcagatcatgaaagcaatcatggagcaggccggtctcgacagcaaagaacgtacgattgtgttctcgctgccggtgaccagtgttgcggggatacgaatgctggaggaagatattcaggatgatttgttataggtttaagcagtatattttgtgaaagaaaaaagaaa

SEQ ID NO: 2803 - DNA, 315 bp, Unknown
  gut microbiota DNA sequence
aagacacaaaaataaccgccccagcctcgcaaactgaacggttatttttaatcaattaagtatgtggactaaccgtctatcggtagcactctttttcgataatcatattatcacgcatctgtggaaatgtcaaaaagttcttaccttatttcaaatagtcctggcatgcctattttctcagctattatatttgcttttgaacttgtgatgtttgataacaattttgttggcaaacttttcgatttttgcaataactctcccgtactcatttctaaattgaaagccctttttattgttaccaatccttttactcct

SEQ ID NO: 2804 - DNA, 10320 bp, Unknown
  gut microbiota DNA sequence
ctcaatgttagatttcatggtaatgttcctcctttagaggattataacacagataatcgaaaaagaattatgcagaagaacgctttccacgagatttggacatggatttctcgtaaagttcttggagggatacgcgttggtggttgtaatagagttctaaaaattccatttgatggttgcattcagggtatttcaaagggtcgtaaccaaaggaagaaaggatagcagttcgccattggttgaaacttcgatagatgcgacggcatctttattaaattcaaacacatcttcctttcttcggttaccttgtgtaataaccggatttaattttgctatcagttcataaccacctttttttgccgcctcgatatttgtcttttcagaataagccatatctccaatgactgattcaatctgtatcccagcagctttacttttttgtacaagttttggcagttctttgccatctattttttcgccgctggtgattgtggcagctgtgatgatccgttcttctgtcattgctatgtgtgttttatatccccaaaatgaagtatcggctgtcttatgaccagtttttgcatcttcatcctttgaagtttctaaatgttccatgtcatcagtgacagattcttctagtagatttaatttttcctgtacttttggataactgcaaatttcttcatttccttttacaacatcaataagctgtttacagtattttagttctttttctaaagaatcctctgtgtttttatcagaaaatttttctttcattgtttcatcaatctgatagatgctacggcgcagtttttttgattgttcctggagtacttgacggggagtcttttgattgtatcttgattttgtatgcgtagcatccacaataatggattttgacttaataattcctttttctaatgctaactgaactgttttggcaatcagcatatccaaaagattcatatcctttaaacgcagcttccgaaattttgtcaatgaacttggatttataacttcatcttctggagccatgtccaaaaaatatttaaaagacatatcgtatttagaacgttcaaccagatcaatatctgataaatcgtaaattgatttcaaaagaagatatttaaatattcggataggtggaactgcatttcctccgttatccagacaataattagcaagcaatgcatcataaataaagctaaaatcaaccaattcttttatctgccggagaagattatcttttgggattattaattcatatatttccatgtagagatttagcaccaatttctgctgttgttcgattataaaaacaccgcctatatttgatagatacattgtaccaaatatagaacggtataatctactttttcagtgccctcgaacgaggggcaggggagttgaataggcgtagactatttttgttgactattgtgcaaagaaaaagtttgtacgtttgatattctttaattcatctgaagaaatgtgaagagcatttttcaattcatcattaagcggtagcggattttcgctggcaatcactttcatggcgatactctgataaaagtacgtaatcgtggaaatcagaccgacaacgtgcatggaattaatgccgattgacggaagacgcaacgtcagaatgtcaaaaggcggctttgtatttacaaggataaaaaccgtacatgtatcgctgtaggtaatatcgccttcgtaaatataattcgcttcgtagtagttggatatgtcatcgacatcgtaatacatcgtagcagttaatgacaaattcttattttccagaactgccttctgcaagcagttcttttctccgttaaaccaataaagataaagtttgtcagaaaaataattctggtaccttgcaatttcggctgcgcttttatcggttgaagttatggggagcagagaggctatgtcgatattcagaatctgacaaatgtctaccagagtatcaatacttatgagaacctctcctttttcgtatttggaaatcgtggcaacgcttttgttcaattttttggagagatcacttaaggtcatgtgtttggtccggcgtcttgcccgaagctttttgccaagtgttgtgtaaaaatcgcaagaatccatattatccctccttgatgttttttgataatgttagttgataaaaactaaaaagtataaaaagattctaacatattctgataaaaaatgctactaggcaaaatttttgttagttttgaaaggtaaatttatttcatttttcttcaggtaataatattcataaagctgctttatgaaatctgctatctgctccatcagataatggttcttttgtgcctgttcattccagctgcatgcatgctctatattcccccgccaatgcttctgccggttgaatccctgattttctatcttccatctgtttcttcccgcatttactatttttctggcattgttttttgtgattgtaatgtctgcaatccatgcaaactctgttgtttcttttttttcatctggtttaatcttctttcctgtataatatgtcagatttacatctgtattctgaaacataatctgattctgatattctatttctgaacctatcttttctttttccggcaatgactgatattctttggctatggatgatgcacttccttctttataacggatgatataattccagccgttatctgtgcaggtctgtataactttctgactgacatacaacccatctgccgttataatgatcggaagtctcggaaactgtttcttaatcttttctgcaactctgataaatgctttactttcacagtcctgttttattttttttcactctgattgatatattcctcagaattctggatcgcttcagatgcgatactgcatacaaggttattccccagataaagttttacttcgagcacgcttctgtgatacttcgtaaattcatctgcttctccacggttatagcagcggctcaggtaatattcattctttttctgatatccctcatccagttctgtggcgtcaataatgatctgccaccttttcaacaccctggcatcatcaaatgtttttctacggatcatagaataagcaatatctttctgtattttttccagttcctctgggttcagtcttgccaaaaattcattctctataacaccatgaggaagatactccttcttttcttcactcatgaatgagtagagattttctacaactgcatcatcattaaatttcagtgtcatttcctgcatacttgaaattccgcttatgcatttgtagtacatggttccaagcataaccctcactggatattcaatataactttgatttcgcggatcattcacctcagcaaatttggcaaataactctgggtaatatttattttgaatcttattgtattcaacaactggattcttttccggtcttcttttggctctttcctgttctctgttcatttttcttcctttgcgacaaagttttttcttttattttattccatcgtaaaggaagatgctttaaattcaataaatttaatgcgaattatttttatctattttcatacaatttttgtaatatgaaaaaaatgtgtgaaaatagataaaaaataggaaaagtaatagacagatgctgcggtttctaaatagaattttcgtataatgaaaataatagtaaaaattattgtcgaatgaagaaactagataaatttgtgaatagattatcaatgtgcaataattattaatgaaaagagtactcataaaacgttataaagctgaatggaggcgaggagattatgtctaaggaagcaaaagtaggatacaagaagaatataggaaccattcttttgttatcttttgccggctcaattatttatggattgccatattttcgatcatattactatgatacgtatcaggcaatgtatcacttgactaatacgcagatgggacttttaggaagtgcctacggcgtgttgggtgtattttcttatattatcggtggagtattggccgataaaatcaaagcgaaaaaactgcttattttttcgatgattgcaactggtttgggtggattgcttcatttgtttgttaataatttctatgcattggtagtgatctatggattatggggtgttacatctcttttgactttctggcctgcgcttatgaagattgtcagaatccaggcaactgaggaggaacaaagccgtgcttatggaacctttgaaggtgggcgaggtgtattcaatgcggcacatcttgcagtggcaacagcgatttttggaatttttcagagaaaggcaatgccgactctcggaattaaaggaattatctggttctattcgttggcaccgttgattgtaggtattatctttattttcctgttgaaggagcctgagaccgttaaagaagacggaacttcaagcactgtttcatttaaagatattatcagagtgttaaagatgccggttatgtggttgattattatcatgatgtacacaagttatacttttaatatgtcatcatattattttactccttatgcaagtaatatcatcggagttacagctgtgatcgcagcaatcttaacggttatgtctcagtacatccgtccgtttgcggcaacacttggtggattttccggagataaattcggaagaagccatacaatgattgttggttatattttgatgatcgccggtgtggttatcatggacgttacaggcaaaatggcttcggatagcagaatgatattggttgtggcggcttgtgtgctggtatatgcaggtatgtttataaactttggtctgtacttctcgtttatttcagaaggtggtattccggtggaattaggaggagttgcaattggtatggcgtccacatttggatatttgccggaagttttgagttatacaatcgcaggtaaattgttagatacttatccgggatatcagggatatcacctgaatttcctgtatatgatcgcgatgggcgtgattggattaatcgttgcgattatctggacaaaaaagtatggaaagaaaaaagcagatgctacagaagcataataaaaaagaaggagggttaaattatggctaaagtagaatcaacagtaaaaagagtaatggcgcgagatgaatttccttacgagtgggatgtgatcgagaacgaatggattacaatgtctgatggctgccgcctttcggcgcgtgtctggcatcctaagacagataaaccggttcctacaatatttgagacacagccgtatcgtaagagagatggaatgcgtggaagagatgaaccgatgtatggtttctttgcaggtatgggatataacgtagttcgcgtagatatgcgtggagcaggagagtctgaccagtgtttctatgatgaatacctgaaacaggaacaggatgatgcggtagaatgcatcgaatggattgccgagcagccatggtgtgacggaaatgtcggaatgatgggaaaatcatggagtgggtttaactcattgcaggttgcggcaagacagccaaaaggattaagagcgatcatctgtgtaggatttgttgatgacagatatacacaggatattcattataaaggtggatgcctgttgaatgataacttctggtggggcaatattatgctggcatacatgtgccgcgcgattgattcggagatcaaaccggatacatggaaagaagagtctgttaaacgtttggagaaaatgccactttggccggctaactggatggaacatcagacaagagatgattactggaaacacggctctgtaagtgtgaattatgacgatattaaagttcctgtatttgcactggatggatgggctgattcttatacaaacagtgtattaactttgatggaaggattaagtgttccgagaaaagcactgatcggaccttgggcacatgtatttgctcatgacggaatgcctcagccggcaattgatttccttggtgaagctacaaaatggtgggataaatggctgaaaggtgttgataacgacacattagactgcccgatggtacaggtgtggttggaagacagcatggaaccagaaactgtacatccgcttagtgatggacgctgggttgcattggacggatggccgtcaaaagatgttgctatgaaaacactttctatgacatacggacatcttcaggatgaagcaaatacaatgaaagaaatcgtagatctttgcacacttccaaatcacggactcctggcaaatgagtggatgggagcaggtgttctcggggagtctccggcagacatgagagtagatgatggaatggcaatggtatttgattcggatatattagaggaagaagtagagattcttggatatccggaatttgaggtagagtttacctgcgataagccaaatgcatttatgtatgctcagctgagtgatatccatccggatggagctgcaacaagagtttcttatggacttatgaatctgacgcatttagaggggcatgataaggtggtataccttgaagaaggtaagacatataaagcaaaagtacagttggatgtgtgtggacataacttcccgaaaggacacagaatcagactttctattgcaaactcattctggccaatgatctggccatcaccggagcttgcaacattaaaactggatctgtctactgctaaatttgcattaccgatgttctcaggaaaagatgcggaaggtccgaatatggaagccagatgtgcgccgcttactccgatgacaacattatcacctggtcgtgtagaccgtacaattgagtatgatctgctcacggattcatggacatctattacaaacggtgttggtggagtgtttggagagggtatctatcgctttgatgatattggaacggtagtagaacataacctcaagagagaactgacgatgagcaacaaagatccgttgtcagccaaatatactattacgcagaagatgaagaacggccgtgatggatggctgacagattgtgatatcgttgttactcagactgctgataaagataacttctatattaccggacacatggatgcatcaattaatgatgaacatgtattccacagagattatgactacaaagtaaagagaaatggaatttaaaaaggggcgaggcgattgaaagaaaaaagtattacattctgggaacttgtgcttatgaatgtatctgccctttatggaatccgctggattgcaaaatcaacctcagacagttttggcctggggttgggagcaatcccgatgtggatcatatttatgctgatattctttgtgccgcaggcgctgatgtgtgcggaactggcaacagcatatcctacagatggaggtctgaatgactgggttaaaattgcattcggaacaaaatatggatttttagtatcctggatgcattggacggcacttattttctggtatgcatcttttctgacatttttctcaatcaattttacttacatgattgggaaaccagaacttgcagataacaaaatattagtattgattatgtcgttggttgttttctgggcgttgtcgtttgcgagtatgcgtggtatgaaatttggaaaatactttaccagtgtaggtgcgctgggttcggtggtaccgacggtgtgtctgattggtatggcaattctggcagtggtagtgttcaaaaaggcaccaagtgcatctgagtatacgatagcaacattgacccctaagctaaatatgaattcgctggttgcaatttcgggaattacatttgcgtatacaggagctgaatttacagcaaacttcgcttctgaaatgaaaaatcctcagaaagattatccaagagcaatcatgattgctgccggaacaatctgcgtattatatgtgattggttcggtatgtatgacaatgctgatgccgacgtcagaaatctttgcgtatacagggactttggatgcattagtaattgcctgcaatctcctggaagttcctcaattttttgttcagatcgtagcatttggaattactttgtcgatatttggagcggtagtgctgtatattgcacaaccgacaaagatgttgtttggatattctgaaccgggaatctttccggagaagattacgaagaaaaatgagcatgacattccggagaaggcgattttatttcaggcgatacttgtttctctgctgcttgcaggcgttgcagttttcccggcagttgaaacgatttacaatgtattaattactatgaccgcgttgacatcgttgtttccatatgttcttttatttgcggcatatattaaaattaaacggaaaaaggttgataaacctgggttgtatcagatgacaaaaaataaaaagtggggatgctttcttgggtatatggaattggtaatctgcgtgattgcgattgtgtgctcggcacttccggttatgacaacttttaaagaaaatgtagtctatgaagttgaaatgataggcggaggtttattagttatcgtgtctggattgtggttgtggaaacgttcgggcttgaaaaataagacatttgaaatagaatgattttaattaaagagaaggctaaaaaggatcttttgaaaacgttgggtttcaaaaggtcttttttatgcaaaactggtatgcataaaaacatgaaaactggatgtttaaaaaataccagatgagcgtatgataggactcaaagaaaattcacagaaaacagataggaaaggtacaggaattatgaaagagaacagatatgaattaaataagcagctggcacagatgttaaaaggcggagttatcatggatgtaacaactccggagcaggcaaagatcgcagaagaagcaggtgcatgtgcagtcatggcactggaaagaatcccggcagatatccgtgcggcaggcggcgtatcccgcatgagcgatccgaagatgatccgcggcattcagaaagcggtatccattccggttatggcaaaatgcagaatcggacattttgtagaagcgcagatcctggaagcaatcgagattgattatatcgatgaaagcgaagtactttcaccggccgatgacatttaccacattaataaaaaagagttcaaagtaccatttgtatgtggtgcaagagatctcggcgaggcactccgccgtatcgcagagggtgcatccatgatccgtacaaaaggcgagccgggaaccggagatgttgtacaggcagtacgtcatatgagagccatgaatgcggagatccgccgcatccagaacttaagagcagacgaattattcgaagcagcaaaacagttacaggttccggttgatcttgtggaatatgttcatgaaaatggaaagcttccggtcgtaaactttgctgcaggcggagttgcgacacctgcagatgcggcactgatgatgcagcttggagcagaaggtgtattcgtagggtccggaatcttcaaatctggtaatccggcaaaacgtgcggcttctattgtgaaagcagttacgaactacacagatgcaaaactgatcgctgaactttcaacagatcttggcgaagcaatggtaggaatcaatgaacaggaaattgaattattaatggcagaaagaggaaagtaaaatgacgattgcaatcttggcaatgcagggagcattcttagaacatggacagatgctggaccgcctgggcgtggaacatttcgaaatccgtaaaaaagaagatctggatcgttcttttgacggactgatccttccgggcggggaaagcaccgttatgagaaagcttctgattgagctggatatttacgatatattaaaagagaagattgaagacggacttccggtgtttggaacttgtgccggattgattcttttggcagagcaggtagaagatggtgttccatgtttcggtacaatgaacattttggcaaagaggaatgcatatggaagacagcttggaagcttttatacagaagatgagatgaaagaaattggaaagattccaatgacattcatccgtgcaccgtatattgccggtgtttatggaacagcagagatactggctgtagtagatggaaaggttgtggccgcaagacagggcagccagcttgcaactgcgtttcatccggaactgaatgatgatacaagtgtgcatgcatattttgtagaaatgataaaaggaagcaaggcacaggctgtatagaaacgtcatttataatatgaagacggaacgacattttatgtaataggatagcactgtgtttttgaaaaggagaacaaagccctgaatgatatcattttcag

SEQ ID NO: 2805 - DNA, 1688 bp, Unknown
  gut microbiota DNA sequence
tttgacgcttaactatttccaacaccttcttcacattcactggaacggcttcctactttttattccgtgggtgtcgaatgccttaagaatgaaacctgctaagaaaagtcaataattatttttatcttttttattttctgtcacaaaatatatttgcgtactacaaatagactgtctgattggcagtctaaaaaattatttattttatataagattatatatttttatatagttcagttactcgagcataataaatgcgtaaaaacttatttaatccggctatctttgctgattttttacttttaccttctgattccttttttacaacatatcggtaaaccggatcttctggtctggaacgcatttttaaacttctcattgtttcgtatcctactttgcgcaatgatgctgaaccacgtttcgagattttcctattacaacctacaaattgaccagattcatacggtggtggatcaattcctgcgaatgcaaccaatgccttcccgttgcgaaatctgcgaacatctcctatttctgcaattaactttggggctaatgtatttcccactccacccatttctcttacaaccgaatattctggcaaagtcttggctatttcctgcatccgtgataaaattagaccaagggttgcatcaacttccttgagcacccgaaccgcttcagtcaccagcattttgaacgatgaggtttctgaaggtaatgtgggaatactttcctgagccagggtgtatataactttggctttttcctggcttgggacgtatttcttttcttttgcccaaagtatatactcttcagtaaattcctgttcagacatagatgttattacatcataatgccaaaaacgttctacaaaatcacttcttttatctttccgatttgtttcattccaacttgcaagaagattctttattccgggcatggtcaaatctaaaagatgggtcaattcagcaagagataaaagatgaagcttcatataatgccgatattgctgtccaagcaacttcaactcttcataaatctctccagaagtttgaaattctttcattttaaaccaatgatcaattccataattagcaatgatacgggaatcaatcttgtcggttttggcttttcgcagactttcgttacgataacttttcataagatacggattaattacagaaacaaaaaatcctttttcctgtaaatatgtaagaactggaagatgataaattccggttgcttccataacgattttgacttcatcatttagtctgaaaagcatggaagataattcgcttaaatccttttgggtatgggtaatattgaaaggcttactaacaatctctccatatggtttcaaaatacatactgtacttttcccttttgatacatcaattcctacgctgatcataatatactccttttctttttatagaattgcagttgtttatcccatctacacttattatgattcagtttagttcgttacgcgaaagctcctgcgagtttcaacctgcttaaatgaatgtttataataaggggatggctgacggtttcattcacggatgtgaaaatcctaatggcaatatgtcataccaactacttcccttattataataaaataagtgtagatgttagagttaattactctctaacaactacacttttatggtactaaatgg

SEQ ID NO: 2806 - DNA, 62519 bp, Unknown
  gut microbiota DNA sequence
aggcgaacgccgagtttgagcgtagttcctttgcttttaggagattctggctctcttagtttttcttagagcatggaacctgaaccagaaccactttatactgttttcttcaaggatcgagaggccaactacgttaatgaattaaatcccaagcgattgagtaaaaagctgcgacttctccagcctctcataaaattcctcataaaaattcccatcttccccataaggcgtcagataaaactgtgtcagcacatgcatactgattgttctggcagttgaatcagaatttgaagaagaatcagaagtaagattcataacgtattcctgaagccctttcagaaagaaatgccagtcagcaatatatttctcgtaggttttcagattcggtgtatccagccattttttgatctttactttagaacgatccgttttcggacattcatgtacctgtaagaaatattggaaagaatggttttcataaaaacgtcccagagggaacatgcggcagattccgggacggaatgcatgaaccgtacaccgtccgtccgcatcaaggaaagaacaggcctctttggttccagtcatcttcagattcggaagaatgatcccgtctgccacattcagttccagcggaccggccaggagttcattcactggttttgacagattgatggaaagccggtacacatccagtggatcaaggacgatggaacttcccataccgtgacagcaggcggagcaaccgtcacagcctttgcagtcagtcctggccatatcgttgctgctgtataatttcccatcggatatttcatccagattaatctctcttaacatactcattacctcatatctgtgattatagttttttgtatagtcttgttagataagttgattatagtgtaatatagagaaagatgcaaataaaatagaagggatgtggacaggtatgaaatttttccatttatcggatctgcatatcggaaagcagcttcatcgttataatttaaaagaagatcagcagatgatcttaaaagaggtcattgcctatgcaaaagaattgcgtccggatgcaattgtgattgccggggatatttatgataagtcagttccatcagcggaagcagtgactatatttgatgagttcctgacggaactttcagagatcacaccggcaattccgattctgatcatcagcggaaatcatgattcacctgatcgtctgaattatgcttcagagattttgagacggcatcatatttatcttgtggggaatgttccggagcagccggaagagcatattgaaaaagtaacattgcaggatacatatggagaggtagatttttatctgttgccatttatgaaacctggatatgtaagaaatgtttttgttaacaatgtcccagagacatatgcagacgctgtgagagaaatcattaaacgagaagagatagattataataataaaagaaatgtgttagtttctcatcagttttatgtaggagaaaaggaaggaagtccggaaacctgtgattcggaagtattttccgtaggagggattgataatgtagatatcggggcagtgaaagaatttgattatgtggcgcttggacatcttcacggggcacagtacgtcagcaggccaaagatccggtattgcggtacgcttttgaagtattctgtcagtgagagcacgcagaccaaaagtcttactgtggtgactttaaaagaaaaaggggagaagccggaaattgcatgctatccgctgcatccgctcagagatgtcaggaagaaaaaaggaacgctggaagaaattataaaagaagccggtgaagaagaaaaagaggattacatcagtattacgctgacggatgagatcgatccatataaaccgaaagagcagctggaacgggtattttcccatatattagagatccgggtagataatcagagaacaagaaccaaattaaaagaaatggatgaagaacttgttatgaaagatccgtttacctctttttgtgaattctataaggagatgcagggaagagagatgaatacgcaggaggagacaatcatgaaagaaatctttgacaatgtgaagggagtggagtagatgagaccggttaagcttattatgtcagcgttcggatcatatgccggcagaacagagattgattttacagagattcccaatggactgtttctgatcacaggagatacaggtgcaggtaagactacgatctttgatgcaatcacatatgcgttgtatgacaggaccagcggcggcaccagagatggaaatatgatgcggagccagtatgcggatgaaggaacggatacttatgttgagtacatgtttatatatcaaaagaaacaatataagatactaagaaatccggaatatatgcgcctgggaaaaagaaaatatgcagacgggtcactgagatatgtgaaggagaccccaaaggtagaactgacactgccggatggaagtgtattcaaaggaaagaagagagagacggatcagaagatcgtagaaattacagggctggatgcagatcagtttacccagatttccatgattgcacagggagaatttctgaagcttctgctggctgaatcaaaagaacggaaaaagatattttccagaatatttcagacacgcttttattacagaatacaggaagaattgaagaaacaggcagtacagttatatgtcaaactggaacagaatctgcaggaaatgaagcttgagatggccaggacagagtatccggtgtgtgagaacggaaaagaaacggagctcagcagaaaatggaaagaagtatccggacaggatattccggacagagacagaatatcggagatactaaaagaaatcatcggacagggaagccggttggaaaaggcctgcaaaaaagaagcagacggggcacaggtggttctggaagataagaatcgcctgctgaaggaagcagaacttctggatcagctctttgattcgtatggacaggtactgagccatctgaaagaaaaaacagcggaaaaggcaaaatatgagcttatgaaggagcagatacagtccggtaagagtgcagaacgtgtcaggacagaggaaaagagatatctggaagaagaaaaaaggctgacagagttaaaaacacaggatcacagtcttcaaaagaaattacaggaatgcagacaattgttgcaggaacttacagaagatcagaaagaggctgtgaaagaaaagacagaaaaagagattgtactgactgagaaaaaagtgcggatacaggatgcaattttgcaatatgagagtattaataaaaagcaggaaactttgaataaacttgcagaagaaataaaaaaatatctaaatcatgcaagaataataaaagaaaagaatgaaatcctgcagaataagaatgaagaaataattaaatttctaaagcaatacgaagatgttgagatatgcataaatgaatgcagaaataaaaaacaacagacagaagaaaaaatgcggcaatataaggaactggacagacaggaaaacagaaaagaacaattaaaggaagactgcgaaagagcaaagaaagaagctgaatgtgaacagaagaattatgaacatgcatgggcggaatatgaaatgaagtatcagaagtttctgaaagaacaggcgggaatactggctttgacactggaagcaggacagccttgtccggtctgtggttccagagaacatcctcagattacattattaagtgacgaagcaccgacacaggcagaagtagaatctgcaaaggaggaaagagacaggaaagaaaaaacaagagatataaaagtcgctgcattcagggaatgtcttgcaggataccaggcagcacaggaaatctgccagacgcttcaaatgaacataaaagatgcgccggaagacggatttaagactaactggaaaaagattatgcaaaatctgggacagacgtttgcagaaacagaagaacaattaaaacaactggagcagatttccgaaaaatgcaaagcattaaagaagaatcaggaacagattacggagcagtcggtggaactggaaagaaaagaaagggaaacggaccaatgcctgacggaatcaaagctggtatatacaaaagtacaggctgaatatcagactgcgaaggagaaactgccatatgagaccatagaagaagcagaaaaacatctggcacagacagtaggagcattggagcagttgagaaagaattatgagacagtgaccagacgtctgacagaaatgcaaaataaagaaaaggaactggaaggacgtagtaagatcgtgaaggcatctgctctacaatctcagaaagaagcagagaaaaagaaactccgttatgaacaggtaatgaaggtacagggatttgcggatgaggagagttatcataggaaatgcatgaaggagacagaactggaagaagcagaacggtggacagaagcatatcagagagaacttcaggaactggaagcaaacagaaaattactggaacagcaactgaaggggaaagaaaagaaagatatagcgcagattaaacaggaaataaaagaagcatctgaagtgctggagcagatccgaagggaatatatgaggcttcataatatcaatgaaaagaatagagaaatcagggagaatctgagacgcaattttgagaagaacagtggactgcagaaccagtatgaaatcattggtaatctgagtaagacggcgaatggaaatctgagtggaactgcaaaactggacttcgagacttatatccagaggcaatatttccggcagatcatacgtgccgcaaataagaggctgatccgtatgacatccggcgaattcattctgcaatgcagagatgttgaaaagctgggaaaccagggacaggccggactggaactggatgtgtatcatatggcaacagatacgatcagagatgtcaaaaccttatccggcggagaatcttttatggcagcgctgtctatggcattgggactttctgatatagtgcagaatacagcaggtgcgatccatctggatacgatgtttatagatgaagggttcggatctctggatgatgcatcgagagatcaggcaattcgtgtactgaatgatcttgcggataaagacagactggtgggaattatttcacatgtaaatgaactgaaagaacagatcgatcataagcttgtagtgaaaaagacggacaagggaagttctgtaagctggtcggtataaggacggaaaatttgttatctgatccgttatatacagagataaaaacagggaagctgttgcatgatacgcaagtattagcaacagcttccctgtttttattcgtttaatagttatttatgttcttcctgatatttcagagaagcttcgataaatcctctgaacaatggatgcggtctgttcggtcttgattttaattccggatgtgcctgtgtggcgatgaaccaaggatgttcaggaatttcaatcatttcaacaatccttccatccggtgagagaccggagagcttcatgccgtgagaagtaagagcctcgcggtagtcattattgacctcgtaacgatgacggtggcgctcactgatctgatctgttccgtacatttcgtaagctttggatgtcttatcaagtacacaaggataagctccaagtcttaaagttccgccgatatcttcaatgccaatctgctctggcatgatatgaatgaccggatgagtggtgtttggatcaagttctgcactgtgagcatcattgtaaccgatgacatctcttgcaaattctacgatagaaagctgcattccgaggcagagacctaagaacggtatattgtgtgtacgtgcatatttgattgcctcgatctttccttcgataccacggttaccgaatccgccgggaaccaggataccacttacgtcactaaataattcctcggcattatcggcagtaacggtttctgaatcgatccatttgatatttacagtagcacggctgaagattccaccgtgttttaatgcttctacaacactgatgtaagcatcatgaagctgaatatatttaccaaccaaagcaactgtgacttcggtggttggattcttaaggtagtcgaccatttctgtccagtcttttaaatccggttccgggcagtcgaggtggagacattcacatacaacacctgcaagattctcttcttccattgcaagaggagcttcatacagatattctacatccagattctgcagtacatgattagacggtacattacagaataatgcaattttgtctttcagtccgacaccgagtggatattcggaacggcataccagaatatccggctggattcccattccctgaagatctttaacgcttgcctgggtaggttttgtcttcatttcctgagaagccttcagatatggaatcagtgtgacatgaatcaggataacattttcacgtcctttttcatgctggaactgacgaatggcttccaggaaaggctgactttcgatgtcaccaacggttccgccgacttcaataatggcaatttccgtattctcagcggctggattgcgataaaaacgggatttgatttcatttgtaatatgtgggataacctgaaccgttcctccgccaaaatctccacggcgttccttctgaagaacagaccagtaaatcttaccggttgttacgttggaattcttgctcagactttcatcgatgaatctttcataatgtccaaggtcaaggtcggtctcagcaccatcatcagttacaaatacttcaccatgctgtacagggttcatagtaccagggtcaatgttgatgtatggatcgaatttctgcattgtaactgtgtaaccacgagctttcagcagacgtccgagagatgcagctgtaatccccttacctaatccagatactacaccgcctgtaacgaatacgtattttactgccataacttcctccttaagtcaaaattagtttctctgttatataaagtgttcaaaaaaaatactttaagattatacacctttgttattaaaaaatacagagtttttttcatattttgcttcaaaagttgcctgaatagacagcagtttgaattgtttgatgtctacagaccccggcataacagatacatgagcctgacagccttttaatttaggaagctgttccatcgcaagttttgcatctttactggtagcagcacttacagaaagggcaatcagaacttcatcggtatgaaggcgtggattgcggcttcccagatattttgttttcagactctggattggttcgatcgcctgtggagagatgatcttgatctcatgtccgatacctgcaagttcttttaatgcattcaaaagaagagcagagcatgcgccaagaagatccgatgtcttgcctgtcacgatcgagccgtctgggagttccagtgcagctgcaggcccgtctgtacgctcggattcggtgagagccgcatcgactaccggacggtcatgaacggtaatatctgcctggttcattaacatttctaatttataagtttcttcttcagagcatgcgccgagaagaagtcttctcctggatgcatagtatctgcggatgatttcctgacaggaagcgtttctacatgcgtcatcattgcagatacagttgccagccatatttacccccatatctgttggggatttgtaaggactttctccgtagatgcgctggaacatggcatttaatacagggaaaatctctacatcacggttatagttgatcgttgtctcaccataggcttccaggtggaacggatctatcatattaatatcattcaggtcggccgtagctgcctcgtaagccaggttgaccggatgttttaacggaatattccagattggaaatgtctcaaatttggcgtaacctgctttgattccgtgcttgtgttcatgatataattgtgacaggcagacagccatctttccgcttccgggtcccggagcagtcacaacgaccagaggacggcttgtttctatataatcattttttccataaccatcgtcacttacgataaaaggtacatttgtcggatatccgggaatcaggtagtgacggtacactttgatgccaagcttttccagacggtttttgaataattcggcactttcctgtgcgttatatttggtaataacgacacttccgacatagagcccaagttcctgatagatatgcatcaggcggagtacatcggaatcatacgtgataccaaggtcaccacggatcttattcttttcaatatcttcagcgctgatgacgatgacgatttcggcctgatcggacagctcgcataacatacggagtttgctgtcaggctggaatccaggaagaactctggaggcatggaaatcatcaaaaagtttgcctccgaattccagatacagtttgttgtcaaattgtccgatacgttcacggatatgttcagactgcatcttcaggtatttttcattatcgaatccaattttcataagtacattccctcatctaaaatatatttaatcttttatagtggaaaatctgccggaaccggcataagcattttcattctaagtatactacaacacataggaagtttacaatcttttcataatgtttttattgatttctaacatagtggtctttataataattagttatacaggaggattaaaatggacaaccagaataataagaataacaagaataataaacaaggtatttcgtttattttattggtcacagttattacatcgattcttgtggttgcactgttccagtttcagggaatgacctctgcaaaagagattacttataataaattcctgaagatggtagatgacggcaaggtcaaaaaagtagagattcagagtgataagatcatgattgtcacgaagaaggataaggacagtggaatttcacaggaatattataccggagttgtgaatgatgacgaactgaccaaacgtctggaaaaagccggtgtagaatttaatcaggagattccggataccacatccgcggtagcaatgaacgttatcttaacattcctgccaatcgcattctttgtcggaatgatcgtttggatgacaaagcgtatgtcaaaaggcggcggcatgatgggaatcggtaagagcaatgccaagatgtatgtagagaagcagacaggtgtgacatttaaagatgtggccggtcaggatgaagcaaaagagtccttacaggaagtagtagattttctgcataatcccgggaaatatacgagtgtcggtgcaaagcttccgaagggagcgttgttagtcggtcctccgggaaccggtaagacacttttggcgaaagcagtagccggcgaagcaaaggtaccattcttctcactgagcggttcagcatttgtggaaatgtatgtcggggtaggagcatccagggtacgtgatctgtttaaacaggctcagcagatggcaccatgtatcattttcattgatgagattgatgcaatcggtaagagccgtgacaatcagatgggcggcaacgatgagcgtgaacagacactgaaccagcttcttgcggagatggatggatttgaaagcaataaaggactggtgcttcttgcagcaaccaacagaccggagatcctggatcctgcgttattgagaccaggacgttttgacagacgaatcatcgtggaaaaaccagatctgaaaggacgtgtagaggtcctgaaggtacattctaaagatgtaaagatggatgagactgttaatctggaagagattgcactggcaacttcaggagcagttggttctgatctcgccaatatgattaatgaggcagcaatcaatgcagtaaaacatggaagaaatgcagtgtgtcagtcagacttatttgaagcagtagaagtagtacttgtaggaaaagagaagaaagaccggattatgagtcaggaagaacggagaatcgtttcctaccatgaagtcggacatgcgctggtaagcgcattgcagaaagatgcggaaccggtacagaagattacgattgttccacgtacgatgggagcacttggttatgttatgcagactccggaggaagaaaaattcctgaatacgaagaaggaacttcaggcgatgttagtcggattgcttgcaggacgtgccgcagaagaagtggtatttgatacggttacaacaggagcttccaatgatatcgagaaagcaacaagcgttgcaagagccatgatcacacagtatggtatgagtgagaagttcggactgatcggtctggaatccattcagaaccgttatctggacggacgtccggtcagcaactgtggacagcagacagcatccgagattgatgaagaagtcatgaagatgctgaaagatgcctatgaagaagcaaaacaactgctgagagatcacagacagtcactggataggattgcggcattcctgatcgaaaaagagacgatcaccggaaaagaatttatggaaatcttccatgaagtagaaggaattgatccggatgcaccgaagaaggaagaagcaagaatcggtatgaatccggtagaaggtgaagggtttgttatgaaatctgcagatgatacagccgaagaacctgttgaagcaataaaggaagttgtctgcgaagaagaataagtataaagagaatagatatacgaggaaagatacagggtaaagtttgagaaagccctgtatcttttttcttttcaattatatctgcctggtatataataggcaggatgagagtattctggaggaaagagtatgaagggaagattattcggagtcggagtcggaccgggagatccggaacttatgacatataaagcagtgcgtatcataaaggaatgccaagtgctcgcagtgcctgcgagaggcaggaaacatgcggtcagctacaggattgcagcggagatgatagagaacatggaagaaaaagaattcctggatctggatacgccgatgacaaaggacagacagattctggatcggaattatgaaaatgcagcagggagaattatagaagaactggaaaaagggaaggatgtagcatatctgacgctgggagatccgacaatctattcgacttatatgtacattcatcgcatagtaaaagcaaaagggtatgagacaacgatcatcagcggaattccgtccttttgtgctgcagcggcgagaatggatgacagtcttgttgaccgggcagaagaacttcatgtaatcccatccagctatggtatagaagcggcactaaactattccggtacaaagattctgatgaagtccgcatccggaataagtgaagtaaagaggactctggaagaaaaagacggaaatgtgaatgtaaagatgatagaaaactgtggaatgccagaggagcggatctatgaaagaatagaagatgttccggagcaggcaggctattattctttattgattgtaaaagagtcggaaaaagagcgctaacaggattcaaaaaatcagagaagatgtttagaattagaaaatagaaaatatacaggagacgtatatggagaattttaacatacaggaagaactgaagaagctgcccggaaaaccgggtgtatacctgatgcacgatgaaaaggatgcaatcatctatgtcggaaaggcaatcagccttaagaaccgtgtccgtcagtattttcagagcagcaggaataaaggtgccaagatagaacagatggtgacacatatttccagatttgaatacattgtgacagattctgaattggaagcactggtgttggagtgtaatctgataaaggaacacagaccgaagtataatactatgctgatggatgacaagagttatccgtttataaaagttacagtaaatgagccgtttccgagggttatgctggcaagacagatgaagaaggacaaggcaaaatattttgggccttataccagtgcaggcgcagtgaaagatacgatagaattgatccgtaagctttatcatatccgcagctgtaaccgttcgctgccaaaagacatagggaaagagagaccttgtctgaattatcatatccatcagtgccaggcaccatgccagggatacatttctcaggaagagtatcggaaatccatagacgaagttgtacgtttcctgaatggacattatgatctggtgttaaaagaactggaagaaaagatgatggcagcatcggatagtctggagttcgaaaaagcaattgaatacagagaactgcttacaagtgtacagaaggttgctcagaagcagaaaatcacagatacggcaggagatgacagagatatcattgcaatggcttctgagggagaagatgcagttgtgcaggtattttttattcgaagcggaagactgatcggacgggatcatttttatctgaagagcgcagaaaatgatacggaaggcgagatattgtcaagctttatcaagcagttctatgcaggcacaccatatattcctgcggaactgatgctgccggaagagattgaagatcaggatattattgaagaatggctgacggcaaggagagaacgcagagtacatcttcgcattccgaagaagggaacgaaggaaaaactggtagaactggcacaaaagaatgcgcagatggtgttaaagaatgacagagaacgtctgaaacgtgaagagggaagaacgatcggtgcagtgaaagaactggaaaagatactgggactaaaaggcatcatacgcatggaggcatatgatatttccaatacgaacggattcgattctgtcggatcgatggtagtctatgaacatgggaaaccaaaacggaacgattaccgcaaattcaaaattaaaactgtgcagggtccggatgattatgccagtatgaatgaagtactgaccagaagattcgggcatggattgcgtgaacagcaggaagaaagtgaaaccggaggctttcagatatttccggatctgatcatgatggacggcggacgggggcaggtgaatatagcactggaagtactggaaaagcttcatctgcatattccggtgtgtggaatggtaaaagatgacaatcacagaacgagaggactgtattttaataataccgaacttccgattgaccgcaactcggaatgtttccggctgattaccaggatacaggacgaagcgcaccgttttgcaattacatttcacagacaattgcgcagcaaggggcaggtgcattctgtgctggacgatattccgggagtcggccctgcaagaagaaaagatctgatgcggtgctttgagaatattgatgcaatccgtaatgcaacagtagaagagttaaaagaactgccaagtatgaatgaaaaatctgcacaggaagtatataaattttttcaccagaatcattaagtatggtataataattaaagagatttttaatacgtgtgaggtagaagaatatggcgaataaagttgaattaaaaacacttgttgaaaaaatgaatcttaaaaatttaacaccggatgtagatctgtctgataaagatgtagagataccagatattaacagaccggcactgcagcttacaggattttttgaacattttgattcagaacgtgtacagatcattggttatgtagaatatacatttctggagaagatgacagatgaagataagaaaaagcggatttatgagacactgctttcttataagattccttgtctgatcttctgcaggaatcttccaccggaaaagatgcttctggagatggcagaaaaggcaaatatccctgtattccagacagagaagaagacatcggaatttacagcagagatcatccgatggctgaatgtggaacttgcaccatgcatttctattcatggtgtgctggttgatgtatacggtgttggtgtgctgatcatgggtgaaagtggaatcggaaagagtgaagccgcactggaactgatcaagcgtggacaccgtcttgtcagtgatgatgttgtagagatccgcagagtcagtgatgagacactggttggatcggcaccggatatcacaagacatttcattgaattgcgtggtatcggtattgtagatgtaaaagcattgttcggtgtactgagtgtcagggagacacagaatattgaccttgttatcacgcttgaagagtggaataagaacaaagaatatgaccgtctcggactggaagaagagtatacagaattccttggaaacaaagtggtttgtcaccatcttccaatacgtccgggacgtaatctggcgattatcgttgagacagcggccgttaaccacagacagaaacagatgggatataatgcagcacaggaactgtacaagcgtgtacagcagaatctaacaaaaaaataggagagtaggaaaatgaaatattgttttggtgtagatatcgggggaacaacagtaaaattaggtttgtttacgaccgatggggagattgtagataagtgggagattaagacccgtacagagaatcagggagaggcagttcttccggatatcgctgaggcattaaaggaaaagcttgaagaaaagaagatcggcagagatgaggtggaaggaatcggagtcggagttccggcaccggttgatgcagaaggtgtggtacagaacaccgcaaacctcggatggggatataaagaagtaaaaagagagatggaagagctttccggcatgagagccgagatcggtaatgatgccaatgtagccgcacttggagaaatgtggctgggagccggcaaaggacgcaaaaatatcgttatggtaacgcttggaacaggtgtaggcggtggaattattattgatggaaaaccattggtaggagcgcatggtgccggtggtgagattgggcatctctgtgtgaattatgaagagacagatcattgcggatgtggtaataccggatgtctggagcaatatgcatcagccacaggaattaccagactggcaaatatccgtcttgccaaagatgatgccaagtcagtattaagagagcaggaagtcagtgcaaagactgtatttgatgcagtgaaagccggagatgcagtggcaaaagagattgcagaagaatttggaaaatatctcggacatgcaatggctaatctggcagcagtggcagatccgtcagcaattgtgattggcgggggtgtatccaaagcaggtgaagtactgatagagtatgtggaaaagaactttaaagagagggcattttttgctaacaaggataccgaatttgtccttgcaacattaggaaatgatgcaggaatctgtggagctgctaaattaattctttcataaaggatgttggaaaaacagagattgatttcacaatcaaaaaaatatgtaaaaaaatgcgggatggttttaactatcccgcatttttttctgtatattactgaggtgtagtactttcggttgaaccacctgtagtaccgccggttgaaccaccggttgaaccacctgtagtaccgccggttgagccaccggttgaaccacctgtagtaccaccggttgagccacccgttgtagtaccgccggttgtatcgctgccggctgttgtgttaccggtcgtattaccggtcgctgaattactgccgtcttctctggtagaagatccggaagtattagcattggaactgctgtcatcttctgtggaagagttggatttgcttccgtaagaatatccgtgtccggaacatgtctcagcaggcagagtgtcttttgcaaaatattctgtaatagacgggcatccgcttcctgcgagttttcctgtaattgtacagatgcttttacgttcaacggaagaaggaactttgaaatctttttcttccagattctcgtgaatacggctcatgatacctttccagagtctgaaacggaaacttgtgtcataatcacattctttgttatcgtcatatcctccccatacggcacaggtgtaatatggtgtaaatccacagaaccataagtctttgttggaagttgtggtacctgtcttaccggctaccggcatattaggaagctggcatgcagtaccggtaccggaattgacgacatcttccattgcgttggtgagaagatatgcagtactgtctttgattacagtatgtgattcgccggtgccatccagaagaacgttgccatcatggtcaactaccttgctgtaaagcgttggtttattatattcgccgccgttggcgatcgttgcatatgctgcacacatttcgtaattgtagacaccttctgtgataccaccaagagcgagagtctgtgaagtactgtcatcgaacacttttccgttgatcgtcttgttttttacaagagtactgattccgaatttctgacaatactcatagcctaattcctgagtgatctcgtcacttaattttacagccactacgttgatggagcgtttgataccttcacgaagagttgtagtaccgccatattgcttattggcatttcttaagacctgtccgtttttcagtgtatatggttcatcatcaattgttgttgcaagtgttttgtcgcaggaatctaatgccggtgcataagctgcaagaatcttgaatgtagatcctggctgtctttttgatccctggtaggctctgttaagaccaaggctggaagctttttcaccacgtccgccgaccattgctttgatctgtccggtcttctgatccatgatcgtgatagaagactgtggctgcggagtgatcgtgatacgttcatcgtaagtatctccctccctggcaatcgttgctttccattcttcgaccattgctctggcagcatcttcgctggaatataaaagtccctgatcttttccgtaagtttcttttacataattcttgatgttattgctgccataattttccgttgatccatcggcacgggttacagtcagtgcataatccagaccatattctttcagtcccggataattggaatcatcattggcttcttcatcgcagatctgctgcatggtctgattttgtgtagaataaatactaagaccgccgctgtaaacagcattataagcctgcgtatcagtataaccaagctggtctttcagatcctgaataacctgctgggcaagtgcatcaacaaaataactataggtattatctgcctgagaagcagtattggttgtctggatccgcgcatatacatcatcggcaagtgcttcatcatattgtttctggctgatataatcctgttccagcatattctttaatactttattgcgtcttactttattgttatccggatgagtgatcggatcataagtacttggactttgtgtgattccggcaatgactgcacattcagataaggtcagatcagatacatcttttccgaaataacgctgcgatgcagcctgaaccccgagacagttctgcccaagattgatcgtattcagataactttcaatgatctcgcttttatccattttcttttcaatctgtaaagcaagatactgttcctggatcttacgctggaatttgtcataaaacgttttttctttggtaaagttcgggaacacattgttcttgatcagctgctgtgtaagagtactggcaccttcggtgaaattaccacctcttgcaatgccgactactgcagcacgggcaataccctgcagatctataccgttgtgtttgtaaaaacgttcatcttcaattgcaacaaaagcatgctgcagatctttgggtatctcatcaatggatttgtatactctgttggaaccggaagatacaaatcgttcaatctctgtgctgccgtcatcggcgtagacgaaagtggtaaatcctttcggtttaacgtcagatgcggagacatgaggagtatcatcaatgatcttttttataaaaagaccgccgccggctactccgactactgctgcaagaataatacagatcagtaatgctttgaataaacggacaacgatacgttttccctgcatcgtagatttggacgttatttttttctgccttttcgcagcctttttctttccataattcatgcgtttaggcctcctttataccaagttattatagcaaatgtacactcttttataaagaaaaaaatgaaaacttcatattagactaggaaaatcttaagaaattaggtattatattatgtataaatttacaaattatacgaaaggacgacaaaatgttaccagaatacagaaccatctatcagggcggagaagatgagattgtagaaaaaaaatcaagatttatcgcaactgtaataccggtggagaatgaagaagaagcactggaatttatagaaaagacaaaaaagaaatactgggatgccagacataactgttttgcatatgtgatcggagagagaggacagcttcagcgctgcagtgatgacggagagccgaacggaacagccggaaaaccaatgctggatgtactgcttggaaatgaactgagaaatgtggctgtagtcgtaacacgttatttcggcggtacactgcttggtacaggagggctggttcgggcttattcacaagctgtgaaagccggtctgcaggcatcggttgtgataacgaagattctgggtgtgaaacttcatatagagacagattatacaacattcggtaagatccagtacattctggcccagagagagctgaagatactggatacggtatatacggataaagtagaattggaagtactgatcccgaagacggaattggaacaggtgatgcatgcaattacggaagggacgaacgcacaggcagatatgacaccgaaagaagagtgttattatgctgagattgacggtgtgccaacggttttggaataattgctttgacagtttctattgcatatgagaaataaaaaagagacgacatgataggctgccgtctctttttatatcctgatttacaggtattatgttgcattttatatggatttttaagaaaattctggttcgatcaatccaaatgttccgttcttacgtcgatatacaacatttacttcgtcagactctgcgttacagaatacataaaaatcatgtccaagaagttccatctgtacacatgcatcttccggatacataggtttaaatccgaattttttggtacgtacaattttaatctcaccggcgtcttcaatcttgtcatcttcttcaaagaactcctgcttgaagttaccgccttcctgttctcttgctaccagtttgtttttatatttgcgaagctggcgttcgatcacttcttctaccagatcaattgatacatacatatctgaactttcctgttcagaacgaaccagcccaccctttacaggaatagttacttcgatcttctgatgccctttttgtacgcttaaggttacatggatctctgtattcggagtgaagtacctttctaactttcctaatttgctttctacggcttctcttaagcctggtgttacatcgatgttcttcccaataataataaatttcatgatgcccaactcctttgcgacataatttcaaataaatgtacgttatacaatcatcaaataagaaaaataaaatctgacaattgttattcggaccgtcaatctatctgatatatgtagtatagcatgtttggacgttaatgtatagcacgaattacctgaattctcgaaatttttccatcatgtagtttcgcaacacgtagaccgcagtcggggaagtaataacaggcaccgacacgaggagtgatattgtgttcgtcgagatgagggagcaacacatccgcaagagtgtcacctgttttatgaggaatgttcacactcaggattttattgacaaccttagctttggttgaggcccgaaatacagtttcatctgcaacatcgaattctgagaacaggtatttccttgttgcgaataagactgctatcgagcagaccccgatcagactgctgtagatagaagagtggtccatgataatatgtctcgcaattgcaaaaagcagaacttcaaatacagtgcttggagaatgcgaatacatcatacggatcagctctacaccgatgatcagattaaaacaaacctcaagaagatcatcgtaatttggataggtgttcagatgcgggatattctgaagtgaacataccatacggaaacaaagcagaatgataccgatcgcaagcataaaagcgatcacatactccaaaatcgccgccacctgtttgagaatgtgagagataaattctttcattcgttggattcctttctcataatagatttccactgtaatttcagtataagtgaaaagaatgtatttgccaatacatattttgatataaaaaagagttgcagaagtatttacagaagaaaaaaagagacaggttttcctgtctcttttatccggtgggggatagattaccggtttacacgttttctcatcttcggatcaagaatcttcttgcggatacggagagattccggtgttacttccagaagttcatctgtatcgatgaagtcaattgcctgctccagactgagtacagtcggaggtgtaaggcggagtgcttcatctgcgcttgaagaacgggtgttggtaagatgttttgttttacatacatttacttcgatatcatctgtcttggcattctcgccgatgaccataccggaatagactttttcgccggcaccgatgaaaagtgttccacgttcctgtgcactgtaaagaccataagttacagattcaccggtttcgtatgcgatcagggaaccctgtttgcggtactggatatctcctttatatggagcatatccgtcgaatgctgtgttcatgataccatttccttttgtatctgtcaggaaatcgccgcgataaccaatcagaccacgggatggaatgcggaattcaagacgggtgtatccgccattggcagcacccattgtctgcagttcaccctttctctggctcagcttgtcgatgacaacaccggtgtattcatccggtacatcaatgtaagcaatttccataggctcaagaagcttaccattctcatctttgtgatacaggacttcggctttgctgactgcgaattcgtatccttcacgtctcatattctcaatcagaacagataagtgaagctcaccacgtccggatactttgaatgcatccatattctcggtatcttctacacgaaggctgacatctgtattcaattcgcgcatcaggcggtcgcgtaagtgacgggaagtaacatattttccttcctgtccggcaaacggactgtcgtttactacaaagtccatagaaattgtcggctcagaaatcttctggaaaggaattgctgtcgggttttccggagagcagagcgtgtcaccgatggcaatatcagagatacctgagattgctacgatcgctccgatagaagcttcctttacttcaactttctgcagaccatcaaactcatataatttactgatcttaactttcttctgtttgtcaggatcatgatggttgacaacaaccatatcctgattgacggagatggtaccgttatctacctttccgacaccgatacgtccgacatattcattgtaatcgatggtgctgatcagtacctgggttggagcttccgggtctccttccggtgcgggaatgtaatcaaggatcgtttcaaacagaggcttcatatctttcatctcatcagagatctcaagtgcagctacaccattcttggcagaagcatacacaaatgggcagtctaactgttcatcggaagcaccaaggtcaatgagcagttccagaacttcatcgataacttcttcggctcttgcttccggacggtcaatcttattgatacatacgatgaccggaagttttaactccattgccttgcggagtacaaatttggtctgcggcatagcaccctcgaatgcatcaacaacgaggataacaccattaaccattttaaggacacgttctacttcgccgccgaaatcagcatgtcccggagtatctataatattgatttttacaccgttataggtgacggcagtattcttggagaggatcgtgattccacgttctctttcgatatcgttagagtccatgacacgttctgctacttcctgattttcacggaatacaccgctttgctttaataattcatctactaatgttgtcttaccatggtcaacatgggcaataatcgcgatattacgtacatcttcacgttttgtcttcattacgaatcttccttttctctacctattattatctgcaaccacattagtttatcacattttttgaaatttacaagtatttagttctaaaatgctgatttgattcatagactttgtaatgacttaaaatacgatccagaggaagggagattacaaaattatgtcagataagatgattgagaacaaccaggtaactatgatgggagaaatcgtatccccgtttttattcagccatgaagtattcggagaaggcttttatatggtagaagtggatgtgaaaagactcagtaattccaaagacaggataccgctgatgatttcagaacgtctgatagatgtttcgaaagattatacaggggaatttattatggtaaacggacaattccggtcttacaacaggcacgaagagatgaaaaacagattgattctttctgtttttgtcagagaactcttttttattgaagaagagcttgacggggcaaagacgaatcaaatcttactggatggatatatctgtaaacagccggtatatagaaaaacaccgctgggaagggaaatcgcagatctgttgctggcagtgaacagaccgtacgggaaatccgattacattccatgtatctgctggggaaggaatgccagattcgcttctgcatttgaagttggggagcacgtgcaggtggttggaagaattcagagccgtgaatatacgaagaagatcacagaaacagaaacacagaaaagagttgcctacgaggtatcggtcagtaagctggaatgtatggatgagccggtgtaaaggatgaattttcgataagggttcggattgacatcatatttaattgatgatagaatttcattagattatatgaaagtcaggaggatcactatggctatttttacaggagccggcgtggcaatagtcacaccatttaatgaagatggaagtattaactatgacagacttgatgagttgatcgagtttcattgtgcacataaaacagacagcattgtaatctgtggtacaacaggagagtctgctaccatgacagaagaagaacacatgcagtgtgtgaaattcacaatcgaccgtgtgaataagagagttccggttattgcgggaacaggttccaattgtacacgtactgcaattgacatgtcaaaagaagcttccgagtatggagcagacggtctgcttctggttacaccttattataataaagcaacacagaacggacttatcggacatttcagtgcggtagcaaaagaagtgacagcaccgatcattatgtacagtgttgccagcagaacaggttgtaatattgaacctgcaacagttgcaagactggtaaaagatgtagataatatcgtgggtatcaaagaagcatcaggaaatatctcacaggttgcaaagatcatgaacctgacagacggtaatgttgacctctattcaggaaatgatgatcagatcgttccggtattatcacttggaggaaaaggtgtgatctctgtactgtcgaatgtggcaccggatgcagcacatgacatttgtgagaagtattttgaaggggatgtgaaaggaagtgcagaacttcagctgaaggcactccctctgatcgatcagttattctgtgaagtgaatccaatcccggttaagaaagcaatgcagctgatgggaatcgactgtggcccgcttcgcatgccgcttacagagatatcccctgaacatgagaagaatcttgctcaggcaatgaaagatttcggtattcagttagtataataaaaagacagaaggatatcatacgtctatggtatcctttgtttttaccggcatacgcccggaagaagcatgtatacagaggaggacaagaatatggtaaaagcaattatgcatggatgtaacggacatatgggacgtgttattacagatattatcaagaacacagaaggaattgaacttgtagcaggtattgataaatacaccaaagtgccaaatgagtaccctgtatttgagaacattggtgcgtgcgatgtggaagcggacgttatcattgatttttcgaatgcagcggcagcagatgaattgttgggttattgcgtggagaagcaggtgccggtcgtactttgtacaacaggactttcagaagagcagcttgcaaaggtggaagaatctgcaaagaaagttgcagttttaaaatctgcaaatatgtcacttggaattaacctgcttctgaagatccttcaggatgctactaaggtactttcaccggcaggatatgatatcgaactggtagagaagcaccataatcagaagctggatgcaccaagcggtactgcacttgcgctggctgattctatcaatgaagcagcggataatcagtatcattatgtatatgatagaagccaggtgcgccagaaacgcgacggaaaagaaatcggaatttcagctgtacgcggaggaacgatcgttggagatcatgaggtgctctttgcagggcaggatgaagtgatcgagttcaaacatacagcgtattccaaagcggtatttggaaaaggagcagtggaggctgcaaagttcctggcaggaaaaccggccggaagatatgatatgtcagatgtgatccagttctaaaatgtgatatgatataagatagtggaatctaaagtcccatctatgatgccggtggattgttctgtgctttgttctcacacaatcccggcatcttaaaaaataaaggggaaaccgggaggtaattatgagacaattggaggaacgttatctggaaagactttctcaactgtatccgaccatcgccaaagcttctacagagatcatcaatctgcaggcaatcttaaatctgccaaagggtacagaacattttctgacggacattcatggggaatacgaggcattcgcacatgttttaaagaatggctctggttctgtgcgccgtaaaattgatgatgtattcggtaatactttgagtagcagggacaaacagacgcttgctactcttatttattatccgaaagagaagatggatcggatcaagaagacggaaaagaatatggaagactggtataagatcacattatatcgcctgatcgaaatctgcaaaagaaccgccagcaagtataccagatcaaaggtcagaaaagcattgcccgcagattttgcatatgtgattgaagagctgatcacggagaaaaaggatatgacggataaagagtcttactataatgcaatcgtaagcacgatcatccgcatcggaagggcagagaaatttattattgccatgagtgaactgatccaacggctgacggtagaccatctgcatattgtgggggatatttatgacagaggaccgggaccgcatattatcatggacaagctgatggactatcattcggtagatatccagtggggcaaccatgatgtcctgtggatgggtgcggcagccgggcagagaggatgtattgccaatgtgatccgtatctgtgcgagatatggaaatctggacattctggaagaaggatatggaatcaatctgcttccgctggcaacatttgccatgaatacatatcgggatgatccgtgcgaatgtttcaaattaaaaggcagtccgaattacagtacaagtgagatgctgctggatgtgaagatgcacaaagcgatttcggtgatccagttcaaggtagaagggcagattatcaagaaaaatccgggatttaaactggataaacgcaatctcctgcatcatattgactatgaaaagggtacaattgaactggatgggaaagaatataaaatgctggattcgaatttcccgacaattgacccgaaaaagccatatgcacttaccaaagaagaagaggatattatggagcgtctggaacggacatttgaaaactgtgaaaaattacagagccatatgcatttcctgttgaacaaaggcggattatataaagtgtataatggaaatctgttatatcatggctgtgtaccattaaaagaagatggcaatctgaagagtgtgaggattttcggtcatacatataaggggaaaggtctctatgaagtccttgaaagttatgtgagaaaaggattctatgctatggattccaaggaaaaagaacgtggaaaagacattatgtggtatatctggctgagcgagaattcaccactgttcggtaaagacaagatggcgacgttcgaacgttatttcctggcagaaaaagagacacataaagagaagaaaaatccatattatctgttgctggaagatgaaaaggtaatctgccatatactgaaagaattcggactggaaaataaagatgcgcatattatcaacggtcatgtaccggtaaaatgcaaagatggggaaaaaccgatcaagtgcggcggaaaagttctggtgatcgatggcggattttcgagagcgtatcagaaagaaacaggtattgcaggatatacattgatttacaattcttatggactgatcctggctgcgcatgagccgtttgaatctacagaagcggccattgagaaggaaagtgatatacattcagacagtaccgtagtcaaacggacattggaacgtaaaaaagtggaagataccgatgtgggaagacatctgaaagaacagatcgcagatctggaagtgctccttgcagcatacagaagtggtgtgatagcagagagactgtagaaatgtaaaaaaataccagtatcagcagcatacggattttgtatatattttcaaaaaatgcagatattactgatgacagacgaaaaatatacgaaaggaagattgtgcaatgaaacaatggaaaaaaatgctgctgatattaatgtgtgcaggagcaatgtcggggctgaccggctgtggaaataatacaaataatacagatgataacgcagtaaatgaagtggaagatggtgtagaagacggtgtggatgatatcgtagatgatctggatccggacgatacggaaaaaaacgatacaggaaaaaatgatacaggaaaaaatgatacaggaaaaaatgatacggataataccagataggaaaagggacacctgattgctgcaaggtaagacaaaaagtacaaaacaaggatgccggggtgaaggaaaaatatccttccggcatccttcgttgttgtccggggcattcgcggcaaactggacggctgtactttagtgtggtaaaatggttgaaaacgcaaaaaggagataaacatttatgaaattcagaccatgcattgatatacataacggaaaagtaaaacagattgtcggagggagccttcgggatcagggagaccaggcaaaagagaatttcgcggcagatcagggagccgattattttgcggaaatgtataaaaaagacggactgaaagggggacatgtcattctcctgaatccggcatcgtcggaatattacggacagacaaaaaaacaggcattaaaggcattgcatgcgtatccgggaggattacagattggaggcggaattacggcagacaatgcttcggaatatatccgggcaggagcaagccatgtgatcgtgacttcttatgtgttcaaaaatggtgaaatctactgggataatctgaaaaaattatgtatggcagtgggaaaagaacatgtggttctggatctgagctgcaggaagaaggacggaagatattatatcgtaactgaccgctggcagacatttaccaatgtggagcttggaacggagatccttggcagactgtccggttattgcgacgaatttctggtacatggtgtggatgtggaagggaaagcttctggaatagaacaggagctgatagagatcctgaagcaggcagacattccggtgacttatgcaggaggtatcggaagtatggaggatctggaacagatacgcagaaccggaaacggaaaggttgattttacgattggaagtgcgcttgatctctttggtggcaggattccgtatgaagtgataaaagaatatcattaacatgctatgcagaatcaaaaagtaatcccctataaacaggtcgtaaataaagtgttaacactttataaatcagttgaattgaggtatggatagtgataaaataatggataaagtggtcgttttgcggccttaaagagaaataaggagtatacatcgaatgaatattatacagaaaatatttggaactcacagtcagaatgagttgaaaagagtatatccgatcgcagatgcggttatggcactggatgaagatatgcagcgactttcagatgaagaattgaaagcaaagacaaaagaatttaaggaccgtctggaaaatggcgagactttagatgatattctcccggaggcttatgcagtagtgagagaagcggcaagccgtgtgttgggaatgaagcattaccgtgtacagatcatcggtggaatcatcctgcatcaggggcgtattgcagagatgaaaaccggtgaaggtaagacactggtcgcaactctgccgtcttatctgaatgcactggaaggaaaaggcgtacatgttgtaactgtcaatgattatctggcaaaacgtgatgcagaatggatgggacaggtacatgaattcctcggattgactgtaggtgtggtactgaacagcatggataatgatgagagacgtgccgcatatgattgtgacatcacatatgtgacaaataacgaactcggatttgattatctgagagataacatggttatttataaagaacagcttgtgcagagagggttgaactatgcactgatcgatgaggtcgattccgtactgatcgatgaggctaggacaccacttatcatttccggacagagcgagaaatctacaaaactttatgaagcatgtgatatacttgcacgtcagctggaacgtggtgaggcaagcggagaattcaccaagatgaatgccatcatgggtgaggacattgaagaaacaggagatttcattgttaatgaaaaggagaagaatatcaaccttaccgaagatggtgtaaagaaagttgaaaagttcttccatatcgataaccttgcagattcggataatctggagatccagcacaatatcattcttgcattacgtgcacacaatctgatgttccgtgacaaggattatgtagtaaaagatgatgaagtgctgatcgtggatgaatttaccggacgtatcatgccgggacgccgttattcggacgggctgcatcaggcaatcgaagcgaaagaacatgtaaaggttaagcgggaaagcaagaccctggcaactattacattccagaatctgttcaataaatatacgaaaaagtcaggtatgacaggtacagctctgacagaagaaaaagaatttcgtgaaatttacggaatggatgttattgagattccgacaaacgtgcctgtaaagcgtcaggatctggaagatgcagtgtataagacacagaaagaaaagttcagagctgtgtgcgatgcaattgaagaggcgcacgcaaaacaccagccggtactggttggtacgatcacgatcgacaattcggaactgttaagtggtatgttaaagcgccgcggcatcaaacacaacgtactgaatgccaagttccatgaactggaagctgaaatcgttgcacaggcaggtatccatgatgcggtaaccatcgcaacaaacatggcaggccgtggtacggatatcaaactggatgatgaagcaagggcggccggaggtcttaagatcatcggaaccgagcgtcatgaatccagacgtatcgataaccagctgcgtggacgttccggacgtcagggggatccgggagaatccagattctacatttccctggaagatgatctgatgagactgttcggatcggaaagactgatgaatgtgttcaatacacttggtgtggaagacggcgagcagatcgagcataagatgctttccagtgcgattgaaaaagcgcaggaaaagatcgagagcaacaactttggaatccgtaaaaatctgctggaatatgaccaggtaatgaatgaacagagagagattatttacgaagaaagacgccatgtgctggatggagataacatgcgcgattctatcttccacatgatgaatgattatgtggaaaacgcggtagacctggtaaccagtccggatcaggattatgatgagtggaatctgacagaattgaatctgacgatccggaatacgattccgatggaagtgatcacggaagaagatgtcaaagatatcagtcagacggaactgaagcatatgttgaaagaacgtgcggcaaaggtttacgaggcgaaagaatcagaatttccggagccggagcatatgcgtgagattgagcgtgtcgttctcctgaaagtgattgatgcaaaatggatggatcatatcgatgatatggatcagctgcgtcagggaatcggtcttcaggcttacggtcagagagatccaaaggttgagtacaagatgatcggatacgagatgtttgatgagatgacaagaagcattgaggaagatacggtacgtacgatcctgcatgtcaaactggaacagaaggtagaaagagaacaggttgcaaaagtaaccggaacgaacaaggatgatacaggagtacgtgagccgaagaaacgtgccgaaaagaaagtatatccaaacgatccatgcccgtgtggaagcggaaagaaatacaaacagtgctgcggacggaagaattaatttcagaatgcagacgtatatgatatgagatgacggcggcagggataacccggctgccggataaagaagaatataagaaaagaaagaggtggaaatgtggttgaattagatcagttcaaaacaataatgaacgcttatgaagaacctcttgccgaaatgagggattcactttgacgttgcagggaaagagcggagaatcgaagaactggaacgaaagatagaagaacctggattctgggataatccggaagaatcacaggaactgatgaaagaattgaagaatctgaaagaacttgtggagacaatccataatctctacagttcttatgaagatatcggtcttttgatcgagatgggatatgaagatgaagatccggagatggtaaaagaactggaggaagagatccatacatttgaagaagtgtttgaaaagctgaagatccagacactgttgtcaggcgaatatgattcctgcaatgcgatcatgacgatacatgccggagccggcggaacagaatcctgtgactgggcaggtatgctttaccgtatgtacagccggtgggcagagagaaagggattcacacttcaggtgctggatttcctggacggagatatcgccggaattaaagcagttacatttgaagtgaatggtgagaatgcctatggctatctgaaatcagaaaaaggtgtccacaggctggtgcgtatttcaccgtttaatgcggcaggaaaacgccagacatcttttgcatcgtgcgatgtactgccggatctgaaagatgatatcgatattgagattgcagatgatgatctgaagattgatacataccgcgcaagtggtgccggaggacagcatgtaaataagacgtcttccgcaatacgtattacgcatctgccaaccggaattgtggtacagtgtcagaatgaacggtcacagcaccacaacaaagaaaaagcaatgcagatgttaaaagcaaagctgcaactcatgaaagagcaggagcaggctgaaaaagtatcagatatccggggtgaagtgaaagatatcggatttggcaatcagatcaggtcttatgttatgcagccatatacactggtgaaagaccatcgtacaaatgaggaaaacagtaatgtaaatgccgtaatggatggtgatattgattcatttatcaatgcatacctgaagaagatcgcgaacggctaaagggagggaatatatgatcaatatagcagtaatgggctacgggacagtgggttccggagtggtagaagtcatcaataccaacggggcacgcatcaatcagagaatcggtgaagaactgaatatcaaatatgtgctggacatgaaagatttcccggaagatccggtgcaggacaagatcatacatgatttcgagacgatcgtatcagatgaagaggtacagattgttgtggaagtgatgggtggtatcgaaccggcgtatacatttgtaaaacgctgcctgcaggccggaaagagtgtggcaacatcaaataaggcactggtggcaaagcacggagcagagctgctttccattgcagcggaacataatattaatttcctgtttgaggcaagtgtcggagggggtattccaatcatccgtccgctgaattcttctctgactgcagacgagatcgaggagatcaccggaatcttaaacggaacaacaaattatatgctgtccaagatgttttacgaaggggcagattatgataccgtcctgaaagaagcacaggcaaatggatatgcggaaagaaatccggaagctgatgtagaaggttacgatgcctgcagaaagatcgcaatcctgtcatctctgatctcgggacagcaggtcgattttgaagatatctactgtgagggaatcacagagattacggtagaagatatgaaatatgcaaaggcaatggggacaacgatcaagctgctggcgtccagcagacgttatgcgggcaacagactgcatgcgatcgtagcaccatgtatgttatatccggatcatccgctctacaatgtcaatgatgtatttaatgcaatctttgtgcatggaaatgtactgggagatgcgatgttctatggaagcggggcaggaaaacttccgactgcgagtgccgtagttgcagatgtggtagacgaagcaaaacatctgaaccgtaatattatgacaatgtggaaagaagaaaagctccaactggaagataaggcggattccaagagaagattctttgtgagaattaagggagataaagaaaaactgattccacagctgaaagaatcatacggagagattgaagtcgtaaacgttccggaactggaagatgaatttggattcgtaacacctgttatgatggaaggtgattatgagaccagatcaaaactttacaaagagcagatcgtacatatgatccgtatccaggattaatcagattggtctgttacaggaggaaacatgttaatagttaagaaatttggcggcagttctgttgccaataaagacagaatattcaatgtggcaaaacgctgcattgaagattacaaggccggacatgacgtggtggttgtactttctgcaatgggagatactacagatgaactgatcgcactggcgaatacgatcaatccggacgcaaaaaaaagagaactggatatgctgcttactacaggagaacaggtgtcggtatccctgatggctatggcaatgcaggcactggatgtacctgctgtatccctgaatgcttttcaggttatgatgcactctacatcccgttacgggaatgccagatttaaaagagtagacaccgaacgcatcatgcatgaacttgattccagaaagatcgtgatcgtaaccggattccagggagtcaataaatatgacgatatcacaacactcggaagaggcggttccgatacaacagccgttgcactggcggcggtacttcatgctgataaatgcgaaatctacacagacgtagacggtgtgttcaccgcagacccgagagttgtaaaaactgcaaaaaaactggatgcggttacttatgatgagatgctggaacttgcaagcctcggcgcaaaagttcttcacaatcgttctgtggaaatggcaaaaaaatataatgtggaattagtggtgcggtccagcctgaaccgttcagaaggtaccgtagtcaaggagggttcaaatatggaaaaattactggttacaggtgtggctgcagataaagatacagtcagaatctctgttatcggattagaggataagccgggaacggcatttgctgtatttaatacacttgctgcaaataatattaacgtagatatcattcttcagtctgtcggaagagaaggaacaaaagacatttcctttacggttgcatctgaggatctgcaacatgcactcgaagtactgaatgcgaataaagaaagacttacgatccaggatatcacatggaatgaaaaggttgcaaagctttccatcgttggagccggaatgatgagtaatccgggagtagctgcgaagatgtttgagtcattatacaattccagagtcaatatcaatatgatctccacatccgagattcgtattacggtactgattccggaagaagatattgaaaaagcaatgaatgcagttcatgacggatttggactgggagcctgagaaaaagtcaggaaaaaaggaaagacaattatttatctgagtgaagaaaaccggtagcgagtttacgcttctcatcggaagaagaacggaatgcgaatacaagatccacttcttcttcggtgagatagatgtagttaccggtatttttttcgattccctgcatataaggagtaaccgtctcgcgcatgccggaagaatattccgattcgggaataaaatgttcggcttcgagatcacagaggataagctgatccatagtaacgtgaaaatgtgtagcaaaagaagccagataaccaagatccggcgtacgtgtactggtttcataattgctgcaggcctgacggctgatattgaagatatcagcaatatcatcctgctttagaccagatatggttctgagatagaataagtttttggccagttgcagatttgccatgttaaacctccacaagttacatattgctgttagtataacaatctgaccataaaatagatatgatatgcaacaagacgtgacaaaacacgaaaaagcaacgaaatgtggcgtgcggacaaatatcaatttataaacggctcagatagctgttatgatattttccggaaaaagtgacatcttcgccgaaccagccaggagcggtgaaagaatctgcatcgtcttcggtttggaattctacttctacaagcataagaggagcaagatcgccttcgaagatatcaagctctgcggtgaggccggaagaaagcgggattacataccgtttctttttgatcagacgtccatcaatcttgccaagaagatgatgataggattcccggtcaagaggaaggttatattcctgacgggacatcagtccggcagacttgtaagtgagttcgtacttttcattatcacgacggatacgtacaacgggattggtgttcagatacccctgctcgagaaggcggcatgggtaagtttccagctgatccggcagctttgcaacaagatattttcgttctatttccatattataaggtctcctttcatttgcggtgaaattatgatacaacagtttacagaaaaagtaaacggtgatagaatttagaataaataagagatgaggaggataatgaagatgaaaaaagtatgcgtattattggcagacggatttgaagagatcgaaggtctgactgttgttgatctgttaagaagagcaaagatatatgtagatacaatttcaatcatggatgattacatcgtacatggagcacatggaatcaatgtgcagacagaagatttatttgatgaagtagattttgatgaatttgatatggttgtgcttccgggcggaatgccgggaaccctgaacctgaaaaaccatgacggagtcagatatgtggtaaaacagtatgcaaaagaaggaagatatgtgggagcgatctgtgcggcacctactatattaaagagcctgggggtactggaaggcaggagggcaacctgttatccgggtgtggaagatgagatggaagatgtcgtgctgacagagacagcggttgtagtagacgagaatattatcaccagccagggcgttggcactgcaattgattttggactgaaattgatcgagattctggatggcgaagaaaaagcaaaggaaattgcagattccatagtcttttaatagttttttaaaaaatttaataaaaatagaggaaaaaagcggaaaaacaccggatttaagcaaaaacggggactagatatttaccagagtttgtgttatacttctgtggtgaatgtattgtagtatacccgctttttttccgctacccatgaggcgggttagaaacaggaggaaatagtaaatgagtttacaggtagaaaagttagaaaacaacatggcgaaacttactatcgaagttccggccgatgatttagagaaagcgcttcagagtgcatatatgaagcagaagaacaagatcgctatgccgggattccgtaaaggaaaagtaccacgtcagatgatcgagaaaatgtatggaccggagatcttctatgatgatgcagcaaatgcactgatccctaaggcatattctgaagcatatgaagagtgtgaacttgagattgtttcaagaccggagatcaacgttgttcagattgaaaaaggaaaatcattcatctttacagcagatgttgcaacaaagccggaagtaaaactcggtgagtataaaggactggaagtagataaagtatctacacgcgtaactcagaaagaagtagacgctaaaatccaggaagaagcagagaaaaatgcaagagaagttgtagttacagaccgtgcggtagcagacggtgatgaagtaattctcgactttgaaggatttgttgatggtgaagcatttgaaggcggaaagggagagaactatccactgactatcggatcaggatcgttcattcctggatttgaagagcagttagtaggcgctgaagctgagaaagaagttgaagtaaaagttactttccctgaagattatcatgcagaagaattaaaaggaaaagaagctgtattcaaatgcacagttcatgagatcaaagcaaaagaactgccggaaatcgatgatgaattcgcagcagaagtatctgaattcgatacattagaagaatacaaagcagatgtaaaagcaaagatcaaagagcagaaagcagcagacggaaagagaaatcaggaagatcaggctgtagagcaggctgttaagaatgcagaatacgagatcccacagccaatgatcgagacacagacaactcagatggtagaggattttgcacagagaatccagtctcagggaatcactcttgagcagtacttccagttcacaggactgactgcagagaagatgatggaagatatgagaccacaggcaatcaagagaattgagacacgtcttgtacttgaggcggtagcaaaagctgaaaatatcgaaatcacagatgagaagatcgatgaagaacttgccaagatggctgaatcttacaacatggaagttgagaaactgaaagaattcatgggtgagaacgagaagaaacagatgaaggaagatctggcagttcaggaagctgttacattccttgttgagaatgcagtagaaaaataagaacgtcagatcataacatagtatagtatagtatagtatagtcaggaggcatatacatgagtttagtaccttatgtcattgaacagacaagccgtggagaacgttcttacgacatctattcaagattattaaaagacagaattatatttctgggcgaagaagtaacagatgtatctgcaagtgtgatcgttgcacagcttctgtttcttgaagcagaagatccggagaaagatatccatctgtacatcaacagtccgggaggctctgtaacagccggaatggcaatttatgataccatgcagtatatcaaatgcgatattgagacaatctgtattggtatggctgcaagtatgggttcattccttcttacaggaggaacaaagggcaagagacttgcactcccaaactctgagatcatgatccatcagccgcttggcggagcccagggacaggcaacagagattcagatcgcagcagatcatatcttaaaaactcgtcagaaactgaatcagattctggcagaaaatacaggacagccgttagaggtcatcaacgcagatacagaaagagataactttatgactgcggaagaagccaaagcgtatggtctgattgacgaagtcatcaagaaccgctagggcagtcctcagacgaggtgaaaagtatggcaggaaagaacgatgatcaggtgagatgctcgttctgtaacaagacgcagaatcaggtgagaaagctgatcgcaggtccgaatggggcatatatctgtgatgagtgtgtggatgtctgcgcagagattatagaagaagaatttgaatacgagaacggaagagaatggaatccgttctcggatatcaatcttttaaaaccggaagagatcaaagcatttctggatgaatatgtcattggtcaggaagaagcgaaaaaagtattgtcggtagctgtttataatcattataaacgtgtaatggcgggaagaaatatgggagtagaccttggtaaaagtaatattctcatgctcggaccgacaggatgcggtaagacgcttctggctcagacactggcaaagattctgggagtaccgtttgcgattgctgatgcaacagcattgacagaggccggatatgtcggtgaagatgtagaaaacattcttctgaagatcattcaggcggcagacggagatattgaacgtgcagagtatggaattatatatattgatgagattgataagattacaagaaaatcagagaatccatcgattaccagagatgtatcgggtgagggtgtacagcaggcgcttctgaagattattgaaggaacagttgccaatgtacctccacagggaggaagaaagcatccgcatcaggagatgatccagatcgataccacgaatattttattcatctgcggaggagcctttgaaggaatcgaaaaaatcgttgaaaaacgtatcgatcagaaatcaatcggattcaatgcagagattgcagaaaagcatgaagatgatgtggacagactgcttcagcagattcttccgcaggatcttgtgaaatttggtctgattccggaaatcgtaggccgtgtaccggtaacagtagcattggaaatgctggataaagatgcattaatgaggattcttacagagccgaagaatgcattgactaaacagtatcagaagctgttggaactggacgatgtagagcttacatttgatgataaagcactggaagcaatcgcagagacttccctgaagagaaagacgggagcaagaggactgagagcgattatggaaagtatcatgatggatatcatgtataaagcaccatcggatgagacattaaaatcatgccacatcacagaagatgttgtaaaaggaacaggagagcctgtatgtgaacatgcagaacctgactcagaaagtgcataataaatgaaaagaaagacggcgggtgcgaagaataattgtacccgctgattttataccaagataatccagtcggtgaacaggagtgtgaatatatgacaggagaaacctatagtctgcctatggttgccttaagaggacttacgatactgccggaagaggtcagacattttgatgtaagcagggaaaaatcactgcaggcgattgaagaggcggtaaaaaacggccagaagttattcgtcagcgctcagaaggatctggaaatagaagagccgggagcagaagatgtctatctggttggctgtgttgttaccataaggcaggtagtaaaattaccaaaaaaaatgagccgtgtacttgtatccggagaagcaagagcaagtcttgtaagaatggatagtgagacaccatatctccaggcaacggtagtagaactaccggatgatgaagtagtatccggagagcgggaagaagacgatccaatgaaccgggaagcaatgatccgtggattacaggatgtcttcaaagaatatctgttaaagaatccaaagctttcaaaagaacttggcatgcaggtggaatctattcatgatctgaaatacctgacagatgtgattgctgcaaatatgccgttttcattcgaagatgcgcaggaactgctggaagagacgaacgttatgagacggtatgaacttctggtatataagatcgtgaatgagatccaggcacagaaagtaaaagaagagatccaaagtaaggtgaaagaacgtgtggacaagaaccagagggaatacatcctacgggaagaactgaaagtaattcgtgaggaacttggtgatgacaataccatgtcggatgcggatgaattccagcaggcggcagatgcattgaaagcttcgaaagaagtaaaagaaaagctgaacaaagagatcaaaagattccgcaattccatgaattccccggcggaaacaggcgttatccggacctatatcgaaacaatgcttgaaatgccatgggataaaacttgcaaagagcataaagatattgcatttgcaagacaggtactggatgaagatcattacggtctggagaaagtaaaagaacgagtacttgaatatcttgcagtacgggcgcttacgaaaaaaggcgaagcaccgatcatctgtcttgtgggtcctccgggaaccggtaaaacttcgattgcgaaatctctttccagggcgttgaagaagccgtatgtgagaatttcgcttggaggtgtccgtgacgaagcggaaatccgggggcacagaaagacttatgtaggagcgatgccgggaagaatcgcaaatggaatgaaacaggcaggagtcaagaatccactgatgctgctggatgagatagataaagtcagcaatgactataaaggagatacattctcagcacttctggaggttctggatggcgaacagaataataagttcgtagaccattatctggaagtgccgatggatctgtcggaagtgttatttatcacaacgtcaaacagcctgcagaccattccaaggccgcttcttgaccgtatggaagtcattgaggttaccagttatacagaaaatgaaaaactgcatattgcgcaggaacatctgattccaaagcagatcgaaaagcatggactgaaagcagatcagctgaccatcagtaaaaatgcgatctggaagatggcaagaaattacacaaaagaagcaggggtcagacagttggaacgtaagatcggtgatatctgccgtaaatcagcaatggagatccttgagaaaaagaagaaatccattcatgtgacagagcggaatatggaacactatctgggtaaggaactttacagttatcagatggcaaatgaagaagatgaagttggtattgtgcgtggactcgcatggaccagtgtcggcggtgatacactccagatcgaagtgaatatgatgccgggagaaggagaaatcctgctgaccggacagcttggcgatgtcatgaaagagtccgcaagaaccggtatcagttatatccgttccgtaagcaaagagcacgatattacagatgatttctttaagaaacatgatatacatatccatattccggagggagccgttccaaaagacggaccatctgccggtattacaatggcaactgcaatcatgtctgcggtgacaggaagaaaagtacgggcagacctcgctatgacaggagagattacactgcgcggacgtgtactcccgatcggagggctgaaagaaaagcttctggctgcaaaaaatgcaggaatgaagaccgtacttgtcccggcaaaaaatgaaagagatgttgaggaaatttcaacagagattacaaagggactggaaattaaatttgtaacacacatgaatgaggtgctgaaagaagcacttgtatagtcagatcttctggcacgggtcaggagatggatcaaaggagaaatatatgataatcagaaatattaatctggaaaccgtatgtggaatcaccagcaaacttccggagaatacacttccggagattgcatttgcaggaaaatccaacgtaggaaagtcatccctgatcaatgcgcttatgaaccgcaaatcatacgcaagaatatctgcaacaccgggaaagacacagacgatcaacttctataatattaatgaggcattatatctggtcgacctgccgggttacggatatgcgaaggtatccgaacaggagaaaatcaaatggggacagctgatcgaacgttatctgcacgggtcgaagcagttgaaagtagtattccttctgatcgatatccgtcataaaccatccggtaacgacaggatgatgtatgagtggatcgtgtcacagggatttcatccggtgatcattgcaacaaaactcgataagatcaaacgcagccagaaagacaaacagatcaagattgtaaaagaaggtctgggagtgttaccgggaacaatcgtcatcccgttctcatcagtgacgaaacagggacgtgatgaaatatgggagctggtggaaagaaattatctgaatactcaggagaatgaagaatagacagaatccatttcaggtggtaattaatgagataaagtttgtcaaaggattgacaaactttatcttttttgttatgattagactaaagtacaaacgttggtctaaaacgggtaaaaaatgtgaaaataacaagtataataagaggaaaggagaatatcatggatctgataaccaatatccagaagtattctattcatgacggggacggaatccgtacgactgtattttttaagggatgtccgttaaagtgtgtgtggtgccataatcctgagacacagtgcttcgagcaggaaattcagtatgatgcggagaaatgtaccggttgcggcgtatgcgcaaaagtctgtccgaacggcgcggtcaccatggaagacggaagaccgaagctggataaaaaactttgtaagctctgcggaaaatgtgagaatttctgtacacagggaatccgggagatcgttggccaggaatatccggtaaaaacacttgtaaaggaactgatgaaagatctgatgttctatgaacagtccggcggtggagttacactttcaggtggtgaagtgatggctatgtctacagattatgtacttgcgatcgcaaaagctttgaagaaagaagaagtatcgcttacaattgatacatgcggatatgttccatatgagaagttcgaagcaatccttccatatgtcgatacatttttatatgatgtaaaggtaatggatccggaattacataagcaatatatcggagtagacaataaactgatcttagataatcttgtaaaactttcagatgcaggagcaaggatatacatccgcatccctactgttaaggaagtaaatggaaacgaagagaatatgaaagagacgatccgtttcctgaaaaaacacgatattcacccggcacaggttaatttgctgccatatcataatacgggaagcagtaaatatccgaagctggatatggaatataaaggtaatgacttgaatgcaccgacaaaagaagagatggaggggtttgtgaaactcttccaggaagcaggtttttctaacacaaagataggaggttaaagcaatggctgaaaaaagaggcatgaacgaaagaatccagaagttaagagaactgagtgttacaacaccggtacacatcgatctggaaagagcaaagatcgaaacagatttttacaaagaaaatgacggaaaatattctatcccggttatgagagctatggtgttaaaagagtatttttcaaagaagacactttaccttggagacggtgagctgatcgtaggagagaagggaaaagatccacaggcatctccgacattcccggaactttgctgtcacagcgttgaggatatgacagttatgagtgagcgtgatctggtatccttccacacaacagaagaagacagaaaactccaggcagaagagatcattccgttctggaagggaagaactatgagagagagacttctggcttccatgactccggaatggaacgactgttacgcagcaggtatgttcacagagtttatggagcagagaggaccgggacatacatgtggtggagaacaggtatttacaacaggatatctggactacaaagagaagatcaaaaagacaatggatgctcttgattttatgaatgatccggatgctctggataaaatggaagagttaaaagccatggatatttcctgcgatgcagtgatcattcttggtgagagatatcatgaattagcactggagctggcagaaaaagaggctgatccggtacgtaaagaagaattaaaacagatcgcagccaatctggaggttgtacctgcacatgcaccacagacatactggcaggcaatccagttatactggtttacacatctggcagttacaacagaactgaacccatgggatgcattcagcccgggacgtcttgaccagcatctgatcaaatattatgaagcagatacagaagcaggaattctggatgatgagagagcaaaagaactgttagagtgcttatgggtgaaattctacaatcagcctgcaccggttaaagtaggtatcacattaaaagaaagtgccacatacacagactttgcaaatatcaataccggaggagttacaccggacggacgtgacggagttaacgctgtcagctacctgatccttgactgtatggacgagatgaagctggttcagccaaactctaacgtaacgatcagtaagaagactcctgcacgtttcttgaagagagcatgtgagatctcaagaaaaggatggggacagcctgcattctacaatacagaagcacagaccatggagcttatcaatgcaggaaaatcactggaagatgcacgccgtggcggatcttcaggatgtgttgagacaggagcatggggaagtgaagcatatatcctgacaggatacctgaatattccaaaagtattccagctgacactttataatggatttgacaaggaatccggaaaacagctcggccttaagaccggtgaagcaaaagatttcaagtcttatgatgaattatgggatgcattccagaaacagctgaaatattttattgatattaagattcgcggaaacaatgtgatcgagaaattatatgcagagaatatgccggcaccttgtctgtcagtggtaacaaatgactgcatcagcaatgcaaaagattataatgcaggcggagcaagatacaatacaaactatatccagggtgtaggtatcggaacagttacagactgtatcacatctgttaagtataacgtattcgataagaagaatttcacaatggaagagctgcttgaagctatggatcataactttgaaggttatgatgcaatcttccgtatggtacatgacaagacaccgaagtatggtaacgatgatgattacgcagattctgttatgcaggatgtatttaatctgtatcatgacctgatcacaggacgcccgaccatgagaggcggaaaatacggagtagatatgcttcctactacatgtcacgtatacttcggagaagtgatcggagcaactgcaaacggaagaaaagcgaatgtacctgtatcggaaggtatctcaccagagaagtctgctgatacaaacggacctacagctgttatcaagtcatgctctaagatggatcaccttgcaacagcaggaacacttctgaaccagaagtttacacctgatgttgtagccggagaaaaaggtcttgagaatatgtccagcctgatccgcagctactttgcaatggacggacatcacattcagttcaatgtcatcgacagacagacattgatcgaagcacagaaacatccggatgattacagagacctgatcgtccgtgttgccggatacagtgatttcttccgtaacttaagcaaaccgttacaggatgagatcatcaaccgtacagaacagtcatttgaataaaatgaatttgtggggttaacctgaagataattaaaaaataaaaaagtccttaggcaggaatcgtgatgccggctgttgccggatgtgtaaattcttgtttaaggactttttttaggcttgatagcaaaaaatatgatatgatatcagtaaacgtagaaatacggataaaaaatatgttaagaaaagagatggagaaaagttatgaatctaaaaggagtgaatttgaaaaagaaaaggacgaaaattcagatggtgttgacggttctcgttatactgtcggtagtcagacagtttttcctgggaaattaccacaatatgtttctgggaattctgaccctgtttttgttcatggtacctgctgtattagatcagacactgggagtaacgattccggcaggattggagacggtgattctgatctttatcttttcggcagaaatactgggagagatcaacgcattttatgtaaagattcctgtgtgggataccattttacatacgacaaacggttttcttatggcggcaattggatttgcactgatcgacctgtttaacagaagtgaccggttctcgattaagatgtctccgtatttcgtggcattttttgcattttgtttttcgatgacagtcggtgtattgtgggagttcttcgaattttcgatggactggttcttcggactggatatgcagaaagactggatccttccatcgatcaactctgtgaaacttaacccgacaggtgcaaatgttccggtacatgtggacattcagtcggtggtgatcaatggcgaaaaatggaatctgggtggatatctggatattggaatcgtggatacgatgaaggatctgatggtgaattttatcggagcggtggtgttctcgatcatcggaattctatatctgaagcaccgcggcaagggaaaacttgcggcatcactgatcccgcaggtaagagacgagaaggagcagaagcaataaaaagaaccggataagagtagattatggaaaagaatatacagaagatcaaaataaaaaaccaattggaattatgggcattctgtgcggtcattggaactgcggcgggagctttggtctgggcattgctgaagatcatggcaataggaacagaaatgatatgggagtggataccggaaaaaatccatattccgtattatacggtgctcgtgtgtactgtgggcggagccattatcgggatatttcgaaagttatacggggattatccggaagatatggaaacagtcatgggaaaagtaaagaaagaaaaaagatacgaatataaaaatatgctcgtcatgatgatcgcagcgttgctgccacttctgatcggaagcagtgtaggtccggaggcaggacttaccgggattatcgtaggcttatgttactgggcaggagaaaatctgaaatttgcaaaacagaatacaaaggaatattcgcagatcggtgcagccgtttcccttagtgtgttatttcatgcaccgttatttgggatctttgaggtggaggaagatccggatatgcagctggcagaaccgggccggggatcaaagatcttcatatatggaattgcacttgcagccggaaccggaagttatgcgggactttctgctttgctgggcggaggaatgtccgggttcccgtcatttgatacagttgcggtacagagaatcgattatgtgatgatgctggtgtatatgctctgcggatgtgtgctggcatatttttatgagacgacacacactgtaaccagagtcattgccgggaaaattccgggtgtcgcaaaagaaattctggcagggatatgtctgggtgtgatcggtatgttgataccggcagtgatgttttcgggagaagagcagatgggagtacttatgaaagaatatgccggctatatggcaatcgtattgatcggtgtggcatttctgaaagtattacttacaaatctctgtatccagtttggattaaaaggaggacattttttcccggttatttttgcgggagtgtgtctgggatacggacttgcgatgctgttcttcggacagcagggggacagtcatgttgtatttgctgcagcaattgtaacatcgacacttctgggcggtattatgaagaagccgctggcggtgaccatgcttttgttcctgtgttttcctgtgaaaatatttatatggatatttattgcggcagcagtgggaagtaaatgtgtgaagaagatgggaaaagaagtatagtgaaaaaagcacccgttatcagtatgtatttcgatgatgcaaacaggaatacatattgacagcgggtattttttaacggaatttgcggactttctgcgagatatgttccagttcctcttttgaaagctccgggaggcgttccagcttatccatgaacatagcaagcgtttctttttgttgcatttcgaccagttgtgtgtagaagtttacgacaacacctgtgacgatcgcaacgacaaaaatagtgtaaatcgtgagcaggacggaacagatctttccaatcagtgtgacggtaacaatgtctccaaatccggcggtagagatgacggcgtaacaataccacagtgcatcaccatagcggtggatatctggttcgacaagccggataacggcggcatcggccagaaggaagaggacaaaacctaaaagaatatgatctgcccgtgtacgttttaaaattccccataagattctgagttttttcataatctgcttctccttgtatccgtgtaaaaactgatttaagtatatcatgaaatgcgtaaaagtgttcggcatttttgataataaaataaaagtaataaaaaagcacagaacaaacattcggtttagttctgtactttttttctcctgaatgatatactatacaagtaacaatactaaaaatacaactactatttctaaaatatcaccgccagatagagcggcttaggagaaatcatatggatcattttgaattagtatcacaatacaagccgaccggtgaccagccgcaggcaatcgaggatctggtcaaaggctttaaagaaggaaatcagtgccagacactgcttggtgtcaccggatctggtaagacatttacgatggcgaatgttattcagcagatcaataaaccgacgcttgtcattgcgcataataagactctggctgcgcagctatatggagaatttaaagagtttttcccgaataatgcggtggaatattttgtctcctactatgattactaccagccggaggcttatgtcccatcttcagacacctacattgcgaaggattcctccgtaaatgaagagattgataagctgaggttatcggcaacggcagcattgatcgagcgcagggatgtgatcgtaattgccagcgtttcctgcatctatggtctcggtgaaccggagaactttgaacagatgatggtatcgctccgaccggggatggagaaggacagagatgaagtcttgcgtcagctgatagatattcaatatgacagaaatgatatggatttcaagcggggaacattccgggtacgaggcgatactgtagaagttgtaccggcagaccggggcgatacggctatccgggtggaatttttcggagatgagattgaccggatttcagagatagacatgcttaccggagagattaaaaatacattgaatcatattgcgatattcccggcttcccattacgttgtaccaaaggagcgtatggagaaagcaattaaaaatatcgagattgaactggaagaacaggtgaaatatttcaaatcggaaggcaagcttctggaagcgcagaggattgcagaacgtacgaattttgatatagaaatgatgcgtgagacaggattctgctcgggaattgagaactattcaagacatttagcgggacttgcaccgggacagccgccgaacacattgatggattatttcccagatgattttatcataatgatcgatgaatcgcacaagacggttccgcagattggcggtatgtatcacggcgatcagtcgagaaagcgtacactggtagagtatggattccgtctgccatcggcactggacaaccgtccgcttagttttgaggaatttgaaaataagatcgatcaggttatgttcgtgtctgcaacaccggggaaatatgaagaagaacatgaacttttaagagccgagcaggtgatccggccgaccggacttctggatccggaagtagaagtgcggccggtagaaggacagatcgatgacctgatcggagaagtgaataaagagattgccaataaacacaaaatactgataacaacgctgaccaaacgtatggcagaagatcttaccgactatatgcgtgagcttggaatacgtgtgaggtatctgcattcggatattgacacgctggaacgtacagagatcgtgagagatatgcgcctggacgtattcgatgttctggtcggcattaatcttctgcgggaaggactggacattccggagatcacattggttgcgatcctggatgcggataaagaaggatttttgcgttccgagacgtctctgatccagacgatcggccgtgcggcccgtaatgcagaagggcatgttatcatgtacgcagatacgatcacagattccatgcgtgcagcactggatgagacgcagagaagacgtgaagtgcagatggcatataatgaagaacatggtattacaccgaagacgatccaaaaagcagtcagagatctgatctcagtatctcggaaagtggcggcttctgaattacagatggaaaaagatccggaatccatgagtgagaaagaattagagaagctgatcaaagagctggagaagcagatgaagaaagctgcggcagatctgaattttgaggcggcagcagaactcagggataagttaatagagcttaagaagacattacaggaaataaagatatagaaaaaggagatcatagacttacatgccacaggaaaaagattcaagacaatatatcaagatcagaggagcaaatgaacacaatctgaagaatgtagacgtagacataccaagagacaaactggtggtactgaccggtcttagcggatcaggaaaatcatcactggcatttgatacaatttatgcggaaggacagagaagatatatggaatcattgtcttcttatgccagacagttcctgggacagatggaaaaaccggatgtagaaagtatagaaggattgtctccggctatttccattgatcagaaatctacaaaccgcaatccaagatctactgtaggaacggtaacggaaatctatgattatttccggttattatatgcaagagcaggaattccgcattgtccgaaatgtgggcgcgagattaagaaacagacggttgatcagatggtagaacaggtgatggcatttccggaaagaaccaagatacagctgctggcaccggttgtaagaggcagaaagggaacccatgtaaaattactggagcgcgccaggaagagcggatatgtccgtgtcaggatcgatggtaatatgtacgaactgtcggaagagatcaagctggataagaacatcaagcacaatatagagattgttgtagaccgtctggtagtaaaagagggtattgaacagcgtctgaccgattccattgaaaatgtactgaatcttgcggaaggactgatgaccgtggatgtgatcggcggggaaccggtccagttcagcgaaagcttctcatgtccggactgcggaatcagtattgaagagatcgaaccgagaagcttttcgttcaacaatccgttcggcgcatgtccggagtgctttggactgggatacaagatggaatttgacgaagacctgatgattccggataaacgtctcagtatcagtgaaggtgcgatcactgttatgggatggcagtcctgcacggataagaagagcttcacgtatgcgatcctggatgcgttgagcaaagaatatggcttttcattagatacaccgtttgaggactatccgaaggaagtccatgatgtcctgatccatgggacaaacggcaaagaagtgaaagtatattataaggggcagcgcggagaaggagtctatgatgtggcattcgaaggtctgatccgcaatgtagagcgccgttaccgggagacttcgtcggaaacgatgaaagcagaatacgaagagtttatgaatatcacaccgtgttctgcgtgcaaaggccagcgcctgaagccgggagcacttgctgtgacggtaggagataaaaatatttccgaactgacaggaatgtcaattgaaaaactgcagacctttttaaaagaactgaaactttcgaaccagcaattgctgatcggcggacagattttaaaggagatcaattccagaatccagtttctgatggatgtcggacttaattatctgacacttggaagatcgaccggaacactttcgggaggagaggcacagagaatccgtctggcaacacagatcggttccggactcgtaggtgtggcatatattctggatgaaccaagtatcggactgcatcagagagacaatgataaattgcttggaactttaaaacatctgcgggatctcgggaactcagtaatcgtggtcgagcatgatgaggatactatgagagaagcggactttatcgtggatatcggaccgggagcgggagaacatggcggtgaagtagttgcaaccggaaatgcggaagagatcatgcagaatgaaaattctgtaaccggagcctatctgagcgggcggatccggatcccggttccggaagtaagaagaaaaccaaccggatggctgaaagtactcggagcacaggaaaataacttgaagaacatagatgtgaagtttccgcttggcgtgatgacctgtgttaccggtgtgtccggttcgggaaaaagctcacttgtgaaccagatcctctataaacgtctggcaagagacctgaaccgtgcaaggaccattccgggcagacacaaaggcatcgagggactggaacagctggataaggtgatcaacatcgaccagtctccgatcgggaggactccgagatccaatccggcaacctataccggagtatttgacctgatcagggatctgtttgcagcaacaccggatgcaaaagcaagaggctataagaaaggaagattcagttttaacgtcaaaggaggacgatgtgaggcctgcagcggagatggaatcatcaagatcgagatgcatttcctgccggatgtctatgttccgtgtgaagtatgtaagggaagacgttacaacagagagacactggaagtgaaatacaaaggaaagaatatctatgatgttctagacatgaccgtagaagaagcaatgcatttctttgaaaatgtaccaagtatccgcagaaagatggagactttgtatgatgtcgggctttcttatatccgtctgggacagccgtctacgactctgtccggcggagaagcccagcgtatcaagctggcaacagagctgagtaagagaagtacgggaaagacaatctatattctggacgagccgacgacgggactgcattttgccgatgtgcataagttgacagagattctccacagattgacagaagatgggaatacagtcattgtgatcgagcacaatctggatgtgataaagaccgcagattacatcatcgatatcggtccggaaggcggtgacaaaggcggaaccgtgatcgcagagggaacaccggaagaagttgcggaaagtccggtatcttatacaggaaagtatataaaaccaatgctggaacggtagaaatatgacattttgttcaatgcatcgtccggattcgtcatattgtaatatttatgtaaaaaggttcataaagatttaagcaaaatgggtctttttattttaaatgattttgattataatgggaacatgctcaaaaatagcatgtgatataatcatatctcaccaaagataggaatatagacagcttgatgaagggagaattgggaatgtcagtagatcttggaattgatttgggaaccgccagcgtactggtgtatgtaaaaggaaagggtgttattttaaaagagccttctgttgtagcgtatgacagagatacgaatgcaatcaaggcgatcggagaagaagcaagactgatgcttggaagaactccgggaaatattgtggcagtcagacctttgagacagggcgtgatatcagactatacagtaacagaaaaaatgatcaaatatttcgtgcagaaaacacttggaaagcgtacattcaagaagccgagaatcagtatctgtgtaccaagcggggttacagaagtggaacgcaaggcagtggaggaagcaacttatgcagcaggagcaagagaggtacatctgatcgaagaaccggttgcggcagcaatcggtgcgggaatcgatatctcaaagccgtgtggcaatatgatcgttgacatcggcggaggtacatccgatattgccgttatctcacttggcggaacggttgtaaatacatccttaaagattgccggagatgatttcgacgaggcgatcgtccgctatatgcgaaaaaaacataatcttctgatcggtgaaagaacagcggaagatattaaaatcaagatcggtacaacctatccaatgatcgaagatgagacgctggaagtcagaggaagaaacctggtaacaggacttccgaagacggtaacggtaacttcgacagagacagaagaagcactccgggagacaacgggacagatcgtagaagctgttatcagcgtactggagagaacaccaccggagctttccgcagatatccttgacagagggattatgctgaccggaggcggatctatgttacgtggtatggaagaactgatcgaggaaaagacaggcatcaacacgatgacggcggatgatccgatgaaagttgttgccatcggaaccggagaatacgtagagttcatgggtgacagaaaaggaatctagattcagataggaatccgggtgagtgaaatcgaatggaagaaataaaaggatacgtagaacatattgtttaccgcaatgaagacaacgggtacacggtattccatctgaataattcagatggagaagtgacctgtgtcggaagttttcattatattgaagaaggtgaactgttaagactgaaaggaggctatacaacgcataagatgtatggccttcagttcgctgtggaggaatcggagatatgtgagccggaagatctggtatccatcgaacggtatctgggttccggtgcgatcaaaggagtcggagcttctctggcgggaaagatagtgaaaaaattcaaagaagataccttccggatcatcgaagaggagccggaacgactggcagagatcaaaggaatcagtgaacggaaagcaagagagatcgcttcacaggtagaagagaagaaggatatgcggcaggcaatgatctatctgcagaaattcggcatttctacaacactggcagcaaagatctatcagcattacggacgtaatgtctaccgcacgatagaggagaatccgtatcatttggcagaccatgtgccgggagtgggatttaagactgccgatgagattgcaatgaagattggcatacacacagattctgatttccggatccgcagcggaatcttttataccttacaacagagtgtgaatgaaggacatgtctatctgtatcaggacgtgttgctgaaagagacgggagaccttcttggagtacagatacaagatatggaaaagtatcttatggatcttatgatggaaaagaagatcgtcatgaagcagtcagagcagggggtgagagtgtatacttcccattattattatatggagttgaatattgcgaagatgctgcatgatctgaatcttgattttgaagcagctgatgtgacacttcttcacagaatcaatcagattgaaaagaacacagaactgtatctggacgagatgcagaaagatgcagtaatggaagcagtcaggcatggtctgatgatactgaccggaggaccgggtaccggtaagacaacgaccatcaatgcgatgattcatttcttcgaaagcgaaggactggacatctatctggcagcaccgacaggaagagcggcaaagcgtatgacggaagcaaccggatgcgaggcacagacgattcaccggctattggaagtgtccggcaatccggatgatgagacagttggtggtttccagcgcaatgcagagaatccgttggaagcagatgtgatcatcatagacgagatgtcaatggtagatctgccgttgatgtatgcacttttgaatgcgatcgtgccgggaacccgtgtgatcctggtgggagatgtgaaccagcttccgagtgtagggccgggaagcgtactgaaagacattatttcatccggatgttttccggtggtaaagcttacgaagatattccggcaggcaggcgaaagtgatattatcgtcaatgcccacaagatcaatcggggtgaaccggttgtgctggataacaaaagcatggatttcttcttcctgaaacgtgatgatacgaatatgatcatcagtaatatcatcacactgatccagaagaaacttcccaaattcgtatctgcatcagaagcagacattcaggttctgacgccgatgcgaaagggcctgctcggagtggaacggatcaataagatcctgcaggaatatctgaatccgccgcagcctggcaaacaggaaaaagaatatggagatcatctgttccgtgagggggataaggtgatgcagatcaagaataattaccagcttgagtgggagatcaccacccggtatggaatgacgattgataaagggatcggtgtatttaacggggatatggggatcatcaaaaaaatcaatacatatgaagagaccgtgacggtcgaatatgatgaaaagaagcaggtaaaatatccctacaatctgctggatgaactggaactggcttatgcgatcacaatccataaagcgcagggaagcgaatatcctgcagtcattatccctttgttacagggaccaagacagctttattatagaaatctgctctatacagctgtcacaagagcgagaaaatgtgtgacggtgatcggaagtgaaagcgtattccaggagatgatacaaaacacaaaccagcagaaccgcaatacgagtctcgcagagcgaatccgtgaatttaatgaataaaagtatcatacaagatatcaaagaaaatataattgttctgttctggccggaaacctgtccattctgtcagaaagtctgtaaagagggcatctgtacagaatgtagggaaaggctggaattcttacgaatcagagaaccaaggtgtatgcaatgcggcaagcagatccgtagtatggaaaaggaatactgttatgactgtatgcatacacatcattattatgagcagggattaagcttatggaaccataaagctcctgtgaatcaatctatctatcagttcaaataccacaatcagagaagatacggggaactgtacagtcaggaactcgtgaaaaattttcagaaagaaatccggcgatggaacccggatgtgatcataccggtcccgctgcaccgggcgagacgtagaaaacggggttataatcaggcacagattcttgcggaaaacctgggaaggatgctgcgcattccggtggacagtaaaagcctggcaagaagaaagaagaccagtccgcagaagaaacttggacataatgagagaaaaaagaacctgaaaaatgcatttgcggtaacaccggcatttcgccctgtccggaaggtattgctggtggatgacatatatacgaccggcaatacactggatgcggcggcaaaagcattaaaggaaaaaggcgtggagaaggtttattttttaactataagtattggacaagggtactgatatttgttatacttaaaatgatgtttttatggaattaatatcatgttgaggtggatatatgttagatgagagaaaagtaaaattaatgacaaagcttgctctctatgaagagacttatggaaaagaagattttaagatcagttcctattatagaaaagattatgcaagcctgcacgttatatatgcatttctgagcgtatcagtcggttatgtgtgtctggtggcgctgcttttactggccggtgtggaggatataatgagtaatatgtcgaatggtctgatcctgttcctttttctgatcattctggcaggctatgtgggtgtggtgatcgtatattgcggaattgccagtcacatttataatgagaaacacaaaaaggcaaggaaaagagtgaaaaagtataatcataatctgattcaactgctgaaaatgtatgaaaaggagaaaagatagatggacaatatatatgtaatacgtgaaagaatagaagcggtttatgggaagcattcaaagtcgtttgataaagcctttcagttcatactggcaatgataacatttacaatgatcaatcagaatacaggatttatgaaatcactttcctcaccggtgatctctctggggctggctgtggttgctactttcctgccgccggcggttatggtggtgcttgcaacgatactgctgcttgcacatacactggcagcgtccataggcatattcgcagtgtctgcactgatcttcctgattatgtatatattttatatcagactggcaccgaaaatggcatttgttgtgcttctgacaccgattgcatttgcacttaagataccgtttgtggtaccggttgcatgtgcattgatctatacaccggtaagtcttgtaccgatgggatgtggaactgttgtatattatatgatggaatatcttaagaaaataagtgcggcatctaagacgtccggaagtaaggcgatgcttgccgagatcagcacatacgtacagaaagtgttccagaataaagaaatgtggctctacatagttgcatttatcattggattttttatcatttataccatccgcagacaggaactggatcatgcctggaagattgggattattgcgggagcaattgccaatgtggtcgtaacggcaatgggaagtattgcactgggcgtaaacacctcctatggtccgctgatcataggaaatattgtggcagccgttgcaggacttgtgctggaattattcctgttctcggtagattatgcaagaagtgaacgtctgcagtttgaagacgatgaatattattactatgtaaaagcaataccgaaggttgccatgacaacgccggagaagactgtgaagaagatcaatgaacgtcaggagacggagatcatcgatgcagaagcggtaaaacgtttgtcgcaggatacggcggaagaagagacaaaagccatcgatctggaagtacatgcgggacatggacagaaaagagaagcagaacggaagccgtcatatggtgatgcagactacagaagtccggcacagatccgggcaagtcaggcaagaaagcattcgccgaagagaggaccggcaccgaagaaacatgacatgaaagatgtagataagatgcttctgacacagagcctggaaaatgaatttcatgcaggcaaccgcagaaaaagatagaaagacagaaaaaatcattaaaaaccatgcagggaggtgagaggaatggaacagacaatagcagattttattgataaatatggaattggactttatattccgagagtgcatattacagatatcatagaagttctgatcctcacttttctgatctatcagatcatcatatggataaagaatacgaaagcgtggatgctgctcagaggaattattgtacttgcgggctttattcttctcgcagctgtattcaagatgcaaacgatcctgttcatcgcgagaaattcactgacggtcatggctacagcggcaattgtagtatttcagccggaactgcggagggcactggaaaagcttggagagaagcaattcctgacatcagttgttccttttgaacagaaccgggagatacgtttcagtgaagagacaagagaggatattatccgtgcatgctttgccatgggaaaagtcaagacaggggctctgatcgttgtagaacaagcaatacggcttacggaatatgaaagcaccggaatccagatggactgtctggtatcaagtcaggtgctgatcaatatcttcgaacataatacgccgcttcatgatggtgcgatcatcgtaagaggtgacaggatcgtctcggcgacctgctatcttcctctctcggataatatggggatcagcaaggatctaggcaccagacaccgtgcggcagtaggaatgagcgaagtcagtgatgcactggtcattacggtatcagaagagacaggagctgtgtcagtcgcacagggaggagagcttacaagaagtatcaatgaagcagaacttcgtgtgaagctggaagaggtacagcataagagcagtgaaaccaacagaataaaggcaatgtggaaaggatggcggaagcatgcgaaaaagaataactaacaatcttgcgctgaaaatactggctttcctgattgcggcattcttatggctggttgtagtgaatatcgatgacccggtggatgacaagacattttccaatatcccggtgcaggtaacgcatgaagaagtgattacggataataataatacgtatcagatcgtggataacacacaggagattaatgtaacagttacagcacagcggtcggtactggataagatcagggcagaggatattgttgcgacagcgaacatgaaagaactgacgcttcgtacacaggtgccgattgaagtaacagtcaaaggatatacaggaaaatatgaaaaggcaacggcaaatccaagaaatctgcagattcagatagatgaggaagcgaagaataatttcccgatcacaccgacaacaacaggaacggtaagaaacggatatgaagtaggaagtctgaaagcacttccggaaaaagtaacacttcgcggaccgaagagaatcattaacaatattgcaaaggtaacagcagaagcaaacgtatccggattatccgaagatgagacggtagaagcaaaactggtactgtatgatgcaaataataacgtgatcgaccagacacttcttgcaaacaaccttggaaaagaaggcgtcagtgttgaagtagaactgcttcaggtgaaaagtgttccgctcaaagtggatacatcagaggtgtcggcggcggaagggtataaacttggcaagatcacggtagaaccgcaggaagtggaagtgacaggtgataagagtacacttgcaggaatctcggagatcgatattccaccgagtgccctgaaattggaagaactgacacagagaacggagcagaccattgatatctcatcttatcttccgagcggtgtgtcccttgcggaagagaatgcgaataaggtggtaatatccatccaggtacaacagccgggaacaaaaagctttgagatatcgacaggatcgatcattctggagaatatagcggacggactgagcattaattacggatctaccgttgatctggagatacaggtgaagggaccgaatgatgtgctgaatctgttctcgcctgcgaagaaagtcagcattgatcttaagaattatacagagcctggtacatataccgttccggtgtctgtcgaattgccggatggctgcacgcttgtgaatgaagtgaatgtggagattacgcttgaaaactcaaagcagagcagtaaaacacagggggaaatccagaacagcagtcagacaaagacagatgaaaacaatcagaacggccagagcgaataacagacagaaatggggagaatacattatgatcagacagaaagttacaataacaaatccgacgggactgcatctcagacctgcagggatgttctgtaacatagcaagcagatacaaatgcaaagtagaattcatgtataacgatgacactgcagcaaatgcgaaaagtgtattgagtgtccttggagcatgcgtgaaatcgggagatgaaatcgagcttatctgcgacggggaagatgaagaagaggccatgaaagcaatgatggatgcggtcgaaagcgggcttggagagtaagaaaaagtaataaggaaatatgacag

SEQ ID NO: 2807 - DNA, 21896 bp, Unknown
  gut microbiota DNA sequence
attgtttctaatatccttttgttggggaaactcctccatgtctaccacgacaccctcaccgaatttcttatgctttacaatcatgccttctccaagtgcatctgcgagttcctgatagctttttcccggttgcttctgagagccatgatacattccattttcctttacgccatatgtttccgccggactataatctccccatttctttattcctgcatattctttttgccgattctctctcagattcctctttcccagcagctcactgcagaatttagacggcttattcgtcgtaaatacattcagctgattctttgccctggtcacacctacatagaaaagtcttctttcttcctcgtaagtttcaagttcttctttcgatgccgtccgcggatttaccagaactttttccggcagtatcccatccataacatccagaagatagacggtatcatattccagtcctttactcgcatgcatggtagacagaataaatggacagtcgctttccgtcttcttttcccggatgatctttctaagctcttccagacgttccagtaatttttccggagagtctaccctgcttccaatcatcttgacaatctctaatttatttgcattcatgcccattttcttcagataatcctgataacccatatatgtcagtatctgatcaaccgcctcatcccctgtcatctttaagatgcgttccatctgccgtctcagattacggatattatcctcctgatacttttccagattatcatacttaagtaccgcatccagaaccgccatatctttctccttgctcaagttaacatatcttaaagcatcttccttacggaagaacaatttcaatctgtaatatatctgcatgaatctgtcagtatctttcggattcattgcaaaccgtatgatattctctacatccagaaccgtacggtgtgtgaaaaaagacagctctgcattccgcatcctgtacggaatattcttcctctccaaaagatctatcaacggaatagcacactcgttatcccggtatagaaccgccgtctccgctttccgtgcatccataccgttcttttgcaggctgctttcccgggtcatacattcctgtgctaccctcatcagatatacatactctgcctttctggattttaaagaaatttctctgatatccgtccctgcctctcttgcaggcttcatatgtttttcatgacgaagcgtatttttctggatgaatttatccgctgcctccacaatcttcgcattcgatcggaaattttcttccatcagaagtacctttgcacctttatgattcttttcgaacgacaacaacgcttccggataagccgcccggaatccatagatactctgatcctcatctccgaccataaacagatttcccgattctgtcgccagcaaagcaatgatcgcatgctggatttttgatgtatcctgtgcttcatctacacagatatacggatacaatttctgaaaatacgccagaagtccaggatccattctcagcatcttatatgcatacaacatctgatcatcataatccatcagattctgcgcacgcatctgactacagtattcacggtagattcctgcaatccggatatccgactcttcttctaacttctgaagttcttcttcggtcagcatcatattttttatatatgtgatcaacgttcttacattcttaagatcactctccgtcagatatcccatgccatgatcctgacagattctgatcagcatccctgtcgttgtcttttcatccttcaccagttcgaatggtgtctttccaatccgtcttccgtaatactggataatcctcgcacagattccgttgatcgtcctaaattccagtctctttgccatatcctcgccaaaacggactgcaaatctttcggacatatcttttgtcgctgccaccgtatatgtaaccgtaagtatgctctccggaggaatattcctacagtagatcatataaccaagacgtgtcaccagtaccgtggtctttcctgatccgggtacggcaagaagcagtaccggcccttttgtgctctgtactgcttctttttgctgttgatttaattttaccgaaaatgttgtttcaaattctttccattccatacttctttttatgttaatttgtgaatccacttatagctcctaaatcgtaaaaataccggaattcctttgaacaactgatccgactgcactgcagccacgaccagttccacagggcgtttccacacgaatgccgccaaaaatgacaacggcatcacgattccccatgtagagatcatattcgtgtacatagagaactttgtatctcccccaccttgaatgacacctaccgataccggcatctgatatgacattcctaccataactatgctcatgatcataatgaaatgatctgcaagaactgctgccttatctgtcagtttatacatggataacagcggtcctctcaatacaaataacaacgaagcaagcactacaccgatcagaagatccagcactgaaagcgttcttccatcagatttgactctttctatatctccctctccgatatctttcccgatcacaactgcagatgcagatgatatggcgattacgatcaccttcagatactggaagaatgtgctggatacagaatttgcagcaattgcatctgcagacaaatgtccgagaattgccgtctgcatcggtaccgagattgcccagatcatccccgagcacatgattggaaatgcaacttttaagaatgccctccatatctttctattctccggcgcaaatatgattttgatcagattgacgtcaaataaccggactttcgtatctatcttccatacatacaccacaatgatcaatagttccagcattcttgcagttaacgttcccactgctgctcccctgattcccatctccggaaatccaaaatgtccaaaaatcaatgtgtaattgatacaaccgtttgtgatcaatgacactactgatatgacaaatgaaatcttcactacctctacacttctaagcatggcaatcagcagattacttatcatgaaaagtaaaaatgtccacttcagaagccccaggtatgcctttccttctgcaataatctcaggtgacgtcgtaaatattcccaaaagcctctccggcatgcacgtacaggctgtcacgaccactgcagcgatcaggatactgagtgccagtgctattcctgtcagcttccggatttcctcagtctcctgctttccccagtactgagaacagattgctaccagtgcatttccaatagacaatgccagctggttcacaataaagaatatctggttcaccgttgccgcaccggacaatgcattctggctgtaacttccaagcataatattatcaagcatattcacactgtaagccaccagattctgaagtgccacaaccagcatcaaccggaaaaatgtcttataaaaatttttatctcttgtaaaaaatgttgttcttgtagtttccattatcttaacagatttcttaccatttctgcatcaaatgtaacagatttcacatgatctacctcaatctgatacagggcattcgccgcaatgtgttcagccgcctgctccagatcacggattccggatgtattagaatataacttgatcaattcatccaatccttcctcactcatgatacactcgtcttccttaaggctcattctctttaataccttcggaagtgcgaatttggagaagatcactttcttctcttccggtgtgtaatcagggatatcgatcacggcaaatcgtgacatcagcggtgcactgatctgagacttgtcattcgcagtcgcaatcggatatacccctacggtcggaatcatacactcgatatagttatctgtaaatccaagattatccagtaatgtcagaagtacatcggccggattgccatttccttttccggatgctgctttatccagctcattaatgatgaataccagatttgattctcctgccatggcaaatgcatccatgatgatacctgtctttgcattggcatagatacgagaacttcctgtcagctgctcaggatcattgatcgaactcatatccagagtcgtccatggaagcttcaggatacgtgccaccgcataggcaatctgtgatttaccggttcctgccggtcccactaacagaagtccatatgccggcaatgtatgtgtacggttgatctggattatggtctcgatgattctctgctttacgcgctccattccgtaaagttcttcatcaagaattctgcgcgcttcatccggatcgatcgcttcaaaataattgctcttccactgtacattcatcataatagaaagcgctctctgtgcatgacgtctttcttccggtgatacttcatgagaacgtgccacggcaagattacgtcttgcccaaaggcggatattatccggaagggttcttcccgcacagttcatgaagtctgtgatactctgaagactggtaagcttcatatcatctcctgcttcgtcttcatcttcatcattctcctcttctgccggtgcattacttgccagaagacgctcgatcataaattgcaggaatccatcttctgcagataactttgtaccgccgccaaatgcaatctcgcggatcttgtatactgcatatccttcttctgtattctctcctgagagacgcacattaatatgattctctccgagccattttaacagacttacaaatcttgcatcgatctttaagatgtctgcacttacggttccgtcttcctgctgaaattcgaatgatgtcctcttgatcggattggtaaatacgccgcaggaatgatgttcccatttacattgcttattatccaggatcatcattggtttttctatagttgcttcattttcactagagcggattaccgtatatgtacattccgctggtttcttctcgtccggtgttgcgttaaaatcaaaaactggcatcgtttgttctcctttttgtatattcttacattgtcatgcataattattgttcttactgcattagtgtaacataacatactcgcttcttccagcgctatttgtcaggcagcctgcctaactcattgcgcctcctcagctggaacctgcccctgctgtacatgcataacaatgcttatccatccggatttttctcacctgatatggctctccagtcacatcaaatatagtctgtccgccgttcacaggcattcccgcagctaggttaaaatcgcagtcatacagctgtccgtcataatctactgaaagttgtgtcctgcacatcaaagcttccactgtatctgcattgaatgcatcaaataatttcttcatataacgattcagattccctgattttcttaagaacgctccgaatcttcccatcggattattatacaaagtgtaaagactattgaattcaattccgaaatcctgcaatagcttctgcttatattctttttccattgcttcctgatcaggcggaaagaaagctcctgccggattatagaccatattcagtacgagttccggattgcgcccatatcccattgcattcagacgccgaatcactttgattgctttatcaaacgctcctgcaccgcgtactttatccatctccggtgcacgataatacggaagcgaacataccacttctactttgtttcttgcatacacttccatgagatgttcatattctttttcaagaagaatgaccaaatttgttcttactatgacatgcccgcaaattttactgctttcttctatcagatattccagatgcgggttcatctccggtgctcctccggtaatatctattgttacaatcttctgctcttttgcaaaagtaaggcaggcatccatcacctctcttgacatctcttctgtccgcgcgggacccgcattcacatgacaatgtttgcagatcagattgcattttcgtccaatattcatctgcaatacatccagatattcttctgtatccatatacttcttatccgatatcatctgctggaatggcgggatctctgtcaaatcatgaaaatccttaatgatatcatccattacataacctctttcagtatctcgatcgtatctttcactacttccgggcagaaatcaaacaaaagaccttcagccagtatcttctgcatatcttccggatccgcaatatcatgctttaataatcctttgcaactgcacgaagcatatttttttccgaatttttccagaaattctgctctttttgcattcataatctctttctgttccatgtgttctgtgtcaaaatgtccatatttcattcccaaaacgatcattgcaccgactactgcaccgcaagtctcgccgattcccattccgccgccaaatcctgcagccatcttatatgcttcttcctgtgtgatccccagttcttctgcaaatgcccctgctacaacctgagaacagtcaattcctttcataaaaagttctgcaattctttctttttccatctcttttctccttactcacacttacgttattgttccaaaaacatttctattttttctaaaaatccatcactcagataatcctccagcttccgatatgtagattcatttataatcagtttatccggctgctgatactgcacccatgccattgcgcaccaggtgattcctcttaagcatgtaatctccataaatactttcgttcgttcttttaatcccgttatatcaaaacgcgcccccacacatttcagatattcattcagaaaatttcctatctcttcttccctcaatatcacatccgttttccaaaacgtcgttgtcggtgcaaggaaatgtcccagatcctgtgccggatctccaaataacggcttttcccaatcaatgagatagttcgactttccttctcctccaatcaagaaattcgtggaattcagttctgtattaatgcagcattgatacggtgaatcttccatatggaattcttttgcctttttccatgccttatcaagcaaatctcggattttccttttcatcctgtcttttccaagcggtgaatccatatatatcttcaccatctcttcgcactcttccaatattgcggtcagtggattctctggccgaatcaaacccgattctgattccggtattctgacactatgtatatcagccagacactctgccgcatattttaaatccgtatgatagtctaatgcttttcccggcagatattccattaccagtactccgtgatctaaaaatttcctgctcccatctacataaagcacttttggcgttcttcccgatgcttccagcaattgcagtgcatgacattcatacccaatctgattttccagatgcatctgactcccacaattgacacgtaacagaagttttttccctgtctttggatgcgtgaagctgtaattaacattatactctccctgtgcaagcattgtatattcttcttcctgttcattcggaagatttaatgctttcctatacttttcatttttcacatattcatttaatccttttatacgttccataatcccgatcccctattggctatattgtttcctgacattttatcttacatctttatataacttcgatatcgtctctatcggcacaccatcccggtacatttttcttagccggttcatcttccacatcacttttaactgcggaatcacctttttagggaatctccggtctgacgtatagattctgtgcctagcaatgccaagctttactcccatttcctttaacgtaagcgaaaactggtaatcttccataatcggaagagccggaaacatccccgctttgaagaacagttctcttgtgataaaaatcccctgatctccaaacatcacttttctgtcttttatcctatgatttgaaataactctgcatgtccacataaaaaactgtctggaatgaaatgcaatgccaaagcatcctgcttcatgatcttttatcactgctttgatttcttccagcggtcttttcggaagttcactgtcactatgaagaaagaaaagaatatctccggtactttcttttgcgccaagattcatctggttcgccctgcctttttccgaatgcagtactttaaatcccggtctgatcatcgacaatgttgcgtctgtactcccaccatcgactagaatgatctcacactttccctgtaagttttctaattgctcctgcagtttctctatcgttgtctcttcattatagatcggcacaatgatagaaatcttctgtttttttagcaggtaacgtccagtatgtgtgttctgaagtaacttctgcctcctcatccggctccgatacgccgtaatatcatctctgtcatccatatcctgcaatcttcttacatatccgattgtcagtcccatttcctgtaatggctgcacggtctgctccagtacatttcctgttccatatgtcttcttttcaaacacttcacataccggtcttttcattccgaccagataatacccttcgtctacggtgggaccaaagactacatcatttacatccaaaagcctgaacgcatactccaaatccgaacatttcagttccggtatatccgttcctattaatacacaggaatcataccctttttccagtacatattcgattgcctgatacatcctttctcccagaccttcccctgtctgggaaatatattcttttgctttcctgaataatttttccagatatgctttccctttttccggtgtgtagcatacgaatatgtcagcatttactttttcgcattcctgtgcaatatctttcagaaaattttcatgaagttttgcacattcttccggcgaaaaatatggcatcattcttgtctttgtctgtcccggaatgggaactctggtaaatacgatcactgcccatttcatttccgtcgttatccccttatataaattttgttttcatcctattcaacatcgatttccctgtatcggctttttcatctgtttctaatatttctgtcaaaatatgagtgacattcttacatccgttccgatttagattgcctgcacaggacgcacaatagctgtaaatcttctgcccgccactgttttttaacgctgctcccatattttttgcaagttctggttcttttacaggggcacagccacctaagccacaacactgtacctcttcgattggagtcagctttccttctatgtattgctctatctctcctaacagttctttcttttccctgtcagggcatggaaggaacacctttgccggaagcagattcttctttccgattccgaattcctcaagcttttcataaatgcttacaacctttacttcttccattcttggttttaaatatgcatagcagttcggacaaagcatgattacttctttgatttttcttttatgcaattctgattgtatctgacttataatccttttttcatcctctttcatgccaagttctacaatcggctttccacagcagtcatatgccactcctataccatattttttcagttcatttaccagcctcttggtcgtctttggataaaaagaaggaaaattacatcccggaaacagaatactttccccttgtgcatgtctgtaattccgatatatataatcttttttttcttttaacagcatcccatatcctttttcttccaaagttccaccggatttttctactttttctctccggagatttagaatatactctcttccatcaatattctcagggcatacctctgtgcactttccacacaggaaacaatgataagaaagctcttttaacttctctgtatctccgatatctattccgtactttttcaaaaattcacactgattctggcagacgtgacaatgggtacacgcttctactgtattgttatccttcatttttttcctcctgcacataatgcttcttaaggaacgcaccaagccctattacaatcccagccagaacaatcgctatcccgatataaagaatacggttctctttgtctgcaagtcctgccattccaaccgtatacatagctgttcccggaagcatgaagatcaaagaacaaatggaatatgttgaaaacttaatgtctgtcacaccataagcaaaattctgcagattatacggaaataatggaaccagtcttgtgatcatcagaataaatacttcattatttccagactcatcaaataaccatttttttaaatatttgttcttcatcgccatcggcttaataatgtcctgtaagaaaaatcttcctacaacaaatgctaccatagccccaagtgtagtcgctacggagcaacagatggttccaagtaccggtccaaataccagacctgcaacgattgcaaatgtcacccccggaagtgcaagtaccacacagcttatgatggtaagtatggtatagatgccaatcgccaacactaaattttcctgtaccatattttccaggaatttcagattctctgtatttcccagataagaagaccagccaaatatgtgatttaatatcaaaatcagaacgataatcccgataaatatccacaattttttatgtttcattcttttttgtccccactgcaattccatttctgataatctgcatcagtgtcgctgccccaagaaacggcattaaaaagtaatatgcaggaaacgattctatagatttcaacactgtaatttccaaataactaattcctaatatctgcatgatcacaatcattacaaaatctatctttcccaacaattcttttttcttcctatatcccacaatacttaatacgataagtacaatagcagcaactataatatattttagtatatcataaacagggttcttctggatctgcatattctgataattcacccacctgagcatccccagtttttttcttgtaaaatattggaacgcatatcctccgatcaaaaacgctatagttaataaatctaaaaatatataaatgatttttttcattttactccttaatactaccaaacgctgtcaccaatatccagtgacagcgcccctaatctttgtattatattttcgcagaaattctctacactccctgctttgttttattttgcggcttttcctgtaggaagttctccaactgttgtgtgaacacaatcatcacttgccggatcaccaacctgtaccggatagtcatcatgcattaaccactcataccatccaccatcatacacagaaatgttatcatatccattttcataaagtacaaggaatggtacggttgctctccagcctgttccatcatcatttgtaaaccataacagattctttcgaacacctatctttactctgttacaaaagctgcggatacgtctccgtcttttgctccattctcaatgataaataaattatctgtatcaaatcctgcatctttcattactgaaattgctgtttttgcacatttattaccactgtagcagagaatatatacaggctcatccttgtccatcttgtcttttgcaagattgtacatctctgtctgtgcttccggtgtatcaaattccttcaggctgcactgaagtgttcctttcagatgacctgctttataagtatcatcatcacggacatctaaaaattgtacatctttatctcctaccttgtcaacggcatcctttcctgctacatatttccagtcgatgttttcttctgtacggtctgtagtcaatgccccattttctttaccaagtgcttctgctccaccttctactgtatagatggatgtcggttcaattcctgcatctcttaatacacctgttgctttttcagctccacgttttccactgttgcagataagatagatatcttttccgtcattcagatgatctttggcataagttgtcatctcatctaccagggaatcatcctccaatgggaagattgggcaccactctgaatttgcaactcttcctttggaataattttcccattctcttacatctaacacgtgaactccgtctgcacttactgtatctgccgcggatacatactggtattcatcatctgccagttctttcttttcctctgtatcctttttatcatccgtctgttctgtcttcgtatcggatgtcttatcatcagccttggatccacatccaacaaccattgttcctgtcattgcagctaccagtaataatgtcacaattttctttttcatcttatttttcctcttttctttttttttaattaaaactccagtttctttacaatatttttcatctgtaccccgtgtacaagacttgctccgccgcggatcgccgctgctacatgtaccgcctctgtcatctgttcttcgctgacacctttatccaggcagtcgttcgtgtaagcatcaatacaatatgggcactgtacggtatgtgccactgcaagtgcgatcaatgatttctctcttgcagtcagcgcaccctcttcgaataccgcattgtaataagcaaagaatttttctgccaactctgatgctttttccccgattgtcccaaactttgcaagatcctccggattgtaatatgtttccatgttctttttcctccctgttttttattttccggactgtctgtccatatatatctttctcagcataaaaatgaatgccgaaatagcaaacaaaatcaatagagctgttacaagaagtttcgctccgccggtcagcataccgcccacataagaatagacgatggttgccggtaactgtccgactcccgtagcaacaaagaatgaaacaaatgacatcgaagtaagacctgccgcataactaacaatgtcaaatgatacaaacggaagaagacgacagattaaaatcgtattctttccgtaacgttcaaaaaatgtatcaatttgtttaagacctgttttacttgttaatttttctgccacgtcacgtcctaatatttttgcaatataaaagcatattgctgctcccaccattgcgctgctccatgaaaggatcgcacctttccaccatccaaacaggctggcattggcaaatgtaattaaaaatgccggaagaggtgctgcgattgactgaaaaatcatcaacaagaaagatatcagcgccgcatatcccccatatgacgcaacaaaatctcttacaactgtaaagtctccacttgcaaacatcttaaatatacggttcattgtcttatgtatctccggtacccataaatatgcagcaatgcataccagtaaaactataatcagggttcccttttttatcccatcatttttctttttcatatattcccccttcattcatgacttgcatgctattattaaatataatcttaccaataaataatctgtctgtctaattgtgtttattgatatgttttcattacttatatattatttctatatatacatactttcattaagtctctgccttataccggacaccaatacaaagcacatagagaaatcgaatctttaagatttttctatgtgcttattttttacttatccttattcagtttcttttcccagcctgatattttccattttcttcacaaattcctcatccgcatggtcaaacagatagttcctgtcactgacccgttgtttttcattatcttcttcaatcaatttctttgtatattcaatctcttctaagaaatctctggaagaaatacgggttccaccctgccccatcgtgattacctgctctaccccatcggaagtcacgaccgtcacatgatactttcttccgatatgatgaacgaccttttcaatgtactgatcggcagtttcggcttctttggtatatacgacatggatattatgatacttctggatctccagtgcatagccttctaccttgtatgcatcaaataccagaatcaggacacatttcttatacccctgataattacacaggatatccatcagtttgtctctggcagcctcgatgctgacttttgccagttctttcagctcttcccatgcgaaaataacattgtatccgtcaaccagcaggtattcctgcatagcctcttcttttttgcgctgctttttcgcatactcactttcgtaagtttttggtgtcagtccaccttttctttctacttttccatatgtgcggataaagatttcttccagttctttttctgctgctttagaatagactcccggtgttctggctgctctcggtacctgtcttgctgcctgctctgactgcctctttgcttcttctaatgcccgttctttttcaagctgattctccaaatgcatgtactctggcacttgattccatggaacgttaaatcctgcaccatgggaacagaagacggatcctgtcggattctcgatatcgcgctccggatcataagcaatctcttcgatcactgcctctgcgttccgacaaggttcatagccgcggaacgtacaggtcagatgtccctgtcctcttgtataggaattcacttccatctgataatcccgcatacctgtaaccggtgcatatccctcgatcgtcgtcatctctccttctgtctgcggtgtaccggtctccccattcatccgctgaatatctgtaagtgcccgtccgatcattcccgatggaatttccagctgaaaatcataatacggttccagcagcatactttcggcctgcatcagtccttggcgcaccgcacggtaggttgcctgccggaaatccccgccttcggtatgtttcagatgtgcccgtcctgccgtcagtgtgatcttcatatccgtgatcacagaacctgtcagcacacccctgtgttctttttccagaagatgggtaaggatcagacgctgccagttcttgtctaacatatcctcactacaatctgtcccgatcacaataccgctgcctctttctcccggttccatcttcagatgtacttccgcataatgccggagcggttcgaaatggcccacaccttccactgtattctggatggtctctttatatacgatatttcccgtatcgaattccacatctacaccaaacctgtctttgatcagactttttaatatctcgatctggactgctcccataagttttgcatggatctctcccagttcttcattccatacgatcttaagcattgggtcctcttcttcgagtatgcgcaaattcccgagcattttgtggacgtcacacccctccgggagttcgatcttgtagcttaagacaggctccagtgccggtgcttcggaatcgcattctatgccaaggccttcacctggataagtataattcaatccggttactgcacataccatgccgcttttcgcttcctgtaccatctcatatttttcaccggaataaatgcggatctgattgaccttttcttcccagctgttcataactgtctcagatctatcttgtgcaaggtcggattccttcttactctgctgctttcctgctattccggtcaatgtatcttttaccttcaaagttccggatgtcactttcagatacgtcaaccggctgccagctggatctctggatatcttgaaaactttcgcgccaaaattacttgtattagtatctgtgctatttatctgctcattcttttcaacataagcagtcatcccatccatgaattcttgtacgccttccatcttcagcgccgaaccaaaataacacggatatgctttcctgttaccgattatctcagcaattgtatcctcttctactttctccgactccagatactcttccatcgctttctcatcacacatggcaagactgtcatacgtttcttccgttatctccgaaaaatcgatacacccttcatccagtctgttctgcagatctgccagtacctttgccttatccgttcccacctgatccatcttattgatgaatatgaacgtcggtatctgatatcttttgagcagtctccaaagcgtacgcgtgtgtccctgcaccccatcggcaccattgatcaccaggattgcataatccagcacctgtaaggtacgttccatttctgcagagaaatccacatgccccggtgtatccaggagcgttatccccagatttcccatctttaattctgcctgcttggaaaagatcgtgattcctctttcccgttccaattcgtatgtatccaaaaatgcatccttatgatccactcttccgagctttctgatctgcccacttaagtaaagcatacattccgataatgttgttttcccggcatctacgtgagccaggattccaattgtaatatgtttcataatttctttccttattatctgtcgttatcagtcactattaccattacttatcagtattcttttttacgatattcttattatacatcataatttatattttgtactttttttcataattttgcaatttactattgttttttcctaaaaaatctgtttgactattagtgaggacatattaaaaaaaataataaataagcgaggtattgttatgaaaccaataaaagaaggtaaagtccgtgaaatttatgataacggagacagcctgattatggttgccactgatcgtatcagttgttttgacgtaattcttaagaatattgtttccaagaaaggaactgttctgacgcagatgtctaaattctggttcgacctgacaaaagacattcttccaaaccacatgatctctactgatgtgaaagatatgcctgaattcttccagaaaccagaatatgacggtaacagcatgatgtgcaaaaagcttgagatgcttccaatcgaatgtatcgtacgtggttacatcacaggaagcggatggaagagttatcaggagaatggtactgtatgcggcatcaaacttccggaaggattaaaagaatcggataagcttccagagccaatctatacaccatccacaaaagctgagatcggagatcatgatgaaaatatttcttacgagcagagcattgcccaccttgagaaatatttccctggtaaaggcgaagaatatgcagccaagcttcgtgactgtacgatcgctctctataaaaaatgtgcagactatgcattaagccgtggtatcattatcgcagataccaaattcgaatttggtcttgatgaaaatggtaatatggttatcggtgatgagatgctgacaccggacagctcccgtttctggcctgtagaaggttatgaaccgggacacggacagccgtcgttcgacaaacagtttgcacgtgactggctgacttctcacccggataatgactggaaccttccggatgatattgtccagaaaacaattgacaaatatcttcagtgctacaagatgatcacaggtgaagaacttgcttaattcccctgtattcagagataacgaactccttgccgttttctcgatcatctgatcaggtagcaatgcagaggatctgccaccggcagtttctcttgcatatttcagtatgaatactcccgccgggactgccactctgacagcttctgcgggagttttattataatacatgaactacctttgaacattatttcttcatcttcggctcaaagacaagcgatgccagatagccaaagataagtgctgcagatattccaacggcacttgccttaaatccgcccataaatatcccgatgaatccttctttatctacagcttctttgacacctttccacaaaagattaccgaatcccaataatggtacgctggcaccggctcctgcatattcctgaatcaccggatatatcttcagtgctcctaatacagagccgctgcacaccaaaagcaccataatccttcccggcatcagctttgtccggtccagcaatatctgtgtcagtgcacagatcagacctcccacccagaatgcattgatataatccatattatgtttcctccctgtatgtttttgtctaacagtgttccagcacgattccatgtgcaattcccggaacacttgctccctcattgtaactgaccgtcgacatcagtgctcctgtcggaacgaacagtaccctcttccactcaccgcttgcaatggcaggcaggatatacgccgataacgttgctgcagcacatccgcagccacttcctcccgcatgggtatcctgtctgctctgatcaaatattgtcatcccacaatccatatgtctttctttgatatcgtattctttttcccgcataagatcaaataatatactctgtcccacatatccgagatctccggtaatgatccggtcataatcttcttcttttctttcaaaatcttccagattctggatgatcgtatcgcaggctgccggagccatacatgcgcccatattctgcgaatccttcaagccataatccacaatcttaccgaccgtcactccggtgatcctcacatgactcctgttctttccaacaataaatgctccacttccggtcactgtccattgtgcagacagcggtctctgattcgcataactgagcggaaaacggaattccttttctgcacttccgaaatggctggatgtcactacgagcatccgctctccgtatcctgccgccacacacatcgatgccagggcgagtgcctcccctgacgttgaacatgcaccgtacagaccaaacatcggtatctgcagctgttcaactccaagtgatgttgccactccctgccttagcagatcgcctccgaacaaataccgaatggctcctgccgtcagatgtgctttaccaagtgccagctgacaggcttctttctgcatactgctttccgctttttcccaggtgtcctccccgaacatatcatccagacccaccatatcaaacctgctgccaagtggtccttccccctctttcttaccgacgacagatgcactttcctcaatatacggagatgccttaaatgctatactctgctttccttttatcatattcttatatcctcctgctatatttccatacagattatcctgcaactcctgccacttttagcagccaatagaacagtccaagcagccagcttgtaaatatcccatacaggatcaccggtccggcaatggtaaatatcttgcacccgattcctataacctgtccttctttcttgtattcaatcgccggtgctgccactgaattggcaaatcccgtaatcggtaccagcgctcctgcaccgccccactttgcgatctgcggatacagattgcatccggtaagcactgcactcagaagcaccagaagcatcgaacaccagcttccactcatatccctgcccagtcccgctttctcgcagatattcagaatgccttgcccgatcacacagatggcaccgcctgtaacgaatgctttcgccatatttaccggcagattatgcaccggtgttttctgcctgacataattttcatatgactgttgttgttttttcttctccatatcatcaccacctcttccagaaaaacaataatgcgcccagaccttttccaaatgcgattccaatcatcaccgctgcaatccctcttaccatacggattctcctgataaagatcggaaacagatccagcatttccgtcaaagccattgcccagcagcccacaaagattcctccgaacagtcccataaccggaagcagacagcctgcgaacggaaccgccggatgatacacagaaataacggcgcccaggcttcctccggctgcaaccgcatcttcatataacataacctgttctcctgtatgtgtccggtcggcaaagtccgatatcacacccaggcctatgataaaagaaaaaagtccgcctgccgccgtaatccctgcactaaatcccagtagtgccagacatatgtttttcgccaacatccagttctttctcctttctggaatatgtctctaccagcgttgtctgtatatcattctcgtaaagacgcatctccacctccatcggtgtcggatctacagacaatcgtttttttccgaaatgattgaagaatgtcagaattcctatcacaataccaatacagtatgtgaactccaggattgtaaatccatctgactttgtaccggttaaaagttcatatacctgtccaaacattctggtcacacctacatcattattgaatgccattgttgaaaatgctgcaccaaagaaactgatcagtactacagccacaatcttaacgccatggatgatcccgccttttccatcctgctcctcatacgtcacgataaaatccgtttctccgatattttctactgctgcatccggatagatctcatggatcttctgtatcactttcagaagtgataccactgttctacgctgtctcttatcatccggatgatgaaaggtcagcagatgaatgctccggatcctggcaagcattgccgggtctgtacactctatcttcagcacatcaccgatcatcacggatgtctttgccacctcaacattccgatctgcctttatatatacagtgcctgccttccctgccatctttcttcacctccgttttttcatcttgatagtataccgtcttctttaccaacgttccttcatttactccgtgactgccttttacatcatgaaaataataaataaatcctatgatcactgctgctgtaataacaaagatcaggcacatcctgatcttctttctgccttcttccaacattctcaccctttcttcccatgctctcttttaccggatctcatgagttagtatgccggattctgacaattctatgcatggattccatacatagaatcgatccctgacgtgcctgttataacttctctcttaaattttttaatatcttcttttccattctggatacctgaacctgtgaaattccaagttcttttcctacctgtgtctgtgtcttttccgaaaaatatcgtagatagatcagctttctctcgtccttatccagatttttcagcagttctttcaatagcagatgatctacaactctttcttctgccgcatcagcctgaccgactttctccatcaatgacatttcctgtccttcttttttacagacaggtctgtgcagtgattccacatccgtacatgcatccattgccatcgtcagttcttccggtgcgacctttaaatcttctgcaatctctgcaaccgacggctctcttcccagctcttttccgagcctttcctgcgtctgatacgctttgtatgacagttctttcagtgaacggctgaccttgatcattccgtcatctctcaggaaccgcttgatttcaccgctgatcagcgggataatgtattatagtggaaattttgaaatttcctttatccaatagggtaattatcttgaataagatatatgaaattttacacgcaagaagatgtatccccttgcgatgtattaactatagaaatgtattttactgtcgtgtcaaaagatcattatactcgatttcaacataatcattcgatattttgatcttcttgatatattcacgtacagtcttttgtctttcattgaaagacatgaactcccagctgtcagcaacacttttgaatgctttcgctcttgctgccatatctttagctcttgtgttctttaaggtgtactgttcaatctgtgtattcagattttccagttccttgttaatctcaccaatcgtctccaacaggacattgttattggtatcagatgcatataaattatacaaagatttcagctttccttcaagaactgtttttctctggttcatagcttcaaatcccttttgattttgctgttctgattttccctcaattatttcatattcttttgataatttcagcatatcattaacaacaacttcttcaacttcagctgcatctaactttccattctgacaattaggattcttaaccaggtgcggcttgct

SEQ ID NO: 2808 - DNA, 52814 bp, Unknown
  gut microbiota DNA sequence
cattattcttttctgccctttcatatatttccacccaacagaaaaaccccggaaaccttacggttccggggtatcttacgtttggacacaatgtaccttgcagtactctatttatataattaagatgttatgctaaaattattcgatgattgtagcaacacgtcctgatcctacagtacgtccaccttcacggatagcgaaacgaagtccctgctccatagcaactggatgaatcagttcgattgtcatttctacgttgtcaccaggcatgcacatttcaacaccttctggaaggtcacaaacacctgttacgtctgttgttctgaagtagaactgtggacgatagttgttgaagaatggagtatgacgtccaccttcgtcttttgtcagtacgtatacctgagctgtaaatttgtgatggcatgttactgaacctggtttacaaagaacctgtcctctttcgatttctgttctctggataccacgaagaagagcaccgatgttgtcaccagcctgagcttcatcaagaagtttacggaacatttcaacacctgttacaactgtcttcttagtctcttcgtgaataccaacgatttctacttcgtcagatacatgaagaacaccacgctctactctacctgtagcaactgtaccacgtcctgtgatagagaatacgtcctctactggcataaggaatggcttatctgtatcacgctctggatctgggatataagaatctacagcatccatgagttccatgatcttgtctccccactctgagttaggatcttcaagagccttaagagctgatccctggatgattggagtatcatctcctgggaattcatactcgtcaaggagttcacggatttccatttctactaattcaagaagttcgtcatcgtcaaccatatcacatttgttcatgaatacaacgatgtaaggaacacctacctgacgagaaagcaggatgtgctctcttgtctgagccataacaccatcagtagcagctacaacaaggatagctccgtccatctgagcagctcctgtgatcatgttctttacgtagtcagcatgtcctgggcagtcaacgtgtgcatagtgacgtttctctgtctcatactcaacgtgagctgtagagattgtgattccacgttctctttcttctggagctttgtcgatattttcgaaatctacagcagcgtttccttcaactcttgctgcaagtgtctttgtgatagcagctgtaagagttgttttaccgtggtcaacgtgaccgatagtaccgatattacaatgcggttttgttctttcaaatttagctttagccattttgaatatcctccttaatttagtgccatatggcatattaacaaattgttcgtttgctcggctacatttgattatatttcaaatgtagcactttttcaagcattttataaataattagtcatttttgctggataaaatcttctcctgtacagacttcggtactggctcgtatttctcgaagaacattgagtagttaccacgtccctgtgttctggaacgtaagtctgtagagtatccaaacatttctgacaatggaacgaatccacgaacgatctttccaccaccgaggtcatccataccttcgatacgtccacgacgtgagttaatgtctccaataacatcacccatgtactcttccggcatagtaacttcaactctcatgataggctcaagaagaaccggagatgccttcttcatagcgtccttaaatgcaagagaacctgcaatatggaaagccatttcacttgaatcgacttcatggtaagaaccgtcatatacgttagccttaagaccaacaaccgggaatcctccaaggataccagactgcatagcctcttcgataccttcacctacagccgggatatattccttcggaatagctccaccaactacagaagattcgaatttgaatgtttcctcaccgttaacatccattggctcgaatttaactttacagtgtccgtactgtccacgtccacctgactgttttgcatatttgctgtcgacatcaactggttttgtaaatgcttctttgtaagcaacctgaggagcacctacattagcttctaccttgaactcacgaagaagtctgtctacgataatttcaagatgaagttctcccattccggcgatgattgtctgtccagtctcctgatcagtatgagcacggaatgtagggtcttcttcagccagttttgcaagagattcaccaagtttaccctgggaagcttttgtcttaggctcgatagcaagctcgataactggttctgggaattccattgattccagaattacaggatgctgctcgtcacagattgtatcacctgttgtagtgaatttaaatccaatagcggctgcgatatcacctgaatatactttatcaagctcttcacgtttgttggcatgcatctgaaggatacgtccaacacgctcttttttattctttgtagcattcagtacataagaacctgagttcattgtaccagagtaaactctgaagtatgccagtttacctacgaatgggtctgtcataatcttgaatgcaagtgctgagaacggctcttcatctgaagaatgtcttacaacctcattaccatcctcatccacaccatcgattggcgggatatctgttggtgcaggcatgtactcaaggattgcatcaagaagtttctgtacacctttgtttctgtaagctgaaccacagcaaacaggaactgctgtacactcgcatgttgcttttctgagtgctttcttcatatcttcaacagatggttcttcaccttccagatactgcatcatcagatcatcatcaagatcgcagatcttctctaccatttctgtatggtaaagttctgcatcatctgccatatcttccgggatatctgtaacagaaatgtcatctcccttatcatcgttgtagatgtaagctttcatttccatcaggtcaatgattcccttgaagtcatcttctttaccgattggtaactgaagacaaatagcgttctttccaagtctggtcttaatctggtctactgcattgtagaaatcagcacccaggatatccatcttattgatgaatgccattcttggtacattgtatgtgtcagcctgacgccatacgttttctgactgaggctcaacaccacccttagcacagaagacgccgacagcgccgtccagtacacggagtgaacgctcaacctctacagtaaagtcaacgtgtcccggagtatcaatgatattgatacggtgctcaagagctccctttttaggttttgtgaactcttcgagtgtccagtggcatgttgtagccgcagaagtgattgtgatacctctttcctgctcctgttccatccagtccatggtagcagtaccttcgtgagtatctccaatcttatagttaacaccggtatagtacaggatacgctcggtaagagttgtcttaccagcatcgatatgcgccataataccgatatttcttgttctctctaatggatattctcttccagccaagattttttcctcctataattagaaacgataatgagcaaatgctttgtttgcttctgccatcttgtgcatgtcttctttcttctttacagatgcgcctgtattgtttgctgcatccaggatttcgttagccagtctttcttccattgttttctctcctctagcacgagagtatactgtcagccaacgaagtgcaagagtctgtcttctctcaggtctaacctcgatcggtacctggtagttagctcctccgatacgtctagcctttacctcgagtactggcatgatgttattcatagcctcttcaaatacttcgatagctggcttttcggcttttgcttcaactctttcaaacgctccgtatacgattttctgtgcaacacccttcttaccatcaagcataatgttgttgacaagcttggttaccactttattgttgtataccggatccgctaatacgtctcttttctgagtatgtcctttacgtggcacggtccttccctccttaaacatcttaatttaattcatcggtactcacatgtgtctttctaatgatactgtgtagtgcatagggcatacatatatataccttgcaacttacataatcatagttctgtttgtgattacatttttaattggtttgaaatcttatctgttgtctatgcaatagatttatttcttagcatcttttggtctcttagcaccgtatttagaacgagcctgtcttctcttagcaacacctgctgtatcaagtgttcctcttacgatatgatatcttgtacctggaaggtcttttactcttcctccacggatcagaacaacactatgctcctgaaggttgtgtccttctcccgggatatagcttgttacttcgattccgttagacagacgtactctggcgatctttctaagagctgagttaggtttcttaggtgtagcagtcttaacagctgtacaaacacctctcttctgtggtgcagaagtattcgtacttctcttctttaaagagttgtatcctttctgaagtgctggtgctgtagacttctttacagatgtctgacgtcctttttttactaactggttaaatgttggcatttctttcacctcctacgattataataagttgcttattcatcttgtgaatagtcgtacatcaaaacaaaacgttcccatgcacgcttgtttagtttattacgaatcatgattcttgtcaagggatttcccttgatttttcacgttttttgccacttttttcttttcattatatttcgcgatctgatgctttatcaggctaaacagcacgatacctgtcagtatgcctgcgctgtcaatacagacatccctgaactgacagctgcgcccgggcacgaatagttgatggaattcatctgttgctgcgtatgccgtacctgcacaccagcataataatctgttcttttttccccgatcttccgcaaaagagtacgcagtccccagcatcaacacaccaaggactgcgtattccgacgcatgcgcacatttgcgtaccggaaaatctatcttttccgcaaactgttcctgcttatcttccggccaggatctgtactccggaatcacgatatttccaatcaactttccgacggagtggctcattaccgtcgattcatctgctttttttgctgaaaatgaaaaaatcaccatcagccagatcagcataagaaacagccagatgattccggccttatttctctttctcctgtttcccgccatattctttcctgtctttttcttcctgttcattcacatgcttttgatatcatacctgcggttatatcccggatattacgccttaagatctgcaaacagatctttctgatatacaccgtctgcaatcagttttgcaaacgactctactacaaccggtttgtcttctttataagttacgccaaaccatttgtcctgtgtctccagaagtctgacacttacttttccctttttcagaagttcatcaatatagatcgggagcaaatattcacctttcagttcttttgcttcatcccctttgatattctcaaagaattctacaaatccttcctccagaagtcctacaaactccggtgtcagtccccacatgttcatcgatacatgtgcatttacatcaattctatttccctgagattctgctccgtctgatgtctttttgatttcataagtttctacgacatctgtcagataatcattctcatctactgcacaaattcctcttgtaacagttccattatcacttaaagtattgccgagaatgaatccggccatgcaaagttcttttgatttttccggtgtataattttccacaaggaactcatgaatctttacaaatgcttcttttccataatagtcatctgcattaataactacgaacggctctttgataatatctttacataccagtaccgcctgtcctgttccccacggcttgcttctcttggccggcttttcaattcctttcggaagatcatccaactcctgatatgcataagcaaattctatgttcaattcattacagattccttcaattctttttccgatcgcatcatgaaatgcatctctgatatccttacgaatgatgaatactactttattaaatccggcctctattgcatcatgaatggaataatccataataatctccccatttgggcctaccggttccagttgcttaattccgccgccaaaacgcgaacccattcctgcagccatgatgactaatgctgttttcataattctctttctcctttgtttatttgtcttttttacagttaaaatcagtatagcacaaaaaagcgggatataccatgactgtttatcatgccatatcccaccctgttcatttctattctactgttacactctttgcaaggtttctcggtttatctacatccagaccttttgctactgatacataatatccaagtaactgaagcggaataactgcaagtgaggttgcaaaatgagggtctgtctttggaatgtatacagaaaaatctgcgttttcttcaatattataatgtccaaatgttgtaagtcccatcagatatgcgccacggctcttacactctaccatgttgctcagtgtcttttcatataattccggctgtgtcagtactccgataaccagtgtaccctcttcaatcagggaaatcgttccgtgcttcaattctcctgctgcatatgcctccgaatgaatatagctgatttctttcatcttaaggcttccctcaagggaaatcgcataatcaattccacgaccgataaagaaaatgtctttcgcattcacctgtttggatgcaaaccactgaagtctctctttatcctcgataattctttgaattttctccggaatgctctgaagttcttcaatatatccggcatactgttcttctgtaatctgtcctctgatctttgcaaactgaattgcaagtgtataagctgcgatcaactgtgtgctgtatgcttttgttgtcgcaactgcaatctccggtcctgccagtgtatagtatacattgtctgcctctctggcaatagaagaaccgattacattcacgataccaagtgtctttactccctgtttctttgattctctgagtgctgccagactgtctgcggtctctcctgactggctgataatgactaccagtcctttcggatcaagaatcggattacgatagcggaattctgatgcaagttctacacgtaccggaattcttgccagatcttccatgacatactgtgctgccactccgacatgatatgccgatccacatgccacgatataaatctggctgatctctttgatctcttcttccgaaagtccgacctctgaaagatcaatcattccgtcttttataacagaattcagtgtatctgaaactgcctttggctgctcatgtatttccttgatcatgaaatgctcatatcctgatttttctgctgcctctgcgtcccattcaaccgtctttaattctttttcaatctcttctccatccaggttatagaatgtaatctcacctttacggacacgtgccatctcctggttaccgatatagtatacatctctcgcatatttcagaattgcaggaacatcggaaccaatataggattctccgttcgcaactccaaggatcatcggactgtcctttcttgctacgtagatttcttccggataatccctgaacataattgccagtgcgtaggagcctctgatccgtaccaacgcatgattgatcgcatctaccggagtcccctcatattttttataataataatcgatcagttttactgctacttccgtgtctgtctcagaatagaatgtataccctttacggacaagtttatcctttaattcctgatagttttcaataataccattatgaacagccacaacatttccatcatcacttgcatgaggatgtgcattattctcagatggttctccatgtgttgcccatcttgtatgaccgataccgcaggttccttttacggattcaccatcattcgtcttctcagccagaactttcagtctgccttttgccttaatgatctctgcatctgcactgccgtcacgtacagcaattcctgccgagtcgtaaccacgatattccagttttgacaaaccatccaacaagatcggtgctgcctggtgttcacctgtaaatcctacaattccacacataattcgatttttctccctgtattattcttaatataatctattccatttctggtatttatgtatcttatctctgcctcaggtccgctgctttagccgatcacatatccttttttcttaactacatctacaacctgatctacatattttttacagatctcttctgtctctgcttctaccataactctgagaagtggttctgttccggattcacgcacgaggatgcgtccggtatctccaagggcttctgttactgcccgtaccgcgctctgtacatccgcatcgtcctgcgctgctttcttatctgtcacacgtacattctccagaacctgtggataaatatgaagcccttccatgagttcactcattttcttctttcttgccatcataacttccatcatcttaagactggtaaggataccgtctcctgtggaagcatattttgagaaaataatatgaccggactgttcccctccgagaatgcatccattgtttgtcatatattcgtatacatatttgtctccgactgcagtctttgcataatcaatccctgcctcatcgaatgctttgtataatccaaaattagacataactgttgtaacaaccgtattgttttccagtttgccacgttctttcatatattttccataaatataaagaatcgcatctccatctatcagattccctttttcatctacacagagacatctgtcagcatctccgtcatatgcaaatccaacatccagaccattctcggcaacaaatttctgcaggccgccgatgtgcgtagatcctgcattgttattgatattcgttccgtccggctctgcattgatcacatatgtcttggctccaagtgcatcaaatacagactttgccagattccatgaacttccgttcgcacaatccagtccgactttcacacccttgaaagaataaagtccaagtgaaatcagatatccgatgtaacgatttcttcctgatacatagtctaccgtacgtccgatcttagatgtatgtgcaaatggaatctcctcatacttttccccaaatacttccagtttgccatccagatagtcttctaccagtgcgatcgttccctcatccatcttctcgccattaccgttgatcagtttgattccgttgtcataatacggattatgacttgcagagatcatgatcccgcaatcaaattcatccgttcttgccacataagcaacagatggtgttgttgtaacatgaagcaggtaagcatctgctcccgatgcaacaagtccacctaccaatgtatattcgaacatgtagctggaacgtctcgtatcctttccaattacaatacgtgccggtgtatcatcaccattctgacgttttatttctccatagtaccatccgagaaatcttccgattttatatgcatgatctgctgttaagttattattggcttcgccacggaaaccatctgttccgaaatatcttcccatatctattctcctaaaataatatatcgtctatctttcacaaagcaactgcccccattatagttggtattagactcaagttcaagcaaaaatggcaaaaaagtatgcatatgtgcaaagacaattgcttctatgcatacttttttcattattacccggttataattccaagttccttttcacagagttctaacgctgatgctatgacagcatccatatcataatatttatattccccgagacggcctccgaagatcactttctcttctttttccgctaattttttgtattctgcgtacaatgctccatttttttcatcattgaccggataatatggttcgtcacccaatttccattcagagctgtattcccggctaatcacagtctttggaatatcatttccttctgaatcctttccaaattcaaaccacttatgctcgatgatacgtgtccaaggggtctctctgtctgtatagtttacagctgcattcccctggaaattcggcttgtctaaaagttccgtctcaaatcttacagagcggtactccaacgttccgagtttatattcaaaataagcatcgatcggtcctgtataaactactttttctgccagcgcatctaattcctctttatgctccagatattctgtgttcagacggatctctatgccatccagaagattctctaccatcttcgtgtaccctcccacaggaattccctgatacattgcattgaaataattattgtcgaatgtcagacgcaccggaagtctcttgataataaatgccggaagttctgtgcagtcacgtccccactgcttctctgtataacccttgatcaatttctcatagatatctcttccaaccagtgaaactgcctgttcttccagattctttggctctcccgtaatttcctttctctgctcttctatcttcgcctctgcttcttccggtgtcaccactccccacatcttgttaaatgtatacatattaaaaggaagtgaatataactcacccttataattcgctaccggtgaattcgtaaatctgttaaactccgcaaactgcgtgatataattccatactttcttattatttgtatgaaaaatatgtgcaccatacttatgtacatgaattttttctacatcctctgtatatacatttcccgcaatattcggacgtttatcgattactagcactgattttcccgcttttttcgcttcacgggcaaacactgccccgtataatcctgacccgactactaaataatcatatttcttcatcattgtatacctctttttattttctgatacctgtcacaatctatctggtagtgttattctatcatatccttgtattcccgaaaagacattcttcgtttcccttgctttattccactttatcacgttaccaaaagattgcatttctttatcagacatattatactatttaaataacgaattcgtacaattagaggtgatatgattatgcataaagaatttttaatgggaaatgcagcaattgccctcggtgcagttgctgccggagttaatgtcgtagccggttatcccggaaccccttctacggaagttctggaaactatagcaaaacaccggccggatgatgtgtatgtggaatggtccgtgaacgaaaaagcggccatggaactggctgccggagcttcttatgccggtgcaagatccatggtaaccatgaagcaggtcggattaaatgttgcttccgatccgctgatgagtctcgagtacgtcgggatcaaaggcggaatggtcattctcgtagcagatgatccgggtccgatttcttctcagacagagcaggataccagacatttttccagattttccaagctgccttgctttgacccatcttcggcacaggaagcttatgagatgatccaggaagcttttgaatattcagaaaaatacggtactccggtattcttacgtccaaccacatgtgtctgtcatggctacgcgtctatcatggtaaaagatgagacagcatatacccaccaccagccggaaggttttatcaaagattccaaacgctgggttatctttcctagattatctttcatgaatcacaaaaaaatcgaagcacgtaaccaggaattatccgatatcttttcttcttatgagaaaaatacgattcatccatcctgcgatgctttcaagaattcaaaaaaaggaatcgccaccggagggatcagctatacctacacgatggaaacattaaaaaagaccggtatggtaaagactttaaaaattgccacgcctcatccatttccggaaaaattagcagtagatttcctttctggacttgatgaagttctctgcctggaagaacttgatccggttatcgaacgtgagctgatctatatatgcggaaaatatcatcttccaaccagaattagcggaaaactcagtggtcatactgcctgtgccggagaaaacacccgtgacactataactacctatattaatacattccttggtcttacctcccctgtcaccactgattttccggaaccgccggcactgccggtccgcccgccggtactttgcgccggatgtcctcacagagcttctttctacgccgtaaaaaaagctatgaaaggaaagaaaaccgttttctgcggggatatcggatgttatacgctcggaaatgcccttcctctcgatatggttgatacctgtctgtgtatgggtgccggattgaatatcgcacaaggtatcgaaaaagtggaacctgacaccacatgctttgcgtttgtcggagactcaaccttcttcgcctctgcgatcacaggtgttgtcaatgccgtgtacaatcaggcgaatatgatactgatcgttctggataactctaccacagccatgaccggacatcagccacaccctggaactggccgcacagtgatgggggagatcgtgcaaaagattaatatcgaacaagtcctccgcggaatcggcgttacagatgttaagactgtaaatccgctggatctgaactcatctgtagcatgcgtccgggaaatggctgataagacaggtgtaaaagctattatattcaaatcaccatgtatagccatcaccaagccggagttttctcttcatatagatgccgaaaaatgtatcggatgtaaaaaatgtatccgtgaacttggatgccctgccattgtacttgacaacggtaatgtctgcattgatgatacgatgtgtaccggctgcggattatgcagtcaggtatgccctgcagctgctattataggaggtaaaaaacatgaataatcaaaaaaacattgtcctgtgcggcgtcggcggtcagggaaccgtcctcgcttccaaacttcttgccgcagcagctatgagtaaagatattcctgtcatgagtgccgagaccatcggtatggctcagcgtggtggtagtgtattcagtcatcttcgtatgggtgataatctctattcgccaatgatcgaaacaggaactgccgacctgatcatcggcttcgaaccaggtgagacagtccgtatgcttccctatctcaaagaccacggacatattgttgtcagcacccgagctgttaaaccagttactgctaccttaagcggatcagattatgatgcacctcagatgcttgaatatctaaaagcggctgttcctaatctgactcttgtaaatgcagatcaggcatgtgcagacattggttcttccaaagtactgaacatggtgcttcttggcgcagccatacggactggagtactggactttacaatctctgaaattgaagacattatgaaatatacacttcccgagaaattccatgaaatgaatctccgggcattaaactataacatataacaaagaaaggcaggaacacgacatatgcagattacagagacacaaatcgcacaggtaaataatcagatacaggcgctcctgaaagcggaaagtttctatggaaagaaattagaagaagccggtgttaccagtatacagtcagcggaagattttcaaaagcttccgttttctgagaaaaatgatttaagaaatgcttatcctcttggtctgatgaccgcaccggaagaaaagattgtccgaatccactcttcttccggtaccaccggactgccggtcatcattccatatactcagaaagatgtagacgactgggcaatcatgtttcaacgctgctatgaattggccggtcttacaaatctggaccgtattcagatcacacccggatacggactttggactgccggaatcggatttcaggcaggtgccgaaagattaggaagcatggttattcctatgggacccggaaacaccgacaaacagcttcagatgatgatggatatgaagacaaccgttctcggttctacttcctcttacgccctgcttcttgcagaagaaatccaaaaaagaggaatcaaagacaagatccatctgaagaaaggaatcattggttctgaacgctggggtgaaaaaatgcgccggcgcatcacggaagaacttggaattgaactctatgacatctatggtctgacggaaatctatggaccgggaatcggaatcagctgttcccatgactgtggtatgcactactgggatgattatatttacattgagatcatcgaccctgtaaccggtgaagtacttccggacggagagctcggagaaatcgtcattaccaccctggtcaaagaaggagcacctcttatccgctaccgcacacatgatctttcccgcatcattccgggagaatgtccttgtggaagcagattcccacggctcgatactattatgggacgtaccgatgatatgatgaagatcaagggtgtaaatgtgttcccagctcagattgaagaaatcttaaaaggattttctgaagtatccagtgaatatcagatccgcatttctcatcttgacggaaaagacaccatgcgaatctatgttgaaacaaatggaacggttgacttccttgatcttgccaaacgaatcgcagctaccgtcaaaagccgcataggctttacaccgttagttaaagttgttgaaatcggattattacctcgaagcgaaaagaagacaaaacgtgtcatcgatgagcgttatgaataattaatgatatattaaaaatggtgttgtaagatctatatttcttacaacaccatttttatactttgttataatcctaattcatcagagatcgcacacatttcttccaatccgatatcaatcaggtcctccaacatcagccctgtaaattcaatactttccatgtaatcacgattggcacctttcgcaaatcgtgcttcattaaaacgttttataacagactttctttttacacttgcaatctttttatccgggtaaatctgcgcaaccgcttttaagaaaccactcattggatctgccgccagaagtgcatattggatttttgttttcgctttcacgccacttttcggattatgtgcacagatcgctccaaataatacaggatcatcaattccttctttttttaagatttctaccgatgtcggtccgtgtacacttaagtcatgctcccagtcacattgctcttcatccagatcatgcagcaatcctgcaattccccaatattccacctcgtccggcgcaagacgtttggccaatcccttcataatagcctcaactgccagagaatgtgtaatataattctcacctttcatgtattttgttaagatttcatacgcctgatctcttgtcatctgcattttctccatttctgtgcgaaatatgtattctgatattttactcttccggtacaacgatcaggtcttttgtaaagtcattcagaacttcacatccatcttctgtgatgattacaaggtcttcgatacgaacaccgatgttctcatccgggagatagattcccggctctactgagaagcactgtccaaccttgatgatgtcagtattaacagatgatacatcaccaaattcgtgatcttccagtccgatagaatgtcctgttctgtgtgtgaaatactcgccaaatcctttttcctcgatgtaatttcttgcagcaaggtcaacgtcgcacattctatttcccggtttggcagcttcgatacctcttctgtttgcttcaactacgatatcataaatttcttttgcacggtcagatacttcaccgataaatacagttcttgtcatatccgatgcatagttatctttaaatccaccgatatcaagaattacacaatctccgcgttttcctttggaatcatctgttacatgatgtggatctgcagcgccatgtccgtatgctgtaattggatcgaacgatacatcttcacatccgatttctttgtaaatttcacgcatttttgcatttaattctttctcagttaatccttttgctacccatggaatgatcttttccatagcaatatcatttaacttagaagattttctcataagatctttttctttctcatcttttaccatacggatataatcgatgatcggagatccatttacaaatttacttcctccgcctaactcctgcagacgaataaggaattttgacggccatgttttatcaattcccattgtcttatctttatctacatacttgcttaagatctctactccgtcttcaatgtcatcataatagataatatctacgccaagatctgattcctgtggaaataatttgttgattaccattttatgatttccgttcacattcagatacaatgccagaagtctttctcccggaaaaatccacttgcctgtcagatagaagatcgcaaccgggtcagaaacgatcatctgcggaacctcatgctcctccattgattttaatattcttgtaagtttaccttgatccataatagaaccccaacctttcttaaaatgttgacagaatctgttactattttcgccgattctcactgacaattattataaactttttgaatataaaagtcaatttatatatacaaataacagtaaacattagcgatatcatcttatttttcactaaaaaagaaaatgtccacacttttcagtgtgaacactttctttttatttgacttatattttattcttcatcttcagatacagcaactgtttcttctgcaatatcttctactgcatcttctgttccttcatcaagagtaatctcctgattcatctcatctgcatctttgaattcaaaatcaaaatcgtcctcaaaatccagttcgtcttccatttccatctctgtgttcaacttgatgtcacgatactttctcatacctgttccggcaggaatatgtttaccaatgataacattctctttcagacctaccagcggatcaaccttacccttaatagcagcttcggtcaggacttttgttgtctcctggaaggaagcggcagacaggaatgaattcgtagcaagggaagcttttgtaatacccatgatgatctgctcacctgttgcaggttctttaccttctgcttccaaagcttcatttacatcctcaaactcaagtctgtcaacatttgttcccgggaggaattctgtgtctccggactcttcgatacgtatcttcttcagcatctgacgaacgataacctcgatatgcttatcgttgatttctacaccctgcagacgatatactctctgaacttcctggatcatgtaatcctgtacagcacgaagtcctttgattctcagaatatcgtgtggatttacactaccttctgtcagttcatcaccggcttccagttctgcgccgtcagccaccttgatacgtgatccataagggatcagatatgctttggattcacctgtttctttatttgtcacaatgatctcacgtttcttcttcgtgtcatttaagttagcagttcctgcgatttctgtgataattgcaagtcccttaggctttcttgcctcgaaaagctcctcgacacgaggaagaccctgtgtgatatctccaccggctacaccaccactatggaatgttctcatagtaagctgtgtaccaggttctccgattgactgtgcggcgatgattccgacagcttctccaacctgtaccggctcacccgttgccatgttggatccgtaacattttgcacatacaccactatgtgaacggcatgtaaggattgtacggatcttaatctgtgtcagcggctcgcccttctcgtcaacaccctttttacagatcagctctgcacgtttcggtgttaccatgtgatttgcctttacaaggatgttaccatctttatctacgatgttctcacagatataacgtcctgtaatacgatcctgaagactttcgatcacttcgtttccatccatgaatgcttttacatacattccaggaatcggtgctcccggttttgcacagtctacttcgtgaatgatcagttcctgtgatacgtctaccagacgtcttgtcagatatcctgaatcggctgtacgaagagctgtatcggacataccttttcgagctccatgtgcagacatgaagtattccagtacatcaagaccttcacggaagtttgatttaattggcagctcgatcgtatgacctgttgtatcggccatcagaccacgcatacctgcaagctgtttgatctgtttgtcagatccacgggctccggaatctgccatcatgaaaatgttgttatatttatcaagaccgtcaagcagcgcctttgtaagggcatcgtcagttgctttccatgtctctacaacttctttatatctttcttcttctgtaatgagaccacgtttgaagttctttgtaatcttatctacagtatcctgtgcatttttgatcatctccggtttctgcggaggtaccgtcatgtcagaaatggatacggtcatggcagctcttgttgaaagcttataacccatagcctttacatggtcgagtacttctgctgtcgcagtagctccatgtgtattgataactttttcaagaatctgtttcagctgtttctttcctacatggaaatcaacttccaaaagcaattcatttccttctacgtcacggtctacaaatcccagatcctgtggaatgatctcattaaacatgaaacgtccgactgtagattctaccgttcctgtcttcactgttccatctgccatcttcttggatacacgtacttttacacgtgaatgaagtgttacggcagcattttcataagcaagaagtgcttcgttgaagctcttgaagatcatgccttctcccttggcaccaggacgctcctgagtcagataatagataccaagtaccatatcctgtgaaggaacggctaccggaccaccatcagacggcttcagtaagttgttcggtgacagaagtaagaaacggcactctgcctgtgcttctacggaaagtggaagatggacagccatctggtctccgtcgaaatcggcgttgaacgctgtacaaaccagtggatgaagcttgatagccttaccttctacaagaatcggttcaaatgcctgaataccaagtctgtgcagtgtaggggcacggttcagcataaccggatgctctttgattacttcttccagaacatcccatacttccggctgaagtctttctaccatcttcttagcatttttaatattgtgtgctgttccgttctgaaccagttctttcataacaaatggtttgaacagctcgattgccatttctttcggcagaccacactggtagatcttaagttccggtcctacaacgataacggaacgtccggaatagtcaacacgcttaccaagcaagttctgacggaaacgtccggacttacctttcagcatatcggaaagagatttcagtgcacggttaccaggtcctgttaccggacgtccacggcggccattgtcaatcagggcatctacagcttcctgaagcattctcttttcatttctaacaataatgtccggtgcgcctaattcaagaagacgtctcagacggttatttctgttgatgattcttctgtacagatcattcaggtcagatgtcgcaaaacgtccaccatccagctgtaccattggacgaagatccggtgggataaccgggatatttgtcatgatcatccattctggcttgtttccagactcacggaaagcttctactacttccagacgttttacgattcttgctcgtttctgtccggttgcacctttcaagccttctgtcaattctgtatattctttctcaagatcaatgttctcaagaagttctttgatggattctgcacccattcctacacggaatgtgcttccccatttttctcttgcttcctgatattcagcctctgataatacctgtttgtacatcagatctgactcacctttatccagtacgatataagaagcgaaatacagtactttttccaatgttctcggggacagatcaagaatcagtcccatacggcttggaattcccttgaagtaccagatgtgcgataccggagcagcaagggcgatatggcccatgcgctcacgacgtacacttgcttttgttacttcaacaccacaacggtcgcagaccacacctttatagcggatctttttgtactttccacaatggcattcccagtccttgcttggtccgaaaatcttttcgcagaacagtccgtctttttcaggttttaaagttctatagttgatggtctctggtttggtaacttctccttttgaccattccagaatcttttcaggtgatgccaaaccgatcttgatcgcatcaaaagtcattggctgataagtttgttccttattattttctggcatactttggaccccttcctattcatcatcagatgaatcgccgaaatcatagtcatcattttcttcaaaattcatatcgaaatcatcgtctgattctggttcttcttctacatcaaccagttcttcaccctggaattcctgtttgctgtatccgtgtttaccaaagtcttcgtcatcatcattacgatatcttctgtctccctcgatcagagaacggaaatctgtctctcccatatcggaagtttccataatctccacttctgtattgtcatcacgtaagacacgtacgtccagtccgagtgactgtaactctttgagcaataccttgaaggattccggaattcccggttcaggaatattctcacccttgatgattgcttcgtaagtcttcacacgtccgatgacatcatctgacttcacagtcaagatttcctgcagtgtgtatgatgcaccataagcctccagtgcccatacctccatttctccgaaacgctgtccaccgaactgagcctttcctcctaatggctgctgtgtaaccagtgagtaaggacctgtagaacgtgcatggatcttgtcgtctaccaggtggtgcagtttcaggtaatgcatgtgtccgatggttaccgggctgtcgaagtactcacccgtacgtccatcacgcaggcggaccttaccatctcttgaaagcggaacacctttccagagttttctgtgttctctgttatctgacagatactgcagtacttccggaagaagttcttctttatgttttgcttcaaactcttcccagcttaagttgacataatcatttgccagatcaagagtatccataatatcaatctcgttcgctccgtcaaatacaggagttgcgatgttgaatccaagtgcttttgcagccagggacaggtgaatctccaggacctgaccgatattcatacgtgacggtacacccagtggattcagcacgatatccagtggacgtccattcggcaggaatggcatgtcttcaaccggaagtacacgggaaacaacacccttgttaccatgacgtccggccatcttgtcaccgacagagatttttctcttctgtgcaatatagatacggactgactggtttactccaggtgacatctcatcaccattctctcttgtaaataccttcgcatccactacaataccatattctccatgaggtactttaagagaagtatctcttacttcacgggctttctcaccgaagattgcacgaagcagtctttcttcagctgtaagctctgtctctcccttaggagtaaccttacctaccaggatatctccggcgcggacttctgctccgacacggatgattcctctttcatccagattcttcagtgcatcatcaccaacacctggaatgtcgcgtgtgatctcttctggtccaagctttgtatcacgtgcttctgcttcatattcttcaatatgaatagaagtatatacatcatcctgcaccagtctttcactaagcagaacagcatcctcgtagttgtaaccttcccatgtcatgaatccgatcagcgggttctttccaagtccaagttcaccattagatgtagatggtccatctgcaataacctcgcctttttcgactctatctcctttgaagacgattggtctctggttataacagttgctctggttacttctctggaattttgttaatttatattttttcagttttccgtcatcctgacgaactgtaatctctgtagaagtagaacgttctactgtaccgccttcttcagcgaccacgcatacaccagagtcaacggctgctttttcttccatacctgttcctactgccggagcctcggtaaacaggagcggtactgcctgacgctgcatgtttgatcccatcagggcacggttcgcatcatcattctgaaggaatgggattaaagctgtagccacagagaataccatcttaggagatacgtccatataatcgaacattcttctttcatattcctgcgtctcttcacggtaacgaccagatacatttttacgtacaaaatgtccttcttcatctaactgctcgtttgcctgtgctacatgataattatcttcttcatccgctgtcatgtatacaacttcatctgtaactaccgggttagtcggatcatcatggttgatcttacggtatggagcctcgataaatccatactcattaattcttgcataacttgcaagagagttgatcagaccaatgttaggtccttcaggtgtctctaccggacacattcttccgtagtgagaatagtgtacatctcgtacctcgaatcctgcacggtctcttgacagaccaccaggtcctaacgctgaaagacgtctcttatgagtcagctcaccaagcggattgttctgatccatgaactgtgacagctgggaagatccgaagaattctttcactgctgctgttacaggtttgatattgatcagggactgtggagaaatgccctccatatcctgtgttgtcattctttcacgaaccactctttccagacgggaaagaccgattctgtactgattctgaagcagctctcctacagaacggatacgtctgttacccaggtggtcgatatcatcatctgttccgatgccatattccagatgcatattatagttaatagaagctaagatatcttcttttgtgatatgctttggaatcagatcgtgaatatctctcttgatcgcatcctttaattcatcaatgtctccggctgtctcttccagaattccagcaagcacaggataatatacctgctctgtaacccctacttcttccggatccacatcaacaacagcatcaaggtcaaccatcatatttgaaagtaccttgatcggtcgttctgtctcttctacgctgatccatacatatggaactgcattgttctggattgcggaagccagttctcttgtgatcttggttcctgcttctgccagaacttcccctgtcattgggcttgcaacatcttctgccagcacctgaccactgatacggttctttaacgcaagcttcttattgaacttgtaacgtcctacttttgcaagatcataacgtctcggatcaaagaacatacttgtgatcagactttcagcactgtctactgccagaggttcacccggacggatcttcttatataattccagaagtccttcctgataattcgttgcagcatctttctcaaaacttgccaggatcttcggctcttctccgaagagttcgatgatctccggatttgtaccgattcccaatgcacgaatcaacacagtgatcggtacctttcttgttctatctacacgtacatagaaaacgtcattagaatccgtctcatactccagccatgcaccacggttcgggattacggtagctgaatacagttttttacctaatttgtcatgtgcaatggcataatagataccaggagaacgaactaactggctgacaattacacgttctgcaccattaatcacaaaggtacctgttcttgtcatcagtggaagatctcccataaagatctcatgctcattgatctcatctgtctctttattgtgaagtcttactttgactttcagaggtgcagcatatgttgcatcacgttctttacactcatcaatcgtgtatttcacttcattctcacacaaagtaaaatccacgaaatccaggcttaattttccactgtaatctgtaattggggaaatgtcatcgaacacttcatttaacccttcatccagaaaccacttgtaagaatctgtctgaacttcgatcaagttaggcatctgaacgacttctttctgtcgggcataactcattcgtgaactttttccacttttaataggacgaattctgtttttctccatattgacgtttcactcctcatttatttttctggctgggcttttcactgcccatataacttgcagagtctcaaaaaacaacacaatttattgtttttttcacgaaatcatggcataactatccacaatagcgcattttttactatagcacaggcctgtcaagtatgtcaagcaaatccgcactattttttcagttctttcttatattcagcatcccttataatacgaaagggcatcccgtcaccggaatgccctgataattcaatcaaactcgaattatttaaggttaacttcagcaccttctgcttcaagtttagtcttgatttcttcagcctcagctttagaagcgccttctttgattacctttggagcttcgtcaactaatgctttagcttctttcagtccaagtcctgttacttcacgaacaactttgataactttaaccttagctgctcctgcggaaactaattctacatcgaactcatctttctcttctgctgctgctccaccttctgctccagctgctgcaactacaacacctgctgctgcggatacaccaaattcttcttcacaagcttttacaagatcatttaactctaatacagataactctttgatagcttcaataaattcttctgttgttaactttgccattttattttcctccatttttcttattttctttttttgaaataaattattacgctgccatcagcctattcagctgctggtgcctctgcagcttcttctgctgccggagctgcttcacaagcatctgctccacctttttctgcgatctgattgagaacgcgggccaggtttgtgataggtgactgtaagcttccaagtaatttggaaagaagctcttctcttgaaggaatcttagcaagttcatttaatgcgtctgcatcatataatgttccttcaaccacacctgcttttaattcaagggcttttgcattctttgcaaatttgcaaaggattcttgccggagctgttgcatcatctttagaaatagcgatagcacttggtccttctaagtgctcatctaatgctgcgaaatcagttccttcaaaagctctcttcatcattgtgttcttacaaactttgtagacaacgcctgcttctcttaactgtttacgcatctctgtatcttctgcaacagtcagtccacggtagtcaacaaggacaacgcttgttgcgtctttcacgtcctctgcaatagcctgtacaactggttgttttaattcaacttttgccacgaatggtgcacctccttgtagatttgtaagtttacaccgccgacagatataaatgtaaaaaacctctatatccaaagacatagaggttgataagtcatactttagtatcgatctttcctcggtaggcgtccgcataaaatgtgttcttacgctctttcaagcacctactgtcttcggcagtcctgtagtatattatcatatgcgtgtgttattgtcaagagatttttcattttcttttacaaaaaactttggtataaaaaaactccgtatacagcatcacatctgtatacggagtttttattcattattatcttgcggattaaacaagcttcattgggttgatttttacaccaggtcccattgttgaagtaagtgttacactcttaaggtactgtcccttaactgctgcaggtcttactttgttaatcgcatcaataagcgtctggaagttgtctgtaagctgttcttcagtaaagcttgctttacctactggcacatggataatgtttgtcttatcaagtctgtactcgatcttaccagctttgatttcctggatagcttttgtaacgtccattgttactgtaccagccttcggattcggcattaatcccttaggtccaagtacacgtccgagacgtccaacaacacccatcatgtctggtgtagctactactacatcgaattcaaaccagttttcattctggatcttaggaataagttcttctccacctacgaaatctgctccggctgctttagcttcttcagctttggcatctttcgcaaatacaagaatacgaacctttttaccagttccgtgtggcagaacaactgctccacgaatctgctggtcagcgtgacgtccgtcacatccagttctgatatgagcttcaattgtctcatcgaattttgctgttgcagtctttttaactaatgatactgcgtctgctacatcgtagagtgttcctctgtcgattgttttcgcagcttcaacgtatttctttcctcttttcattctataaacctcctagtggtattgtcgggataaccctcccacattaatcttcatcaattattctgttacagttacacccatagaacggcatgtaccttctaccatgctcatagcgctctcgattgtagcagcgttcaggtctggcatctttgtcttagcgatttcctcaacctgagcttttgtgattgtagcaacttttgttttgttaggtacacctgaaccagatttgatgttgcaggcctttttgatcagaactgctgccggtggtgtctttgtgatgaagctgaaacttctgtcattgtaaactgtgataactacagggatgatcatatctccctgatctgcagtcttagcgttgaactgttttgtaaattcaacgatgtttacaccgtgctgaccaagagcaggtccaaccggtggtgccggagtagctttgccggctgggatctgtaatttaatataaccttctactttttttgccatttcaattacctccttgtggtgatggcggggaacatacaacgcccctcccacttactgttacattttcttaacttctgcgaaaccaatttcaaccggggtctcgcggccgaagagctcaacattaatagtaaggctctgcttctgcatgttgatagactggattacaccaaccgtatctgcccatgctccagcgattacctggactgtgtcgccctcctcgtagtccatgactacttcctctctctggattcccagaggagccatctccgcatctgtaagcggcaccggcttagatccaggtccgacaaatcctgtcacacctcttgtattacgaacaacgtaccatgtatcatcgttcataatcatgtgtatcaacacatagcctggaaacatctttttctgagatactttctggacaccgttcttcatctcaacaacgtcttccagcggtactcttacttcaaggatctgatcctcaagatgtctgttctcgattgtcttatcaatgttggcttttactttgttctcgtaccctgaataggtatgaactacgtaccattttgcctctgacataatctcacctttcttgtccgttttgagttatttaattaataaatctactccgtactgggcgaaaaaatctacaagtgcgataatcgctcccaggaccacggatacagaaacaaccgctgccgtctcttttgcaactgtcatcttgtctggccatacgatcttcttgaactctctgttcagacctttgaaccagctttctttctgagttttcttaccactcatcgacattcactccttcttgcggcgattattttgtctctttgtgcaatgtgtgtttcttacagaatctgcagtacttcttggtttccatacgttccggatgagatttcttatcctttgtcatgttgtagttacgctgcttgcattctgtacactccaatgtgattcttgtacgcacaacttccacctcgctttatattcttagttaacgtgtttcgtggcagcttgcgatgctgcccgattttaggcataaaaaaaaagcctacttccattcgcccgaatatcgtatcatatccaggcttaaaaagcaagctttttcctatattatttgcatttttttgaaagaactttttgggaataaatctactgcagctgcttataccagatatttccgggattaacggaacgcagctgataacttccattctgatacacaaattcggcgctcatctgcgaacttccgtctgcatcttctacgccatcacctgtttctgacacagaccggctctcatttttattttcttctttaaaagtaactttataatcataggacaacgttcccctgaccactcctgttacaccgctgatcacatattttccttcataattatcaagttttacttctttcgttatataaccgtctccggaaccgagctgcttcttcaggtcattatagaattctttgttctcttttttgcaggaagaatccttctcaaacaatcctgctacttcagagaaagatttgcctgccttcgcagctttcacatatgcgttcaggatgtcctgcatctttctgttaaatttctttttcccattttccgatatcttcatcttggaaatcgtcgcatttcctttatctgacgcccggaacccggaccggtacatccggaagcacggaacttttaccttgatcttatgttccccttcaatcaatgacactttgtattgttccagattgtcagagtcatctttcagcttagaatcctccgtcagttttatatcatcgatccaggctttggaacctgccggaagatagagattaaagtcatttgctactatctcgtctgatgatactttccaatcagtaaaaaaaagaaagtttcgttttttctgtttttgaacaataagcgtcttcgtcttttctttgttatcttctgtcttatatgcaacggtaaatgcacgctgctttccgccggattctacctctgtctgacgattttcctttgtctcttttatttcataaccggaaatccctgtaaccgcatttttcttcatatagcgtacatattcatcctgcgttacatatccgtttttcggaagatctgacagacgtcctgccttcttccagttttcctgtatgtatgccttacaatagcgctctgccaccgcctccgggcgaccgtgatatacttctataatacagaatacagcaactataagaatccctgctgaaattctttttattactttcttctgtccggttgtcatatctgaccaggaacgtttatcccggataaattgcggcacacggctcggatctttcccttctttttcccgctttatcttcttttctttccgctttctctcccatgactgaagaatttcttcatatgcatcttcttccggaacatcttcatagtcctttttcttcttaatgaaatctccgatatcccccgtgaacatacgtgtcggctcatctgcctcttctttgctgtcctctccgatcattctggtcggttcttcaaccggttcttcttccggagtttcattctctttcagatcctgttctctcagcttgatcttcctgtgaagttcctgttccagttcttcccgcgtcacttcttcgatcatatggcccagattctccggaattgtgagctgctttttcagaccatcattttcttccggttcttcgctccactctggttcgaataatttcttcgcttcatcaattactttctccgattcctctgctatctcctgatcggaaaattctaccttccgggctttttccagtccttccagatcattatataatgtttcctcttttgattcgggaagacgcattccacaataattgcagaaacgggcatcatctggattgtcagacttgcaattcgggcattgacgcataagcattcctccttttcaaatcacagccgggcagccatgcctgcttgccgttttttactccttgcattataacactaacttgaaattctagcacatattctcctgctgtttttcaaaatcctgtaaatcttatgtcaaaaaatgtcaaaaaatccggcaggcctcacaaaagccgccggattttactgttaactttatctacacttagaataatcctgtgatccttccttcatcatccacgtcaattctttctgctgccggaaccttcggaagaccaggcatcgtcatgatgtctcctgtcagggctacaatgaatcctgcccccgcagagactttcaggttgcggactgtaatgtcaaagtctttcggtgctccaagtttcttcggatcatcggtcagactgtactgtgtcttcgccatacagatcggtgcgttgccgaatccaagatccgtcagcttttttacctgcttctgggctgctgccgtaagtactgctttattaccgccatagatcttctgcacgatctgatccaatttatcttcgatcgttccttccagttcatatgcatagtggaaatcacctggttcctcacacagacgtaccacttcttctgcaagcttcagaccgccttcgccgccctttgcccatacttcggaaagtgccacgtttactccgacctctttacatttctcctctacaagatccagttccgctttggtatccgtcgggaacgcattgattgcaacaacacatggaagtccatatacgttcttaatattatccacatgtttcattaaattcggaattccattttctaatgcttccagattttcttcattcagatccggttttgcaacgccgccattatacttgagagctcttacagttgctacgatcacgactgcatccggtttgattcctgccatacgacatttgatatccaggaatttctctgcccctaagtcttctccgaatcctgcttctgtgatcgcataatctgcaagtttcattgccattctggtcgccgtcagtgaattgcatccgtgcgcaatattggcaaatggtccgccatgcacgattgcaggtgtatgctccagtgtctgtaccaggttcggtttcaaagcatctttcagaagtgcgcacatcgcaccttctgcatgcaggtcatgtgctgttaccggtttttggtctgcgatcttgccataagtataaccaacaataatctttccgagtctttctttcagatctgcaatatccttcgagaggcagagaattgccatgatttcagaagcaacagtgatatcatagccgtcttctctcggcacaccatttacccttccgccaagtccgtctgtgatgaaacggagctgacggtcattcatatccacacatctcttccatacaatttttcttggatcaatattcaggtcatttccctgatagatatggttatcgatcattgctgccagtaagttattcgcagctccgatcgcatgaaaatctcccgtaaaatgaagattgatatcttccatcggaacaacctgcgcgtatcctccgcccgcagctcctcccttcataccgaatacaggtccaagagatggctcacgaagtgccaccataggctttttccccattctctgcagggcatctgcaagacctaccgtggtagttgtcttaccctctcctgccggtgtcggattgattgcggtcacaagaatcagcttcccgtcttctttatctgatttctttaaaaaattataatcaatctttgctttatactttccatactgttccagatattcttctggaattcctgctttttctgccacctttgtgataggctccatcatacattcctgtgcgatctcaatatctgttttcatcattcatttcctcctgatcgtatgttgtctttctgaattcccggtccttttcatacaacactaccggttcttctgtatccggtgttgtaaaaaaaggacaacactcatcctatttaggataaatgctgcccagacggtcggcttctaccaagtatctgatttccctgtggtactccacattatccgtcagtcatcagatcttctctttgtctcttactatattataaggatggaaaattgtcaatccgaaaaattcacctgcatcatccggatgctcgtaacacagtctttatttttcatcttttttaataactgtagactttttccccatgtgatattcttttccctgcgcccgcatgatacttcttgaaatcacatctacaataataaatccaaatgcaataccaagacacgtttcgagcaatacccgtgcatgctctgctgccattgaaaaatttctgctgactacaccatacatcagataatacagccttgctcccggcatcaacggaaagaccgatgcggtcaggaagaccgtggacggcgcatgatcgattctcgacataataaatgcatatcctgcaacaaaacaggacgcagctactattgcggaaaaattattcggataccatgcatacaccagtaaatatatcccccatgtcagaaatgccccgacaccggaatacaggattttctttccccgtattttgaaccagcttgcataaccgatacagcctatcgtacaggaaatcagctgaatcacggtatttttattcacatcaaatccttctgccgatatatttcccatcaacagcattgcaagtgcgatcccggaagcaatgccaaacgcaccaagcattgaattcattacttccagtgctccggatataaagtttctctgcatcacatcacgtatcccattgatcacaccaagtgcactgaccaacagcatgataattcctatcatgatacggtccggatgatctcccaatccgatcctggcagcactgatgatcacaacctccgataagaatgcaaggatcagattgtagatcatcgggttgccctcccgcttaccaagccatctgcctgccagaacgatcatcaggcagacaatcaatgcaacaactgcatcctgcatatccccgccgaagaatacggtaaacgccgttccacctgtaatctgtgcgattcctgtgatcagttcactctgatccggccgtgcaattacttttttatagcgcctgaccagttctttgtcatccggattatatgcacagacataccgtgacagggcattcagataattcagcctgtcgtaatctgcccctgtagactctatatgcctgatctgtgtgagaatctcaccttccggcgactccaccgtcacctgtatattacttggaatcacatatacatcatattttacgaaaccatagctcttatacatacggtacaggctgtcttctacccggaaaatttccgccccgcactgtaacattgcttctcctatattcaggattccctgtactaacttttcataattcatagatttcaattattatttctttccaccgatcagcggaagattcaatgcgcttttaccgatatgatattctctcttcattgcatgcatgatacttctggatgccacatctacgatgataaatccgaatgcaattgcaaggcaagtcgccagaagaataatcgtctcatcaaaaaccatctgcggatcctggctgacacacccgtacattacatagtacagattcggtcctgggatcagcgggaataccgatgcagtcaaaaagatggttgaaggtgctttatttactctggacatgataaatgcataaaatccaacaaatcctgctgcaatcatggttgccatgaagttactcggttttactgcgtatactgcaacatagattgcccatgtaaaaaatgctccgatactgttataccatacctgttttccacggatcttgaaccataatgcaaatcccgtacatgcaaccgtgcaggagagcagctggatcggtacactgtgattcaggataaaatgatcggaatatccctcgtggaataatatgattgccagaccaattccaaatgcaattcccgctgctccaaggaacgaattcataatattaatgaatccggaaatgaagtctctctgaagaagatccctgattccgttcgttgtactcagtccactgatcagaagcatgacaataccgatcataatacggtccggatgctctgcaattcccatcttcaaagctccgataataatcacttctgatataaacgcaagaataccattgtaaaccagtaagttgctttcacgcttcgcaagccagtcaccgactgcaacgatcatcaccgatactataaatgcaatgaccgcatcccggaggttacacccgaaaaatacagcaaatcctgttccacccatgattcctgccgcatatcttgtgatacgcttctgtggttcacgattgataacttccagatacttctcacgcatctcattttcatccggtgtatgctgacagacatatctgcacagattattcagataatccagctggtcaaaattcggctccgacgactcgatatgacgtatctgtgtaataatctcgccttccggtgtctccaccgtcacctgtatattactcggaatgacaaatacatccgatctcttaaatccatagcttctgcacatgcggtaaaagctgtcttccaaacggaaattctctgcaccgctttgaagcatcgcttctccgatgtccaggatcccctgtacaatcttgttataattcatcttttttaccccttgttttccttcataaaattaccatttcctaaatctaacatttgaatcatatcatggattttctataagtcaacataattattgtaaaatgtaataacagtttgtaataccagtcttagaagctcttatgtttgcagcttttaatatttcctttgaaatgcgaaccccctgactattcccccacgtttttacttgtgcctgcataaagtaagctccttcgttttttctagagtatccaccggtaaaaaccaacgaacagattcggaaaacttttgattccagaaaagctgaattattaaatcgattttgtgtttaatcccggttcttattatacacaaacatccaaagcgccatcgcacatatgatcacataccccagcacgctatacctatccggtacctgtccgaacagaaagaagcccagaatcgtcgaaaagatgatctgcgaataatcataaatggatatctctttcgccggtgcatgataataagccgccgtgattccgaactggccgcctgcagccgcaagtcccgctcccagaagcgttaagatctgcaggccgctcatcggatgaaaatccagaagcagatatggcagtgtaaccacacacgagaatcctgagaagaagattacaaccgaagaacctttctgtcctctctgccccaggatacgcaccatcgcataagcaatacctgcgcagatcccaccgcacagtccgatcagtgacggtaccagtgccatattcgtaaatgtcggtttgattacaaataagcttccgataaatgcacccgcaaccgccagtgcctgtgccggactcatcttttctttcagcaataaaaatgaaaagataattacaaaaaacggcgacatcttattcagcatcgatgcatccgacagcaccagatgatccaccgcatagaaattacacaagattcccaccgtaccgaatgtcgcacgcagaatcatatatttcagatttcccttttcgattttaaatccgtccttacttcttatgatcatgatcagcgcaataaaaaaagctaccagatttctgaaaaagctcttctgtaccgaaggcagatcaccggataaccttacgaaagcattcatgaatgcaaatgataacgccgataatgtaatgaaaaatattcctttgtatctggaattcataaacttacacttccttatgatttatttctttatatcttacgttgtgtcatttatcttaccacgaaaaattttaactgtgaatatatccgacaattggacttgattttgtacaacttgctacaattcttttacattgtcgcattctcccataaacgcacctatctgttgatagaatttcaactacagatatgctaaaatatttttggataatgaaaggagaaatgtaacatgagaccccttgagacatttatcgaacaacgcaaagaacgcttcgtcagaaacagtctgatgtctgacgaatttctggattttgttaataaaaatatgaaaccaatagagaaacagatgtcctattatcaatgtgccatcatggaagtagagacgaaattcaaagtattaaacgaacagtattccctggaatatgaccgcaatccgattgaggatatcaaatcccgtgtcaaatccatggaaagcctgattaaaaagatccgtaaaaaagacatacctctcaccctttcttctattgaagaaaatatccatgatattgccggtgtccgtgtcatctgctcttttccggatgatatctatatgcttgcggactgtttgctttctcaggatgacatcacacttcttgagaagaaagactatatcaaaaatccaaaaccgggcggataccgcagccttcatctgatcgtcagtgtaccaatctttttacaggacggaaaacgtaacatgactgtagaagtacagcttcgtacgatcgctatggatttctgggcaagtctggaacataaacttcgttacaagaaagatatcccggctgacaaagcaaaatatctggaggatgagatgcttgcctgtgcacagatcagtgccgacctggatatgcgtatgcagaacgtccgtgatgtaattgctgagaatgctaaaccagacgaacagtctttattattaaaagatttgtcataaaaagacatattgaaaaatgcgccaaaaaagcactgcgaaatttggtaatatttcacagtgctttgccattacgatattctgaaatgcccgacaatatccgttctctcctgcaggatatcttcctcataattcttctgatacggatcattatgatgaatcacatatggtacaccttccacattccgtctgtcagaaattaccccgatatgattcttgaacactacaatgtcgccgccctgccattgttcaatgtcatttacatccatggtcagactggtcgctgtatgttcaaaatatattctcaggttctttactcttcggaaatcaatatttttatccggctcatcaatatcataatccttcgaattctttctgatatctttgtctaccagttcccgcaggtcatatccgcttttcttaagcgcatatccgacaacatctgtacagacaccatatctgtcatccggataaccggtctgataatatctgctcttgtaaaccggccgcttcttcacataaaccaatgcattcttcaaaatatcggtctgatcatccgtaccgtcaccatctttatccacactgctatgatacggtgtgatctctgtgccgttgtattcattctttggccggtctgtcttcgtcagtcctaccacatcacgttctgccaaaaatccgccaagggtcagccagatgataatagcgattggaactaagattcggaatttcatctttcttgtcttatgatgaaatacaatcatccctgcaaacgcaccaaatgcaccgccgacaaacgcaatccctatcagcactgcctctttgattctccactgatgatgcattgctttcgctttatccgttccatataaaataaatgcaataatatttactgcaacgagataataggatatcggtgtcgccgctgtaagtaattctgccatcttctgctcccctccttcatatctccattgtatcttacctttggttcgctttcaatcagaaaacagataattttcttcatcaactatatacaaatacacgcctttcatctatactctcttctacatcacagtctgatacaagagcaccatgagtggcattgtcacaatggataacaatgtcgtcataacattgatcgcactggcatatttcgaatcatttccatacacctgacacatctgtgtgatcgttgaagcagacggtgtgatcaccgcaagaaatacgataagcagtaatttctttccatccgaatgtatgttcataagcccgcttatctttaaaatcatcaatgatatcacaggtatcacgaccagtctcagaaatgaaataaaatacactttcacattttcaaatatactcttcagattcatctctgcgatcagcatccccgttacgatcatacttgccggaccgatcatactgcccacagaacttaaggtctgatttacaatttccggaagcctgatcctggtaaaaaacagcacaactccggcaaataccgagatcatattgatattgaatacaatctttttccagtcccactttccttcccggctgatcgtattcttgccatgcgtccacagaaataccaattggacactcatgaacacacaaccgtataatacccattcctttcccagaataaaagtcaccagcggtacgatcaaattgcccgaattcgaataatagatggatgtcatctctacttcatttagtttcaatacctttccaacaccccacactgctgccagtaatataacctgtaataataccgacgctgcaaataccagcaaaagttccttcaccttttcactcgtataatccacctgaaatgcattgatgatcacacacgggataacaagatataatacaattttagaaataactttgctgtcatctccctttaacaatcctgtctttacaataatatatcccatcaggatcataagaaacagttctgcgatctgttccattaaaagtatactgatttccataataatctctctttccttttacagtcctaccgaaaatcatatacactttcccgatgattgtcaatctcacaaaaacctgacatccttctattaatcatacttatattgacatgttatttatcattcatatattgattccttctatctataaggctataatagtgtttataaaaatataaaacaggcagtataaaatacagggaggaacttaagatgaaatacaagaatattatttttgattttggaaatgtaatcggaaaatttaaaggagactatatcctggggaaatttgcttctacaccagaagattataatattcttgctgatgccatttttaaaaactgggtagctttagatgccggaactatcgactatgaccagaatgccgaagatacgattgcagaacttccggaccgtctgaaagatactgcccgcgattttttcgagaactggttccagtatgtcgatccgcttcctgaaacatgggaattcatcaaagagttaaaaacccggggagttccaatctatctgctttccaacgcttctaccaggtttgcggaacgtgcaccggaagattatccgatcctgaaagaattcgatggcatcgtcttctctgcacctctaaagatggcaaagccgggacacgatatttattaccatctgttcaataaatatgaccttctaccaagtgaatgcttcttcatcgatgatacggtggaaaatgtcattgcaagtaaagaacttggaatggagagcatcttgtttacgggagatattgaggccgttaaaagggcaattgagttttaatcaattgccctttttttaataaatgcttgatttttagcttttcgttcggtataattcatattcggacaaaaaaataagataattttggtttaattggaaacgacacaagtgtatgcttgattaacgaacaacacaagtgtcttttttgtacccatttttaaacatttcataaaaaggagaacaaaaattatgccaaaaactttatttcaaaatgttatttttacactgatgatgtcttttctgatggtttacgttatgatttgttacaatatctgcctgaatgtgggcggaatgagcaatgaagtattcctgatggctttcggcgaactgaagatcatgtggccggttgctttcgttctggaatttgtctttgttgacaaacttgcacatatgcttgcattccgtatcgttacaccacaggacagaccaatcttcatcactcttgcaatctcttccatgatcgtatgtatcatgtgcccttgcatgagtcttgttgcaacaatcctgttcaagaaggcaggaagcaatgtaatcgccacctggtgtcagacaacattcatgaacttcccagttgctttcttctggcagatcttctactgcggaccattcatccgtctgatcttcagaaagatgtttcctgagaaagaaaacgttgccgcttccgctgtaaccgaataattgatacaaaaaaaccgagcctgtttctatacagtgcccggtttttctttcttcttattctgttcttcctgtctatacaaaaagcaatgctatattcagccctgttacaatcacagcaatcaccagaagcaaaaaattcaaacgtctgctgttcacatattttcccattactttttcagatgaggtcagatatatctgtgtaaatattgtaatcggaagctgaatcgcaagcagcatctgggaatatatcagacctttaaacggctggctgataaacaggatgacaaccgctgccagaatcatcgtcaataaaatgccagctttcgtctcttttgtcttcgtgtcatatggctgattaaagatcccggaaaaaatcgttccacctgccattccagcagtgatactcgatgagataccggccaataacagtgccagtgcaaagactaccgtcgccgcatttcccatcaaaggcgacaacatttttcctgcaactgtcaaatcatcaatctgcctcccatttccgccctgataaagcgtagctgctgccatcagaatcatggcactgttgatcgcccatcctatgatcatggaaaataatgtatctttaaattcatatttcagctgctgtttgatcacggaatcatcttccaggttccactgtctgctctggatgatctccgaatgtaagaacagattgtgcggcattaccaccgctcctaatacacttaagatcaccggcatacttcccgctggaaacgaaggtttcacccatccgactgcggctgctccccagtcgatcttcgcaattcctatttcaaataagaaagaaaatccaatcagcgatacaaatatgatgatcagcttctcaatccttttataagcattcgtaaatgcacataaaagagaaactgcaagaatcagcatactccctatttttattggtatccgaaacagcatctgcaatgcgattgcaccacctagcatctctgccatcgcagttgctactgccgcaagcattgccgacagaagaataatattctttaacagcctttggatatatctgcttgccgcctccgaaaggcaaagtcccgttgcaattcctaaatgtgctgcattgtgctgcaatatgatcagcatgatggtcgataacgtcaccatccacaatagctcatatccgaatccggagcccgccgcaatattcgaagcccagtttccagggtctatgaatcctactgttaccaaaaggcccggtcccagataacgtaaaaaatcaaatgtcttattctttgattgatttcggaattttttcttcatatataaagaactcctttactaaaaagaatctaggttagttacagctaacctagattctacttagtatttatttctttgtcaattcattatatgaatatcatttctcatttagaatcagaaatcaaaaaactccgttcaatctcgctgcttagatagctcttgtatatttcttcagccactcctgctcttcctcgttcaggtaaggagcaatcacttcgtatacttttgcatgataatcattcagcagtttcttgtcttcctgtgtcataatatccggattgatcgcatccagatccattggaatcagggtgattgcttcgaagtacatgaactgaccatattcattcaatgttcctttgcaggtcaacagttcgttctccagacggattccgtgagatccttcaatatagattcccggctcatctgtgatgaccatgccttcctgcaatacttctgtctcccccttacggtatttccaacggaatccagcaggtccttcatggatattcagaaggtatccgactccgtgtccggtaccgtggttgaagttcaggtctctgtcccagaatggttttcttgcaagaatgtcaagaatcataccggtagatccttccaggaattttgcacttccgagctgtaagttactgatagcaaccagtgtaaagtggtctttcatgatctgtggcacttcgccgagtgcgtaagttctggttacatctgtggaaccttcatagaatccagctcctgtatccgttaagaataactgtccttcttttaactctacatctgtctccggtgaagatgtgtagtgtacgatcgcaccatgctctccaaatgaagagattggctcgaagcttggacggatgaagtttcccatctcagcacggaactcatccagtttgtcagaggcactcatctctgtgatcttcatcttgccgacattttctttcagccatttcatgaatcttacatgcgcaacactgtctttgatctgtgctttgcggatgttctcgatctcaaccgggttcttgaccgctttcatgagaattgccggatttctcttttttactgtcttaacattttcaggaatattgttgaacaatgcataattcagttttccaggatcgatcattgcaaccacatcactgccaaatttcttcacgtcttcgtaaatgtcgttgtatgggtgtaagtttacgccatcttttgcaagtttggcttttaacttgtcatctaattttctctcatcgatatacagctcgaaactgtccattgtgatgattccgtaagataataccagtgggaagaagtctatatcatttccacggatatttaacgtccagcagatgtcgtcgatcgtagatacaacgtgcacattggttcctgcttctttcatctcttcacggattcttgcaagtttgcttgcaacattctctccagcatactttacatccaggtcaaatgcaggctcctcagataataccggacggtcttcccagatctcatcaattaagtctacctggtaatttactttcgcattcttcttccgggcgatggctgcatagccttctccttcgccaacggatacgactcttccgtcaaatccgagagtctctccttcttttaatacctcttcaatgtatgcattcagctccggcacaccaggctcacccattttcatgagttctacagttgtcccctccaactgtgctgccgcctggatgaagtaacgtccgtctgtccagagtcttgcttctgtctttgtgatcacagcggttcctgctgatcctgagaaccctgtaatgaactttctcgctttgaaatgttccccaacatattcactctgatgaaagtcggcagtcggtactacatacacatcaatgttcttttcttccatacactttcgaagtgcggaaagtctttctggtactgtcatgtttttgttcctccttgatatatacagtgtattgttattataacgcatttcttatcattaatcttctatcaaatcagataatttttcttatctttcataagtaatacttcttttgaatggataacaaaaaaagactttggaatagatttttccgaatcccttttaaagtcttttttgctaatattattctatttatttttatatccgtccggcttttccaagctccagcatcaccggtataagccctgcaacatcccagccctcaaaactgatcatacgtaacgcacggaataataacttcaccgtctcagattcttctgtctgatctgcatgatacaattttgctgctgtctgacagatcaccatcaggattgtattcttgaaagctccgatttcttcggattctttccacagattctccatatcatagtcatccgtattgccacatggcgctgcacatgttacacatcccggtgagactgtatatttttcatttcttaccttttctaacatctcactcatatcaaagatacttgccgaccagtctccggccaccgtcagtgcttctaggaatacccggttagtgttctctgtcttttcgttattctcacaggttcttgcaagtccgatgactgcacctgtcagtttctgtctgatctcttctttcacgatttacctctctttctttgccggaatcacaaagataaatatcatagaactcacaaataataaaaacggataaaaaagcttcggcatgatctgaaatgccgacacacgatatcccagttcacttgccgcagagattgctaccagcatctgcgctccgtaaggaataatcccctgaaaaatacaggaaaatgtatccagtatcgaagctgcctttcgcggtgtgatcccatattcttttgccatatccttcgcgatcggattcgccattacgatcgccacagtattattcgccgttgcaatatccatcgttccgaccagaagtcccataccaaactgaccgcctttgcggcctttgaatactttgtggattcctgccagcaatgcatcaaaaccaccatattcacggatcagtgcacacatcgctgctaccaggattgccaccatactcgtctcgaacattccggaagccccggaacccatattagcaagcagatctgtcgccgcaatatgtccgccggccagcatgataaccgaacctgacagaattccgatcagaagcaccacaaacacattgactccggcaattcctcctatgagaaccagcacatacgggataatctgcaccagattataagacttacttacctgtccggcaatgtctgtctgaaatgaaaaaactaaaatcaataccagcgttgcaatagctgccggaagtgcaattccaaagttctcccggaatttatccttcatctgacatccctgtccgttacatgctgcgatcgttgtatctgaaataaaagaaaggttatctccgaacattgatcctcccataaccgaaccgatgcaaagtgccatgtcaaatcccgaagccttggatacggacactgcgatcggcgtgatcaatgtaattgtcccaaccgacgttcccatggcaaccgacacaaaacaggctaccacaaataataccgcaactgaaaatcttgccggaatcagtgacaacatgaaatatgccacactttccgcactgcttcttcctaccactccgacaaacgccccagccgtcaggaagatcagaagcattgtaataatattcttatcagcaagcccctgcgccatgatttccagctttctgtcaaaacttatcttgcggttctgcaggcatgccaccagaatcgctgcaagaaatgcgattatgatcggaacattatagaatcccatcggaatcttcattacatattcaaatgcgattccaagccccagatagatacacaaaaatacgcctatcggcagtaatgctgccacatttccttttttcattcttctttatcctctcattccttttttcttctaaccgattcctccgagaacaattccaaggatcagcacaataaaacataccggtacataaaaatatttacatattgtataatactgtttcgtaaatggtgtctctcttcctgtattaacctgtttttccacgaatgccttaccgcatatccagaagaacatgattcctgcaagcccggctccaagcggacagatatagatagacagcacatccatccagtctgacacgatgccctggatcagcaaggagacgatcactcccacaattcccgtaaatgcacatgccggcactcttccaagcttgaatttttcctgcaccgtagcgatcggagcctcatacaagttgatcaacgatgtcatacccgcaagtaataccgcaacaaagaagatgattgcgatcagccatcctcccggcattcctttgatcagattcggtagaaagatgaacaatagtccgggacctccctgatccaactgcgctcccgttgttgccatcgccggaatgataacaagtgcggcaagaattgctgcaatcgtatcaaacaatgcaactcttcctgcagaagccggaatgtcctcttcatccgacagataagatccatagatcaatgttccatttcctgctacggacagggaaaagaatgcctggccaagtgcaaagatccacgttgccggatctttaaatgccttcggatctactctgaaaatataacggtatccttcacttgctcccggctggaatccgacatagattcccaggattacgaacaatgcaaagaatattggcatcatgatcttattcgctttttcaatgccgcttccaacgcctaacatcagaatcagcatacaggccacaagcgcaagtatctgccatatattattaccaaacgcagacgccatcttaccaaatgctgccccaaattcatccacattcttcggacgaagtgttgctcctgtaaatgttccgacagcatatctcaggatccaacccattacaaccgtatatccgatcgccatggcaagtgatccgaatacagggatcatccccagtgcttctccgacttttctctttccttttttctcacaggcaattccaaatgcatcgattggaccggcctttgccgcacgcccaaagctcatctccccgatcactcccgtcgaaccgatcagtattacaaatataaaatatggtatcagaaatgaaccgcctccatacaatgatactcttgttgggaacatccagatatttcccataccgaccgctgaaccgatacaggcacagataaatccccatctgctgctaaatgattctcttttattcataattttccctctccagccattggggacggggtttttggtctttttactgtccctgccggctcaaaatattccatacacatggtagatttctctattttagcatgattgctataaaaacgtcaaaaaaaaaaggggatataaacttatccccttaatgtcgccaccatccttttcggcattgcaagcacatccagtgcttcctctatcgatctggtacagatatcaacgtttgcaatcagtcttccatacgcaccttccgcctctataattccaacactgagttctgctatcctgcacataggcaggtcattccgtccgtttcctactgcaatacaccgtttcccacccagttgctctatgatttttcttttttcttctgctgccgcattaccagcaaatgtctgtatctttaacggtagtccttcacatatctttctcgcagttccatgtgtatctgctgtcagaacataaatctcatatattccactctgttttttcagccgttcctttacactttcgggtattatgccatctttcgcaatagttccgttataatccagaatcagatatttcagatccatcgttttatatccgggaatttctattctcatacgttctcctttactcttacatatactgtatctgctctcttgcaggttcggatgacggatgctcaaagaatgtctttgtgtctgtcacttccagtactcttccctgatccataaagataatctgatctgcaattctttttgcctgtgccagattatgtgttacgatcacaaatgtatattttccctttaattccagaagtgtctcttctatcgcaatggtattcttcatatcaagcgcagaatacggctcatccaacagcagaatttccggattcacacacaaacttcttgctatggcaagacgctgtttctgtccaccggataatttttttgcagacttcttcagttggtcttttatttcatcatatagtcttgctttctgcagacactctctgatgatccgctctatttctccggcttctctaattccatgatatttcaggacgtatgacagattcttctctatactgtacggaaatgcgatcggctgttgaaataccattccgattctggttcttaatacttccgttgaaagtcctttaatgtcttcgccgtcaagaatgatctttcctttataaaagccgccctcctcttctatcattcggtttaatgtctttaaaaatgttgtttttccacaaccggattgtcctacgattgccgtaatctttccttccggtatcgtaagactgatatcatgcaatatctcctgtctgccaaatccacaacttatctgttctatcgttaacatatcagtaatcctttcgtatataagtaatacatttacatatgatctgtatgagcagtaagaataacatcagtacgaacgccgttccatatgcataatccagagaaaatccattatttaccagcatatacagatgatacggcaatgacataaatggatccgtaagttttcccggaacatctgcgaccataaccgcacccgtatacaaaatcggtgcaaccgctcccattccgtatgccattccaagcgccaccgttccaagcaattccactgcacagaccggaagaatcaatcgtatgaccgcatattctctggacattccaagtgccagtgaattcttcatgtattctgttcccttttctttcagtatcttttctgcacggattgcaataaacggcacgatcataacagccacacaaatagctgaacacaagagacttcttcccagaccaaactgatagatcagcaacgtatagccgaccagtccgaacaaaatagaaggaattccggacagtcctgtaatgcaggcactgattacatggtaaaatatacttttccttgtataaaacacaagataaacagccacaccgattccgatgattccccccatgagtgccgaaagtgctccaagatagattgatcccatcagtgcaggatagattccacctgctgttccaagcggtacccccgccggcttatccagaataaacgaaagactcatcacattctttcccttccagaagatatacaggaataagaacaacgtcactgcaattgtaagaattccaaggagccctgccaggatgcgtatcacatactttgtcagtttatttttcatgttctgcaaacctcctcttcaacaactgccctgccagtatcactacaacaagtatcacaagcagcacaagatttgccacataaagcaccgacagatgtatacttccgtattcaatgcttcccatctcaagagctgtcagtgccggaagcgtctgcccgcgtcccaacagcttcgggaaaattgcagaattaccgatcaccatcattactgccatcgtctccccaagcgcacgtccgaatgccatcatcgcacttgctacaattcccggccggattgccggaagtatcactttgatcaacacatattctcttgataagccaagtgccagtccggatttttcatatgtccgttttgcatttactagtgattcctgacatgtcgatacaacatacggcagaagcatgattcccagtacaatacctgccaccagtacacactgtcccgctgccatcttcagatattttacaaatgcttttaccagtacggttaatccgataaaaccaaagattaccgatggaatacctgccaccagatctataaaagccaggcagacagatgcaagtttctttggcatgaaaaaggtaagaaagcaggcacatgccactcccaatatcatcgcaaacagtactgccagtccggacacatacaaagtacctgtaacagccgggagaagaccatactgcggggccgcacttaccggacgccattccgatgacggcagaaacattttgattcctacttctcctaatgccggaatactttccttcaaaatatgtatcagcataatccccatcagtgccgctaccacaaaagcaatcatatatatcaagactttacaaaatgtatttgctatttttctgtacataacaaagtcctttcttgcatactttggtaaaaaaaaggatgtatctatacgacacaccctttttcatatttttctatttcattggaatgaatcccatatcttctacagtcttttgtcctgtctctccaaggataacatccaggaatgcctgctgaacatctgtcggatcccctgaaccaacgatcaaaagtggtctctggataatgtaagaaccatcaatgatattttcttttgtcggctctacaccatttaccttcagagtaactactttaccggcgttctgatttgcaacaccaaatgatgcatatccgattgcatatttgttatcaatgatatcctgtaccagttctcccatagaagatgcctgaattgcttcgctggatacttctgtatcacccatgatgttcttctggaatacttcatgtgccccaccattgatatcacgtgtaatcactacaaccttttcatcaggaagagaaggatcaagatctttccatgttgcatatttacctgagaataatgaaacgatctgctctgttgaaagatcatccagaacacctgttacagggttttcaggattaacagcgattgttaatgcatcaatacctacctgatattctttttcgtctttaattgcttctttttcctcatcttttacacttcttgccaccataccaaatgtagaagttccatcgatgactgcttttgttccctgtccggatccacctgctgatacatagattgcaatgtcttcttttggaagtgatgaatcatatgcatcccatgttccatatgtgtcgaagaaatctgtcgcaatcgatgtaataaccggtgctaatgtagatgatccgttaaataagatctggttactctctgttttcttctctgtgctctctgtcttctttgtatccccagagtcagaagatgcctttttgtctgatccacatcctacagccattgatgcaaccatggctgccgcaagaaggacagacatcaatttctttttcatagatatttttcctcccattaataaattttatctatattgaatagtatagacttgaatccaattattttcaaattaataatacctataagtgcatccacttataggtattatcaatatatttatgtaagttttttcggaattttgccttactctttcaattctaccttagattgcatccaacgcattcgaaatatctgcgatcagatcctctttatcttccaggccaagactgatacgaatcagttcagccggtactcctgcctcttttaactgttcatccgtcatctgtctgtgtgtagacgttgccggattcaggcagcaggttcttgcatctgctacatgcgtctcgatcgcaccaagctttaatgtcttcatgaatgtagacgcagcttcccttccaccttttaatccgaacgatacaacaccgcatcctccgtttggaagatatttctgtgctctttcataatatttatcagacggaagtccggaatagttcacatatgctacctttggatgtgcttccaggaattccgcaactgcctgcccattctctacgtgcttcggcatacgcacatgcagtgactccaggccaagattcaggataaatgcattctgcggtgactggatcgatccgaagtcacgcatcagctgtgctgtacatttggtaatgaatgcaccttctttgccgaatttctctgcatatgtaattccatgatagctttcatccggtgtgcaaagtcccggatatttatctgcatgtgccatccagtcaaactttccgctgtctacgattgctccgccaagtgccgctccgtgtccgtccatatattttgtagtcgaatgagttacgatatctgctccccattcaaacggcctgcagttgaccggtgtcgggaatgtgttatctacgataagcggcacaccatgtgcatgtgccactttggcaaataattcgatatccagtacggtcagtgccggattcgcaatcgtctctccgaacattactttcgtatttggcttaaatgctgcatttaactcttcttctgttgcatccggtgaaacaaatgttacatcaattcccatctttctcatcgttacatcgatcaggttaaatgttccaccgtaaatggatgaagatgctacaatgtgatctccacattcacagatattgaacagtgcgaagaagttggctgcctgtccggatgaagtcagcatcgctgccgttccgccttccatctctgcgatcttggctgctactgtatcatttgtcgggttctgaagtctggaataaaaatatcctgacgcttccaggtcaaataattttcccatatcttcactggttgcatatttgaatgttgttgactgtacgatcggaatctgtcttggttctccgtttcccggagtatatccgccctgtacacatttggttcctatcttgtattcactcatgaattttcctccttcacgcatgtttttcatgcactcgctaaagcatacttttttagtatactttagcactatgaggagggtttttcaataaatgattgtaagattctaatttatcgtcttctcaaatttatcatcctccggttgccgcagtaattgtcacttctttttctgatttattatctgctttttctgctgatacttttttcccgcaccctgccgccgatactccgat

SEQ ID NO: 2809 - DNA, 27821 bp, Unknown
  gut microbiota DNA sequence
tatccagctgagctatgacgacacatgccgcaaacccttgattttactgggtttctaggatttttcccttcggccatatataagattatcaactctttttcgagttgtcaatctacagatttttttgatttggtaacattagaacgttccccaatttggggaatgctttgttgtcaccattagcatttttcagaatagattcgaactgaaagttgtttttcattttttccctttggggaatgcctcggctttctcttaggaggcgtgtgctctatccagctgagctatatggacgtgtctgatatatgattatagcccgatcaaagtcgaactgcaatcccttatttagttttttttgaggtggccgttgtaacgcaaccttaggaggcgagtgctctatccagctgagctatgacgacatatgtctattttaccattaatctcacaaaagtcaatacagggatggatatccccacccctgtatcattctgaaatatttatccacattttactgttcttatccacattcagaaattgatttttccctgcagccacacatttcctttgaatctgcgtccgactgccggttcgcccatgacttctctttttggtacacatacatcgaataataatccgttcacatccaatttcataatgcaaatatcttcccttgtaatctcatttctggtaagacgatattccaagatctcgcccatgatcgaataccggtcgcattcgattccataaggcataatgtatgtatccacaatggtaaatacatcttccgatatcagtcttttcgatactttggaataggtatccatatcatccagtgtaagactttcgattgcccgcggatcacctgttctggctgcactcaacaacagcatgcgattgtgcacctcttcctgctgttcccgttcctgctccttgcttttcctcaccggaagcaggatggttccctcattacagagtccggacaaagtaacagaagaatacttgatacttcttccgccaatctgtctctctctcagatattccatcatattctgcagatagaataccaggttgatgccgacttttgtatcctcacaaatgcctacatatgcttcacgatctatccttcgttccacactgacatttgcataagatgttacaccggatcctgtgaaatacggagcataatagcggtaatcaaactgttcgtcgatatccatatctccgcacaccttgatcccgataccttctccatattctttatcaaattcacaaagatccgtcacttcatcctgcgtgacaagctgatgtcccgtataggattcttccacatctcttataatctgtattaactgttttttgtctctgatatttccaaatccaatggatttcaaatattgatgcatacgcttatccttataacttcctattttttaggtacaagcttctctgttccgcccatgtatggctgtaatgccttaggaatcttaacagatccatcttcctgaaggttgttttccagaaatgcgatcagcattctcggtggagccacaactgtattgttcagtgtatgtgcgaaatattttgttccgtcttcacctttgacacggataccaagtcttcttgcttgtgcatcaccaaggttagaacaacttcctacttcgaagtatttcttctgtcttggagaccatgcttccacatcacaagattttaccttcagatctgccaggtcacctgagcagcactctaatgtacgtaccgggatatccagtgaacggaacagatctaccgtattctgccataatttatcataccagatcttgctttcttccggtttacatacaacgatcatttcctgtttctcgaactggtggattctgtatactccacgttcctcgataccatgagctcctttttctttacggaaacatggtgaatagcttgtaagtgtctgtggaagctgtttttcttccagcattgtgtcgatgaatttaccgatcatagagtgctcacttgttccgatcagatacagatcttctccctcgatcttgtacatcatagaatccatctctgcgaagctcataacacctgttacaacgttgcttctgatcatgaaaggtggtacacagtaagtaaatccacgattgatcataaagtctcttgcatatgcaagtacagaagaatgaattcttgcgatatcacccatcagataatagaatccatttcccgctactcttccggcgctctcaagatcgattccgtcaaatgcttccatgatctctgtatggtatggaatctcgaaatcaggaacaaaaggctcaccgaatttttcaatttctacattctgactgtcatcttttccgattggtacagaaggatcgatgatgttcggaatgatcatcatattctgtttcagtttctcttctacttctttttcttctttggaaagttcttcgattcttgcagcactctcagctacttttctctttaattcttccgcttcttctttctttccctgtgccatacatgcaccaatctgtttagagattttattcttttctgcacgaagtgcttctacttctcccttaatatctctattcttctgatccagttctattacttcatctactaaaggtaatttctcatcctggaacttatttttgatgttctgttttaccacatccggattatttcttacaaatttgatatctaacatttttctaaactcctcctgctctcatatctgttatatgatctgctattttctatttttttcaggtcttgccatatctggacgcatactgctggttcttgtattcaggatttttccattatttgcctttccagatacctgttttgcacttcttgcattactgtttttctgatttcctgtctttgccggaccggattttgccattttcatacttcctgttacagaagcaactgccttattgacttcttcttcatatccatcttcgaaaatagccttatccagtgcttctgcttcttcctcagcaagttctacatagctttccccttttacaatctcctttacgtaagtgtaacagccctctctgctgtgcattgcattgaggatccatccggtattattattgtccagcattgcaagtgcaaagctgagctttccacccatttcattaaatgcatcatacttgacaataccaaccttctggtaagacttctccatcttcttgttcagcttctggatgtctgtacgattctgctttgtgtatttcagaattgcttctacatccgaaaatcctgacatcatgctttcttccagtgtctttccatctttcccacgcataaacgtcgtatagctgcttttcaaccgattatacttcattgttacatttacatacagaacgaataatataacaatcagtaccagcaaaaataaaaatatcaatgccggatcgataccaagtgctttcagtattttgctatccatattcaattactctcctcttttaatgctcatcatcatatcgaacagatgttctaattcatcatctgaataatattctatctctatcttaccttttccctttccttttgatgctatactgacttttgttccgaatacacctttcatcttttcttccagatcctggtaaataaacgcattctccattaccttcttctcttttggttttttcggattcttgatctctttcacaagcttctcagtctccctcacactgagtttctcgtcaaatatcttatttgccagtgtatactgaagttccggatcatcaattgcgagaagcgctctcgcatgccctgtagaaatcatatcgtcaattatcatctgctgtactttatcacttaacttcaacagtctcatagagtttgttaccgcagttctgctcttcgatactcgttctgcaacttcatcctgtttcagattgaattcctccagaagtctcttaaatgcaattgcttcttcaattggattcaggttctctctctggatattttcaatcagaccgatttcaagaatttcctgatctgtatattcttttacaattacaggaacttcctttaccccggcaagttttgcagctctccatcttctttcaccggcaatgatttcgtaataatcctttcttttccgaacaagcagcggctgtaatacaccgaactgtttgatggaatccgaaagttcaaggagagcatcttcatcaaaattctttctcggctgatccctgttcggctcaacctcattgatcttcatcgtctgcacgcctgctttttcttctgcttctttctttgcttcagcagatttgtcaggtgttacagactttatgctcttattatctgggatcagactgtccagaccttttcccagaccttttttcttaattggcattcgttccctcctacatcacatcttttagttactctctattcatcacttcatcagcaagtctctggtatgcgcttgcgcctgtagactttggatcatacagattgatcggcattccataacttggtgcttctgccaaccggatatttctaggaataatcgttttatagatgttctgttgcaggttctcttttacattttctacaacctgaagtgaaagattcgttcgcgcatcatacattgtaaatacaacaccttctatttccagaattggattcaatctttctttcaccagttcaactgtatgtattaactggctcaatccctccagcgcatagtactcacactgaatcggtaccagcaccgaatcagctgttgtcatagcattaattgtcagcatactcaacgatggtggacaatcaataataatatactcataattgtctttgattggtgcaatagcgtttctgatgataaattctttatcatccacaccgatcaattcaatctctgccgctgacagatcaatacttgtcggaataatatccaggttttcaattgcttctttttgaagcacttcctctacaccaacctgtccaatcataagatcatagatattcttttcaacttcatctttgtctattcctaatccactcgtcatatttccctgcggatccatatcgatagcaagaactttctggcctttttcagcaaggcatgccgacagattaatagctgtcgttgtctttccaacaccacctttttggttcgcaacggctataactcgtcccatttaattatcaccttccctttttttacatgatattagtatatcacttttccaggtacttatccataaaatgtttcacgtgaaacatagtttttccatttttcataaatatgaatctgttctatttgttattttcgttatctttatgcttttccattctttttattctttttattttttaatgtttcacgtgaaacattttctttggttacacagatgttcattttgcgttcattttgcaaaggcaatcttccaatttataagtaaatatagtataattagtagtaagaaagtgaggtatcaacatgaactggaaaaagacattattgttcatctcgacagcactcggaacaacaaccctggcgttccacgtaataaacaaattcatattcaacacctctgatgaactctcagaagaagactcatccaactactacaattggaaatttggaaatatatattatcaaaagacaggaagcggctctcctcttctcctcatccatgatctgaatcattacagttcttcaatggaatgggacaaagtaatcgatactctttccagagaacacactgtgtataccatagatcttcttggatgtggaaaatctgataaacctgccatcacatacacctgctatctctatgtccagcttctcactgatttcattcgcgatatcattggaggaaagacagatatcgttgcaaccggagcatctgtttcttttgtaacagctgcctgtcagaacattgccgatcagatcggtcatataatccttgtttgtccggaaagcatccgtacacttgcaaaagcaccaaaccataagtcaaagctgctcgcaagtattataaatcttcctatatatggaacattcatctataatgttggcgcacgtaacactgcactttcggattctgctgaatgcagatatctctactccagcattttaggtcattatacaacagtaaatattgctcattgtctcgaagggcttacaacttccattgccgtgatttccggaaaaaatgcaccggaaactttcgaaaaagctgaagaatactgtaatgttctcccatccattgagcatattgaaattgcaggctgtggattactgccacagcgagaaaatgctgatgcatttttagagcagatagacatattgctaagcgacaactgctagtgttctgcctgtatcaccagtaaataatattaagttttacaaaaggggtaatgtttcacatgaaacattaccccttttacattttcttgttttcacaaaattcttatcaaattgctatttttcttaccgtatcggctctttggaaggcattccagcctttcgtggatatttctttgccgtattcttcactttgtggatcttcacgaacgatctgccgatgtctgttcccggaagctcgaattttactacgtcttcaatcttaccgccaagtatctttaccgctttcgacgactcttttacctcttcatcaatctcacccgatttataaggtacaaacataccatctacttttacgtaaggcaggcaatattcgctcaacgttgccagatttgcaactgctctggacacacacagatcatactgttctctatatgctgcatctttggcataatcttccgctcttccatgaattgtgtggatatcttccaatcccagttcttcgatcacagcattcaagaacttaattcttttgttcaatgaatcaagcaatgtcactttcagatgtggaaatgcgatcttaagcggtaatcccgggaatcccgcccccgtacctatatcaatcacctgatctaccttagccatatccatgacttttacaatagaaaggctgtctacataatgtttttccacaacctcctcatattctgtgattccggtcaggttcatcaccttattccactcttcaagaagcttatgataggcatcgaactgctctttctgccggtccgtgatctctattcctatcttttccaggctttttttcaaaatctggtccatatttttctccttatttctctctaaaattaataagtatataaaatgtatggtttttcatgttattcattttatatacttattattatatttactatatagttatatttatattattttatggtgtagctataaatatatttaccaatgtaatccgttgtatctctgcactttatctgtgatttccactcagatataccagcagcaccgagatatcagccggagacacaccggaaatgcgtgacgcctgtccaatcgacaccggtctgtactctttcagcttctgaactgcttcgatacgaaggctgttcactgcatcataatccatatcttccggaattttcttattttccatcttcttgaactgctctacctggcgtttctgacgctggatataaccgtcatatttcagggaaatatccacctgtccgatcacttcttccgccagatcttccggcaattttggccgggtcacatcaatatcttcaactgcttcgtaagacaattccggtctccggatcaattctgccagactgcttccggaattcagcggtgtactttcataggattccaggagttcctgtaccttttcactggttccgacataagcattctttaaccgctcgatttccgactctatcagcctttctttttccttcaggcggtcgtaacgctcctgtgagatcagaccgacttcatagcctttttccgtcagacgctgatccgcattgtcctgtctcagaagcagacggtactctgccctggaagtcatcatacggtatggctcatgactttcctttgtaaccagatcatcgatcagaacgccgatataagcctctgaacggtctaacaccagggattccctgccttgcagctttctggcggcatttatgcccgctataagcccttgtgcggcagcttcctcatagccggagcttccgttgaactgtcccgcgctgaataatccactgatgttacggaattccagggatggttttaactgtcttgcatcaatacagtcatactcgatcgcatatgcatttcttacgatcttcacatgctccagccccggaacactgcggtacatggcatactgtacatcttccggcagcgagctcgacataccaccgatatacatctcatccgtctccagtccttccggctcaagaaatacctgatgacgttttttatctgcaaattttacaactttatcttcgatcgacggacagtatctcggtcccgttccctcgatcattccggaatacagcggtgatctgtccagattggcacggatgatatcatgtgtcgtctcatttgtataagtcagccagcatgaagcctggtcgatctgcacatcgtccggattcgtagtaaatgaaaacggcactaccctctcgtctccgaactgctcttccatcttgctgaagtccacggttttacggtctaccctggcaggtgttcctgtcttgaaacggtacatcttaattcccagttctttcaggcaatcggtcagatgattggccgcctgcagtccgttcggaccggtatactgactcacatccccatagatacaacgtgccttcagataagttccgctgcagatgataaccgccttacagtgatacgttgcacccgaaaatgtctgcactccggtgatctttccatcttccaccaggagatttgccacctctccctgcttgatctcaagattctcctgtgcttccagcacacggcgcattgttctgctgtagactgccttatcagcctgtgcacgaagcgaatgtaccgccgggcctttggacttatttaacatttttgactggataaatgtacggtcgatgacctttcccatctctccgccaagggcatccagttctcttaccagatggcctttggaacttcctccgatattcggattacacggcatcatcgcaatgctgtccacacttacggtaaataccagtgtctgaaatccaagtctcgccgttgccagtgccgcctcgcatcctgcgtgtccggcaccgatgacgacaacatcatatttatctttattttcccatacagaatttgctgaatatctcattaaccaaatcttctcctatcgtttcgccggtgatattgccgagagcttcatatgcatccataagatcgatcgaatagaaatcctccggcatatctgcggcaatgctgtcattcacacgttcaagtgcggcatatgcatcctgaagtgctgttttctgtctcacattcgtaatatagatttcatcattaaatgtcagttctccctggaagaacatctcctttaacgtatcttccagttctccgatcccctccacattctttgcggagatctcgatcaccgggaattcctccggcagctcttcctgatcttttttcacctgcatatccagatcggatttgttcagcaggatgatcgcacgtttccctttgatcagatgcaggatctctgcatcattttcatccagcggtctggatgcatcgatcacatacaggatcaggtctgccttgtctgcatattcttttgcacggtcaacaccgatcttttctaccacatcttccgtatcacggatgccggcagtatccatgatatttaaagaaattcccttcagattcaggtgttcttccaatacatctctggttgtacctgcaatatctgtaacgattgcccggtcttcaccgagaagtacatttaacaaggatgatttccccgcattcggttttccgaggatgactgtgcgtacgccctcttttataatcctaccatcatcacagctatctagcaatcttttcattgcttctatgatctcatcaaccactttttttagtgtttccccgtatccatcaacgctgatatgctccggatcatccagtgcggtctcgataaatgcagtgtgatacaggatcttttcacgcatttcaccgatcttatctttgatattgcccttaagctggctcactgaactctgtaaagcatattcgttctgcgatgcgatcaggtccccgacagcctctgcctgcgaaagatccagtctgccatttagaaacgcacgcttggtgtactctcccggctctgccgggcgcgcaccatttttgatcagaagctccagaatacgctttaccacatagactccgccgtgacagttgatctccaccgtatcttcaccggtgtagctgtgcggcccgcgcatcagcatgaccagtacttcgtcgatcacctgatctccatcaaccatatacccataatggatcgtatgtgattgctgttcacataacttcttctcttttttccctttatacacccggtctgcgatctgaaatgcttccggaccactcattcgtacaattccgatcccggaattactcattgccgtagatattgcggcaattgtggaattatataattgttccatatttcctccatactttggtatcaaaaaagacaagggccgcttaaagacccctgtctcttaattatcggttatttctgtttcttaccagtgttaccacaactcttctgtaaggctcttcaccttcactgtgtgtggatactgccgggtcagactgcagcgcagagtgaatgattcttctctcgtatggattcatcggctcaagagaaactgtctttcttgttctcttaactttacttgcgatattctttgcaagattttccagtgtttcttttcttcttcttctgtaatcctctgtgtcaagtttcactcttacatatccatcctgcatcttattggcaacacgatttgtaagatactgcagagaatcaagtgtctgtcctcgttttccgatcagaatacccatattgcttccttccatattgatagaaagtgcaccttcttcatctacagcagatgtaacttttacatcctccatgcccattgcattcatcacatcatagatgaatttctcacatgtctcgatcgtctgtggttccacctttgcaagttctgcttctttctttggagcagattttacttccggcttctcttctctcgccggttttctggcgtgtgaatattcttttaccggttcttccactttcggctcttcttttacaacttcttcaaccggtttttcttcctgttttctgcgggccttgatcacagcctgctttcttccgattccaaggaaaccttcgcttcctttttcaacaacaatataatctaaacgatcacttgttacgcctaactgaaccagtgcctctgtaatcgcatcgtccagtgtctttgctgataaggtaatgtaatcctccattacagccgccccctaatcattttcgttaaatttcttcaccatatttgcctttgatgcgagacttcctttcttcgcattgtctgctttctggtgcgctttttccactctggcttctctttctttttcacttaagttagatgtgctctgctttttcatggatgcctggttgttcatattcttggtattcgtctgagccattgctgcgattcgttcattcttctcgccacgttttacacgtttttcctcagccttttccttgtttttctccaggatctcatctacagacatcttgcttaaatgcttattgataaatatctgctgaacgcaacgtactaccgcactgacgatccagtacagaccgatacctgtcggaagtgaaaataccataaataccgagaacagcggcattgtcacattcatcgtgttcatcgtagatgccatcgggttatctttatcaagctgctgtccggaaatagcctgtgaaagcttgatacttccgtactgtgtcagaccagataatatcggaagcaagattgcagtaataataataacaaccggtgcaaatccatagtccccgctgttcttgatcatctgcataggtgagatggtcaggtcaggaagggtcaggaatacatttactgcttttggagctgtcttgatctccggaacatatttctggatattatagataaccgggtacaaagcaaacaacagcggcatctgaatcagtaacggaagacatcctgctgacatcgatgtaccatatttgtcatacacctgctgaatctcttcctgctgtttcatcattgatgcctggtcttttttattcttatacttcttctgtatagcctgaatctccggattcataacagatgacatcttcgatgttctctgctgctgtactgtaagtggaagtaataacgtatacacaaaaatcgtatacagaatgattgacagacctaccagtccattatcgcttggcagacagttgtccagaaaattatagataaagttcattaccttacccagaatccagcaaagctgtccgacgatcggccagttagcggcagtcagtaaacttggtaccataattttttcctccatatgtagttgtaatctttttaaggaacagggtcgtaccctcctctggtaaacggattacagcgcagaattctccacactgccagccgtcccccttttaacgcgccgtatttctcaattgcttctttcgcatactgagaacaggtcggataaaacttacaggtggaaccgccctttatcggagacagatatctctgataaaatctgataccagtgagcagaatcttcttcataatacgttacccctcatctataatcttatgaagatgggccagatggagcattgcgccgacaatctctttataaccttttcctttggcgcctattcttgctataacaataatatccaatccacatctgaaccgttcttcttgtaatctatagctttcgcggattaacctcgttaatctgtgccgtactatactgtttcctacttttttacttacagatattcctaatcgattctgacctgtcccgttctccagtacatacataaccagatatttgttggcataagatgtcccttttctatatatatattggaaatctttgttctttttcagtgattcggaatacttcattgtgtgattctcctaattattctgagtagaagaaaaggccacatatatgcggcctacgctgataatttctttcttccttttgctcttcttgcagcaagtacttttcttccacctgctgtgctcattctagatctgaagccatgtactttagctctctgtctcttttttggctggaatgtcatcttcatggatatccacctccttattttattccaagggatgttctccctaattttcataagacatcagctttgattatattaaaaaaaccgctctacgtcaagcaattccgcaaatttttaaaatatatttatccacattttgtggaaaactttgtggatttctgtggataacgtgtggaaatcatatatttttttagttttttcccctttacatacgcatttttactatgttgataattgggattgagttttccacagtttctcacatgcatcaaagtgcacgattaaagattgcctaaagcaactttttgatgtacaatgtagaagagtgggtttataggtgaaaatccgcgaatcagacagattaggagtaaatatgatgaatacagtgaaggaaaaatggcctgaaattatcgaacatctcagggtagaacacgagttatccaatgtatcattcaatacatggatacaaccgttgaaggtctacgatgttgtagacaataccgtatttatattagtaaatatgaatgcgagtgtagaatatatagaaaaaaaatatcagcttccattaaaggtatgcattgcggagactaccggaactgaatatgacgttgtcttcatttcggaagatgatgacagactgaatgagatccagaatatggccattgaagcgaatcagaagaaaaaaagcaaaagtgctgcggagaaagccgggctgaatccgaagtatacatttgataccttcgttgtcggcgggaataataatttcgcccacgcagcttcccttgctgttgccgaatctccgggagaagtatacaatcctctcttcttatatggaggtgttggacttggaaagacccatttgatgcactcgatcgcgcattttattctggacaagaatccaaagaaaaaagtactctatgtaaccagtgagacatttacaaatgagctgatcgaagctctgaagaacggtaaaaccgccggaaacgaatccgcaatgtcaaaattccgcgataaataccgtaataatgatgtacttttgattgatgatatccagttcattataggaaaagaaagtacacaggaagagttcttccatacatttaaccatctgcatacttccggaaagcagatcatcatatcgtctgataagccgccgaaagatattgagactttggaggccagacttcgtacgcgctttgagtggggtctgatcgctgatatttcatcacctaactatgaaacccgtatggcgattcttcagaagaagatcgaactggatcatttggaaaaatataacattccgaatgatgtactcgagtatatcgcaacgaacgttaagacaaatatccgagaacttgaaggctctcttaataagctgatcgcactttataagctgaacaataacgaatccatcgatattgcgctcgcagcagaagcattaaaagacatcatttcttcggataataagagagaagttacaccggaactgatcctggatatcgtttccgatcattttggtgtgtctattgccgacctcaaaggcggcaaacgtaacgccgagattgtctttccgcgccagattgccatgtatctgatccgtaatatgacagaaacttcattaaaagcagtcggtgtcatccttgggggaaaagatcattctaccatcaaacatggaatcgaaaaaatcgagaatgaattacaggcggacgagactctttctaacactattaatatcataaagaagaagatcaacccggcttagccttattttgctgttttcagctgtgaataactatgtggaaaatctaattatcatatgtggataactatgggatagccttgggaaaaccacaggatttctgcaactgtctttagaaacgaaaaagttttcaacaacagttccacacataatccagtcagattccacagagttttcaaagccgattttccttgcaaacagtgggctggaggcacttttcctcttttccacatcccctaagacggctgaggcggaaactattttatttatttatccattacacacgtgcgaaaggagttatacacacatgaaaattacctgcagtaaatcgaatctggtcaaaggtgtcagtattgtttccaaagcagttccttctaaaacaacaatgccaatccttgaatgtatcttaattgatgcaacaacagatattatcaaattaacagctaatgatatggaacttggtatcatgacagagatctccggagacattattgatcgtggtatgatcgcaatcgatgcgaagattttttcagaaatcgttcgaaaacttccggataatgaagtaacgatcgaaacgttagataatcttcagaccgtgatcacctgtgaaaaagcaaagtttgatattgccggcaaacctggtgatgaatttgcctacttaccgattatcgaaaaagaagattctatcgaaatctctcaattcacattgaaagaagtcattcgtcagactattttctcaatctctgacagcgagagcaacaagcttatgaccggtgaattgtttgatatcagtgacaatattctgaaagttgtttcgcttgacggacacagaatttccatccgtaaggttccgctgaagaaaagtgttgcggacagaaaactggttgtaccgggaaaaaccctgatcgagatcagtaagatcctttcgggagaagctgagaatgtggtatcgatttcatatacaaagaaccatatcgtgttcgaatttgataataccatcgtggtatcccgcctgatcgaaggtgaatacttcagaatcgatcagatgttatccagtgattacgagacaaaagtaagaattaacaaaaaagaactgctcagctgtatcgaccgtgcaacacttctggtaaaagaaggtgataaaaaaccgatcatcatcaacatcggcgatgaactgatggaattaaaaatcaaatcccagatcggatccatgaatgaagagatcatgatcacgaaagaaggaaaagatctgctgatcggattcaatccgaaattcctgatcgatgcactccgtgttatcgatgatgaggaagtgacgatctatctgatgaatgcaaaagcaccttgctttatcaaggatgatgcggaaagttatgtctacctgatccttccggtcaactttaactccgcagcataggactgtccgggaagacctgaagagagccttttcgggtacgaaataaaaaacaagatgaaatgcaggaatgcttgcaaaagtatatagcaatgagtataataaaacaacggctaaaagaagaaaaatatgcataaaaatacaaagaaatgcatattcgagagaggatacaagacgtatggagacaattatattacgaggtgaatatatcaagcttggacaggctttaaaagctgcgggaatggtggaatccggagtagaagcaaaagaagtgatacaggaaggtctggtcatggtaaatggcgagacagatacacgccgcggacgtaagttatatggcggcgatatcgtattatttgacggagaagagatcagaattgaaggttaattccctgaaattaaagaattttagaaattatgatcttctgaatgtggagtttgacggttctacgaatattttttacgggaacaatgcgcaggggaagacgaatattctggaggcggtgtatctgtccggaacgaccaaatcccaccgcgggtcgaaagacagggacatgatacggttcggtgaggatgaatcccacattgagactgtggtggagaagaatggtatcagttatcagatcgacatgcacctgaagaagaacagcccgaaagggattgcgataaacaagatgccgatccggaaagcaagtgaacttttcgggatcgtaaatcttgtattcttctcgccggaagacctcaatatcatcaagaacggacctgcagagagacgtagatttatcgatctggaactttcgcagctcgataaggtgtacctgaataacctgtcgaactataaccgtatcgtgaaccagcgaaaccgtctgctgaaagagttaagtttcggcggtaagaaagaactttcagatacactggaaatatgggagatgcagatggtacaatatggggagaggctgatcgccagaaggaaagaatttgtcgcacagatcaatgagatcattgcgaagatccatcagaagctgaccggcggcaaagaaagcctgcagatcatatatgagccaagtacgggggatctgccgtttgaacaggcactgaaacggtatcgtgacagagatctcagaatgaagagcacaacggtgggaccacacagagatgacatcggatttctgaccggcgatatggatatccgcagatatggctcccagggacagcagagaacggctgccctgtctttgaagttatcggagattgagctggtcaggctggcaacgcatgacacaccgatacttctacttgacgatgtattgtctgaacttgataaacacaggcaaaactatctgttagacagcatacatgatatacagaccctgatcacctgtacaggagttgaggattttgtaaatcaccgcttttcaataaacaaagtgttccatgtccaaaatggacaggtaacgaaagaaaactaggaggactgagaatgggtacagaaaaagtacagcatgaatacggcgcagatgaaattcagatattggaaggtcttgaggcagtccgcaaacgtcctggtatgtacattggaagtacatcttccagaggtttgcatcaccttgtatacgagattgtcgataatgccgtagatgaagctctggcaggcttctgtgatacgatttatgtaacaatcaataaagacaattcggtgaccgttatcgataatggacgtggaattccggttggtatcaaccacaaagcagggcttcctgcggtagaagtcgtatttaccgtactgcatgcgggaggaaagttcggcggtggaggatacaaggtatccggaggacttcacggtgttggagcatctgttgtaaatgcgctctccaactggctggaagtagagatcttccatgatggaaagatctaccagcagcgttatgaacgcggaaaagttatggaaaaactggcagtgatcggagaatgtgaagaaggaaaatcaggtacaaaagtcacattcctgccggacgataccattttcgagacaacgatctttgattttaatgtcctgaaacagagattccgtgagatggccttcctgacaaaaggtctgaagatcgtgctcagggatgaccgtgaggaagaaccaaaagaaagaacattccactacgagggcgggatcaaagaattcgtttcttacctgaaccggagtgcgacaccactttatgagcagatcatttactgtgaaggcatggtcaataatgtgtctgtggaagtggctatgcagcacaacgattcttacagcgataatacgtatggatttgtcaataacattacgaccccggaaggcggaacacacgttgtcggattccgtaatgcgatcacaaagacatttaatgactatgcaagaaagaataagcttctgcgtgaaaatgagccgaacttaagcggtgaagatatccgtgaaggtctgacagcaatcatcagtgtcaagatcgaagacccgcagttcgagggacagaccaagcagaaacttggtaacagtgaggcgagaggtgcggttgataatgtggtcagcaggcagctcgagatcttccttgagcagaatccggccgttggtaagatcattgtggagaaatctgtgatgtcccagcgtgcgagagaagccgcaagaaaggcaagagacctgacacgtagaaaatcggcacttgataacatggcacttccgggaaagcttgcagactgttctgacaagaatccggagaattgtgagatctacatcgtagagggagattccgccggtggttctgcgaagactgcacgtgaccgtgcgacacaggcaatccttccgcttcgtggtaagatcctgaatgtagagaaggcaagactggataagatctacggcaatgccgagatcaaggcgatgatcacagcatttggtaccggaatccatgaggattttgatatttccaagctgcgttatcacaagatcatcatcatgaccgatgccgacgtggacggtgcacatatcagtacactgcttctgacattcatttatcgtttcatgccggaactgatcaagcagggatatgtatatctggcacaaccgccgctctacaagcttgagaagaacaagaaggtctggtatgcatacagtgacgaagaattaagcaagatcatcgaagaagtcggacgtgacgggaataataagatccagcgttacaaaggtctgggagagatggatgccgagcagctctgggataccactatggatccacagcaccgtatcctcttacgtgtaacgatggacgatgagacaacgagtgaactggaccttacattcaccaccctgatgggtgacaaagttgaaccgagacgtgagttcatcgttgaaaatgcaaaatatgtcaagaacctggatgtataataacagcgtgtagaagaaaggaggaacagagatacttacatctctgagagattgatggaagacaatatatttgacaaagtccacgaagtggatctgaaacagacaatggaaacctcttatatcgactacgcgatgagtgttattgcgtcccgtgcactgccggatgtaagagatggtttgaaaccggtacagagaagaattctgtactctatgatcgaactgaataacggtcccgacaagccgcacagaaagtgtgcacgtattgtcggtgatacgatgggtaaatatcacccgcacggtgacagttcgatctatggcgcattggttaatatggcacaggaatggtctaccagatatccgctggtagacggacatggtaactttggttctgtggacggtgacggtgctgccgccatgcgatacacagaggcaagactgagtaagatttccatggaattaacggcggatattaataaaaataccgttgattttattcctaactttgacgagacggagaaagaacctaccgttctgccggcaagattcccgaaccttctggtcaacggtacttccggtatcgctgtaggtatggcgaccaatatcccgccacacaacctgcgtgaagtgattaatgcggttgtacagatcatcgatgaccagatcgaggataaagaagagacaacgatcgaagaaatcttaaagatcatcaaaggaccggacttcccgaccggaggtatgatccttggaaccagaggaattgaagaggcatacagaaccggacgcggcaagatccgtgtgcgtgcggtgacagatatcgaggcgatgccgaacggcaagagccgcatcatcgtaagtgagcttccttacatggtgaataaagcaagactgatcgagaaaatcgcagaactggtacgtgataagaagatcgacggcatcacagacttaagtgaccagtcaagccgtgaaggaatgcgcgtagtcattgaactcaggagagatgcaaatgcaaatgttatcctgaaccagttatacaaacatacacagcttcaggacacattcggtgtgatcatgctggcactggtcggcaacgagccgaaggtcatgaacctgatggagatgctcaactactatctgagacatcaggaagaagttgtgacacgccgtacacagtatgagttaaataaagccgaagaacgtgcgcatatcttacagggattactgatcgcattagataacatcgatgaagtgatcaagatcatcagaggttcacagactgtccagatcgcaaaatcagaattgatggagcgtttcggactgacagatgtacaggcgcaggcgatcgtagacatgagactgcgtgccctgacaggtctggaaagagagaaactcgaagcagaatataaagcgctgatggagcagatcgaacatttacgtgcgatcctcgcagatagaaagttattacttggcgtgatcaaagaagagatccttgtgatccgtgataaatacggagatgagagaagaacatccatcggattcgatgagttcgatatctccatggaagacctgatcccaagagaagatgttgtcatcacgatgacaaagcttggatatatcaagagaatgtctcatgatacattcaaagcccagaaccgtggaggcaagggaatcaaaggtatgcagaagctggacgaggattatgtagaagaactcttcatgaccaatacacatcactacctgatgttctttacgaacaccggacgtgtataccgcatgaaagcatacgagatcccggaagcaagcagaacatccagaggaaccgcgatcgtgaatctgttacagttaatgccgggcgagaagatcagtgcggtcattccgatcgagaaatataacgatgacgaatatctgctgatggctaccaagaaaggtctcatcaagaagaccccgatcaaagaatatgcaaatgtcagaaagacagggcttgcagcaatcacactccgtgaggaagatgagctgatcgaggtaaaatatacagacagcgatcatgatgtattcatgattacaaagtatggacagtgtatccgcttcaatgaaagtgatgtacgtccgacaggaagaacatccatgggtgtccgtggtatgaacctggtagaccgtgatgaagtgatcggaatgcagatcgattcacagggaacagacctgctgatcgtgtcagaatacggaatgggcaaacgtacttccatcgatgaattcacagcccagaaccgcggcggtaaaggtgtgaagtgttacaagatcacagagaagaccggtaacgttgtaggtgtgaaagcagtagatgaggacaatgagatcatgatcatcaacacggagggaatcatcatccgtatgaagtgtgacggaatctcagaactcggaagagtgacatccggagtgaagcttatcaacctgccggaaggcgataaagtagcttgtatcgcaaaagtacgcaaaggcgatgaatcagaagatgatctggtagagccggaagaaagtacagaagatgcagagaacgtagagacagaagaataaagatataaaacgaggcggaagattaaaaaatttccgcctcgctttttgaaaaaatatttttatttttccgcctcatctgcagcaagttcacgaagaatgatctccgcagtcttctttacagtagcagctacaaagtctgtacactgtgctttacgttccggagaattcttctctttgccttttgtcagaacacggcagcatgttgcaccacagtattccttgaagaaatcgtggatttcgttcgaaagcttgaaacagcggttaatcttaggatcaccaggtgtcttacgtccgaagaaatatccgatacacatcgttgctccggcgagtgcaccacagatacatccgcctccgccaagcccccatgggaatccggaactcatagcaatcgcatcatccgacatgtccagttcaaaattctccttgatcgcataaatgacagattctgaacaggcaaaaccctgattaaagatgtccacggcatccttttgaagtttctctaaatctacatttgttgtcattataatccctcctgaaaaatgtgttaaatccattataccacggcgaaaaaaacttgtatatcatcttggaacagggtaaaataaaaaaggacaggtttttttgagcaggaacataaggttccaaaaaatcccatgtccccaggaggatatagatgagaacgatcaatgtaaatacaatcacagaaaatataaaagacatgtgcatccaggcgaatcatttccttgccgatgacatggacaaagcaatgaaacacgcactggagacggaagaagcaccattgggccgtcagattctggatcagctgcaggataatctgaagatcgcagcagaagacatgatcccaatctgccaggatacaggtatggccgtcatcttcatgaagatcggtcaggacgtacacttcgaaggaggcagtctggaagatgccatcaacgaaggtgtccgacagggatacgtagaaggatacttaagaaaatccgtcgtaggagatccgatcatccgtgagaataccaaagacaacacaccggcagtgatccactacagtatcgtgccgggagacaaagtagagataaaggttgcgccaaaaggattcggaagcgagaatatgagccgtgtattcatgttaaaaccagccgacgggatcgaaggagtaaaagaagcgatccttacagcagtcagagacgcaggaccgaatgcctgtccgccgatggtagtcggagtaggaatcggcggaacatttgaaaaatgtgcgctgatggcaaaagaagcccttacaagagaagccggatcccattccggaaccgcctgggtaaaagacctggaagaagagatgcttgagacgatcaacaagcttggaatcggacctggcggactcggaggaacgaccacagcacttgcagtgaatgtcaatacatatccgacacacatcgcaggactgccggttgcagtcaatatatgctgccatgtgaaccgtcatatcatcagggaggtgtaagtatggacaagcatatcacagcaccaattacaaaagaaacagccagatctcttcacgcaggagattatgtatatgtcacaggaaccatctacacggcaagagatgcggcacacaagcgcatggatgaagcactggaccgcggggaatcacttccaatcgatatcaaagaccaggcaatctactacatgggaccatctccggcaagagaaggacgcccgatcggatcagccggtccgacaactgccagccgtatggacaagtatgcaccacgtctgctggatctcggtcagacggccatgatcggaaaaggcaagagaagccaggcagtgatcgatgcggtggtacgtaacggatgcgtataccttgcagccatcggaggagccggagcactgttatccaaatgcatcaaatcctcagaagtcattgcgtacgaagacctcggaaccgaagccatccgtaaattacaggtcgagaaccttccgctcatcgtagtcatcgacagcgaaggcaataacctgtacgaaactgcgatcaaggagtatgcaaagatatgagaagaatccttctgatggtactccggaatattttcttcgtgccggtctactggtacaagttatgctaccatgccagacacgtagacaaatatacggaagaagaacactataaattattaaaatacatcgatcaccgggcaaatacatccgggaatatccatatcgaggtacacgggcaggagaacatccctgaacaggacggattcatgttctacccgaatcaccagggactctacgacgtgctcgccattatggaagcatgcccgcgcccgttcgcggtagtcgccaaaaaagaagtggccgacgtaccatttctcaagcaggtattcacctgcatgaaggcatacatgatcgaccgcgaagatgtgcgtcagtcactgcaggtgatcgtaaatgtcagcaatgacgtgaagaacggaagaaattttctgatcttcccggaaggaacaagatcaagacagggcaatcaggtacaggacttcaaaggcggcagcttcaaagcggcgaccagggcaagatgtccgatcattccggtagcactgatcaactgtttcgtgccgttcgactctaagacaacagaacatgtcaatgtacaggtacatttcttagagccgctgctttacgaagaatacaaagacatgaagacaacagagattgcagcaattgtaagagagagaatccagcatacgatcaatgaaaatgtataaaaggattacagggaaatgagagaaaaaatattacaggttaagacattcggcagtttttccatgatatatgacggaaaatcccttttcggaagaaaagtaggagagacacagttcgcttccatgatgcagatgctgatacatgaaaggaaaaaaggtgtcagcagggaccgactggaacaggaactgttcggggaacgggaagtggaaaatgtacatcatgcccttcagagcgtcatttacaacgcaaagaagagactggaaaaagcaggacttccggatgtaaactatatagagatcagaaacggtgtcgtctactggaatgacgagattaaagtacaggaagatgcaaccgaatttgaccagatatacaacagaataaaacatgagaaaaatccggataaaaagataaaagacctcgaaaaaatattcgagatctataccggagaattccttgtgaaacggcagagtgtgatctgggttgccattgaagcaagacggtatgaggacatgttccgggaatgtgtagaagaagcagccggactgtaccgggaaaagaagaactatacacagctcgaacatctcggagtatatgcatcgaatatcgaaccattctccgattgggaggcattgaccatggaagctatggttgcgctgggaagatacgaagaagccaccgatctgtacgccgatacggcagaacgatattttgaagaacggggattaaaaccggccaaacgtcttctggaatccctgaatcagcttggtaaccaagtgatgcattcctacgacgtactggacaacatccagcacaatctggaagaaaaagaaatcccgaaaggggcatatctgtgcagctatccgacattccgtggaatctaccatcatctggcgagaatgctggaacggagcggacagtcgatctatcttatgctgtgtaccattgtggacagcaaaggaagaccgatgaaagaaggagccatgctggaaggactggcaaagagactggaagaatccatctgcacatcgatccgtaacagtgatgtcgtgaaccattacagcaagggacaatacctggtactgctgatcaatacaacgagagaagactgtgcggtaattcagaagagaatcaattacaaattcctcacagaccggcagaggaccggcgtgaaatattatgtgaacagtgtagtatatgaaaaggacctttaagataacacttgaagatccttcttttttgggtaaaaaaatattcagcatgcgggacgcaggcaggatggttcttttgctataatataacaacatattccgatatatgcgacagtctgaaaaagtctaagaaaaatagaaaaaaatacctgcttttttaaaagtttagacggtttctttgtcatgtcgttgtgtaaaatattctcagagtaggaatgtctgcctgaaaataagatgggaaaggagaccgggagaagtgagtaatacaggaaattatattggaacaccatggggaattattctatgtgtggactattatcgggatgaaaaaataaatggacgtatttatcacagatatcagaccgaaccgatccgcattggaggaatgctggaaacagttttcgaaatcgatgctttctttgaccggttgggatatccgtttcccggaacagagagccactattttataaagcatgaaaagacacagcggataaaaatgacaagaaagttgagtgatgaagagatgttaaagaataatggtgaacaaggaacattcataattagagtagaacaaagacaacacagcagctggcagggaagagttacatgggtggaagaaggaaagacagagaacttccgctcggcactggaactgctcaagatgatcgatggcgcactggatggcagggacataaaagaagacgctgaagaagagaaccaggagagagccgtatggcggacaaagaatttcgaagactgaagagaagtaagctgatcgatatcatctaccatcatacgtagaatcattgcagagagaatagcgaaaaagcagtgaaaatacccgcgggaagaaaatgtaaaaaatatgaaaaaagtaattgacattcacattaaggcttgttataattactttcgctggagaaatactcaagaggctgaagaggcgcccctgctaagggtgtaggtcgggtaaccggcgcgagggttcaaatccctctttctccgttaggccagtgagaactgtctgaaacgagctttcagatagtttttttacggccatatataatactgaaaaatgtataaaaagaaaagttgaaaaaagatgaaaaaacatcttgacacttcgaaaaatacatggtattatatacaagctttcgcaaacaaattatttaaaagatttgtaaaaagaaagtgaaaataagttaaaaaagttcttgacaagcagttgagtgtgtgatatactaaacgagctgttgaacaaaataacaacgaaccttgataattaaacaatagacaacaaccctgaaaattctaaagagaattattcagaacagacatttaa

SEQ ID NO: 2810 - DNA, 880 bp, Unknown
  gut microbiota DNA sequence
tatgcaagaacaggtatccagaaagctgattataatacgatctatcagctgatggcagtgaaaaagaaacatccggaatatctggaacaggcggagacacttcttcatgtgccggattatttccatttccttcttacaggacagaaaacctgtgagtacacagaagctacgacaggacagcttgtaagcccgattactaaggactgggattatgaactgatcgatatgctcggttatccgagaaaaatgtttcagaagctgatcatgcccggaacaggcatcggacatttgtcagataagatcagagaagaagtgggctttgatctggaagtggttgcacctgcaacacatgatacaggatccgctgtactggcagttcctgcaaatgacgatgattttatctacatcagctccggaacatggtcactgatgggaattgagagaaaagaagctgactgctctgagaagagctgtgagatgaacttcacaaatgaaggcggttatgcaggccgtttccgttacctgaagaatatcatgggactctggatgatccagtctgtgcgtcatgaagtaaatgatgcatacagctttgcagaaatctgcgcaatggcagaggaagcaaaggatttcccgtcaagagtagacgcaaatgatgagtgtttcctttctcctgacaatatgacagaggaagttaaggattactgccgcagaacaggacagaaggttccggaaactctgggagagattgcaacagttatctacacaagtcttgcggaatgctatgcaaagacagcaaaagagctggaagagatgacaggcaggacttacagccgtattcatatcgtgggcggcggttccaacgcaggatatctcaatgagc

SEQ ID NO: 2811 - DNA, 28934 bp, Unknown
  gut microbiota DNA sequence
gttctttgtctttgctgtttgaaacagcttatttagattatcatattcattggcgtttgtcaagaacttttttaatcttttttcgaccagcttttcagctgtccgtctgccatctctttctcaaacattcgtttgtctcaagtgacagcttattaagaatatcacaagcagttgtgtttgtcaactgttattttattctttttttcaggaacaattcccgaagatttctgattatgatccggcgttctctgcttttccgtaatcagttcccgccgtcttctgcttcgactctgttacctcacggccttgtctaacgcgacagctagattaatataccacaagggcgtttgaattgtcaacgttgtttttatattttctgcaatttagacaattcagataatttcattcttttcccctgcttatttctatataaattgcctgttttcctttcttgacaccgtctatcttttcttttatgattcttcttatataaaaggaaggagttactattatatgtttcacttattacttgccgtaatctatctggcattcatcagcctcggacttccggatgcacttttgggctccgcatggccctccatgtatccggtctttcatgtacccgtttcttacgcaggaatcatttccatgatcatagccgccggtaccgttatatctagtctgcaaaatgacagacttaccaaaaaacttggtacaggtaaaatcactgccatcagtgtagctactactgctgttgctttgattggattctctgtcagccattcatttattgcattgtgtctgtgggcagttccttacggacttggcggtggaagtgttgatgcagcactcaataattatattgcacttcattacgaaagccggcatatgagctggctgcactgtatgtggggtgtcggtgcctctattggaccttatattatgggatatgctttatctaataagcaggggtggtctatgggataccgctacatttccattttccagattggacttactgctattttaatcataagtcttcctctttggaagcaatttcagaacaaaggaaacaccggacaacctgattccagttccgtctgtactttgccggccctgactttaaagcagatttttcagattccaggcgccagagaaattctttttgctttcttctgttactctgcaatcgaacagacatcctctctctgggccagtagttatctcgttctgcatctgggttattcttcagagaaagcagctggattcgcaagtctcttctttattggaattactgtaggcagaggtatcagcggtttcattacttttaagctaaatgactcacagatgatccatcttggtgaagggatcatacttatcggtgtcctcgccatgatttttccttttggaaaaacaattgctttaaccggacttatcctcatcggacttggatgtgcaccgatttacccatccattattcactcaacccccgcacattttggtgcggacaaatctcagtcgattattggagtacagatggcgtttgcctatattggaacttgtctgatgcctccattttttggcattattgcaagatccataggtattacactctttccgatttatctgggagtctttttatgcatcatgttctttatgtatgaaacagttatcaaaaaaactcatatagtatagttttctcataccacataacaataaataaaaaagaaccagtggggacactaaaaaagccacaaaactccgtccccactggttctaaatataattcattgcctgattcacgctactgaccccgatcacttcgattccgtccactttcccaatggacttcaatgtaaccgatggcacaatacaagtcttaaatcctagttttttagcttctgcaactctctgctcgggcatagatacagcccttacttccccgcttaatccaacttctccgaatacgatcgtatcttctgcgattggtttattcttataactggaagcaatagccattacaatgcccagatcagctgccggttcattcatacgaatcccgccggcaatattgacataagcatcgtaattggataacggaagccccatcctcttttccaaaactgccatcagcagattaacacggttataatccaatcctgccgcagttcttctcggcattccgaaattactcctgcagatcagtgcctgaatctccatcagcatcggtcttgtgccttccatcgcacatgccaccacagatccggctgcattctccggctttccactcaacatgaattctgaaggattctctacctcgcatagtccctctctgcgcatctcgaatacgccgatctcatttgttgatccaaaacgattcttcactcctcggagtatccggtatgatgcatgcctgtcgccttcaaaataaagtactgtatccaccatatgttccagtactctcgggcctgcaaccgttccttcctttgtcacatgtcccacgataaaagtcgagatattcagcccctttgccagctgcatcagtacatttgttgattcccgcacctgggatacgcttcccggtgcagatgacacttcttcattatacattgtctgaatcgaatcaatcacagcaacatccggcgtttctttctcaatcacactttgaattgctgccagattcgtctcacataataaaaagagactatccgcgaattctcccattcgatttgcacgcaatttaatctgcttcaatgattcctctccggaaatataaagcaccttcttctgcctggctgccagcttctggcacacctgaagcagcagtgttgattttccgattccgggatccccacctactaatacgagggaaccttgtacgattcccccgcctaatactctgtctaattcttttattccggtttttgttcgttcttcatctgtcgttgatacactggataaagtcacaatctgactctttttctttgccacactgctgcctctggatacaccggctgccggagtactcaccttttcctccacaaatgtattccactctttgcacattgggcactgtcccagccacttgctttcttcatgtccgcaattctgacagaaatatatacttttctttatttttgccattattttcttacgactttaattccaatctcttttcccggatctgcttctgcacttacgctgagttttccacttaagtttgttgtcatgtctccgatattcacatcatccatgtatacaacatactctgcatccgcttccattccaagtgtaaactgaaaatctgtctctccacatactttaaacgaaactacgttctctgttgccttgaaattctctactgcagttcccggtacggattcgtatacaaacattccgttcttttctaattttgtaatctctttgaacgtcttaactttgtagatatccccctgaaattcgaatccgtctaacttagttttgctgtctaatgtataatctccaaaactaagtgtaccgtctgtttcagctcttaaaagctctttcactgctgccattttcttgtcctcctaaggttcttctttcgttcattctattatataataaaatatttttaatttgtagtctttgccgtaaatttaatttcttttttagagattccggcaacaactttcatatttcttctgatttccccacttaaaattgcctcggcaagtttatcctctaactgattctgtacagcgcgtctgagtggtcttgccccatacttcttatccataccagtctctacaatatgctttttcacagaatcacgaatcgtaagatcgattccaagctgatcttttgcacgtttgatcagttctctgcacatcaatcccacaatcttctgcatctgctcaactgtcagtggatggaataccaaaatttcatcaatacggttcaaaaattccggacggaagataaacttgatctcattcataacgttattcttcatccgcttataatctcctgcggcatcttcttttgtattaaatcccagctttttcggatcgatgattgactgtgctccggcattagatgtcataatgatcacagtattcgaaaaatccacctttcttccctgtgaatctgtaatgtgcccgtcatctaacacctgcaaaaagatattaaacacatccggatgtgctttttctatctcatcaagcaagatgacggaatatggatgtcttctcacctgttcgctaagctgtccgccgtcatcgtgtccgacatatcccggaggcgaaccaatcagctttgccacactatgcttttccatatattcagacatatctacacggatcatagaattctcatctccaaagagagcttccgcaagagctttggataattctgtctttccgactcctgttggccccaggaataagaacgaaccgatcggacgctttggatctttcagtccgacccttccgcgcttgatagattttgctactgctgttaccgcttcatcctgcccgaccacacgcttatgaagtgtctgttcaagcttatttaaccttgtgctttctgactcagccagacgacttaccggaatcttcgtccactgtgatacgacctctgcaatatcttcttccgttacttccagatgctttgcatcattcttcttgtgaatacgtttcttgatttgttctgatttctcttctgcatcctttaattctttatgaagcatggatgcctcaatgatattgccgctttgaattgcttcttccagttcctttgcaagttccgtctgtgccttttccagtttatatacattttccggtactttaaatccacgcaagcttacttttgagcatgcttcatccacaacatcaatcgccttatccggaaggaaacggtcattgatatagcggttggaatagctgactgctgcctccagtgcttcttctcttatctttactttatgatgtttttcatatctggagcgcagacctttcagtatctccagacactgatttttatctggttcttctaccgtgattggctggaatcttctttccagtgccgcatctttttcaatatatttgcggtattccacgatcgttgtggcaccgatcagctgcagttctcctcttgcaagggacggcttcagaatattagacgcatccatcgctccttctgcaccacccgcaccaatgatcgtatgcacttcatccagaaacagaatgatattacctgccgccttcacctcctgaatcagacgtttcatacgttcttcgaattctccgcggtattttgatccggcgatcatacttgccagatccatggtatagatacgttttcccctgattccttccggcacgatgccttctgcaatctgtgttgcaagcccttcgatgactgctgtcttaccaacacccggttccccgaccagacagggattgttctttgtgcgtctgcttaagacctgcatcagccgtccgatttcttcttctcttccgatgaccggatcgagctttccttcttctgcttctgctgtcagatcggtaccatactgatctaatactccgttctttctcccctcttccggtccatattcttcctgatacatcttcggatcgatcccgacagtttcaaatatttcctgatagatcttctgaagattcgcacctaacgtagtcaggatctttgcagcaacacaatccatatcacggataagtgccgtcagcatatgttctgttccaatctcttctgagcggaactgttctgcctctgtcttactgtcttccagaatatattccagtctcggactgtattctggtttctttctgcctggcatctcacctgcaggagagatcagttcggacatcactttctgtatattttcctcatctaccccgttcgttcccagaacctgcgccgctacgccggtatacacctttctgagtcccagaagcagatgttctgttcctacataagggtgtgccatctccttcgcacttttttctgcaatcttcagcacttccttagcctgccttgtataatccatgcctttttgttcctttctgcctatcttctatactcgtcaaatatctcatccaccaatgcatgcacatcttctcttccaatattcttgcagcatccttttgcaagtaatatcgcaagcttttccctgagttttaacattgcctgtgccttgtccgcatcaatggcgactacggctcctcttcttctgtccaactggatgaacccttcctgccgtaagatcgaatacgctttattcaccgtatgcatattaattcccacagtatccgccagctgtctgacagacggtaaggtatctccctcccgaatcatgtctgttgcaatccccatgataatctgattctgcagttgtacatagattgcctcgctgctgttaaaatcaatttctatcaacatctcatcacctgttatctgtctttttcttttgttatatggatactataacacaattaaaaagagcttacaacctaaatcgtaagctcttcttttcatattcttttcatactttttatgcttcgtcaatcgctttaccaatatcatgacgcatatatttattatcgaattttacccattcggttgccgcataggcattagctcttgcttcttttaagtcttttccctttgctgtcacaccaagtacacgtccgccgttggtcacaatctgatcaccgttgaatttcgtacctgcatggaagcagtaatagccttcgtgcctgtcaaattcctccagtccgctgattggaagtcctttgtcatatttcaccggatatccgtcacttgccagaacaacacatactgcagcattgtcttcaaactgcagatcgatctgatccagcgtaccatcaatacaagcttctactacatcaatgatatcatttttcattctcggaagaaccacctgcgcttcaggatctccaaatctggcattgtattccagaaccttcggtccgtccgctgtcagcatcagtccgaaaaagattacacctttgaacggtcttccttctgccttcatagcatcaacggttgcctgatatacatatttcttacagaagtcatctacttcttctgtatagaacggacttggtgaaaatgttcccattcctcctgtattcagacctgtatctccatcacctgcacgcttatgatcctgtgccgaagtcatcgttttgattgtatttccatctacaaatgacagtactgagacttctcttcccgtcataaattcttctataaccatctcattaccggctgtaccgaatttcttatccagcatgatcgtcttcacgccttcttcagcctcttccagattcttacagatcagcacgccttttccaagtgccagtccgtctgcttttaatacaattgggaatctggcctccgtcttcagatattcaactgccttatccggatctgtaaaattctcataagctgcagtcggaatgttatatttcttcataagatccttggaaaatgcttttgatccctcaaggatcgctgcattctttttaggtccgaaagtacggatacctgcggcttccagttcatccaccagaccgccaaccagtggatcatccattccaacaataaccagatcaatctctttttcttttgcaaatgctacgatcttgtcaaattccatggctccgatcggttcacactctgcaaattctgcaattcccgcatttcccggagtacagtaaatcttgtctactttatcgctttttgcaacgctgtatgcgattgcatgttctcttccgccacttccaacgattaatactttcatcttacactgctcctttatcctctatgactcgatcgtcacacgatgtccttctactttaactttaccgtttgcgatcagatcaatggctcttggcagaattctccattctgcctgctccattacacgtctctgcagaacttccggggtatctccctgttccacttcaactgctttctgcaaaatgatcggaccggtatcggttccttcatctacaaaatgtaccgttgcaccaaccaccttcactccgcgttccagtgctttttcatgcaccttcaatccataaaatcctgttccgcaaaatgccgggatcagggacggatgaatgttgatcatacggtttctgtattttgcgatcatctctgccggaatcactaccagaaatccggccagaacgatcagatccggctgcatgacatccacagccttcataaattcctgattgaaaatctcacggctttcataatcttttggagatatacactgattcggaatcccatgtttttcagcacgctccagtgcatatgcattcttattattactgatgacgccggcaatctttgtgtttgtaatctcgccggaatctactgcatctatgattgcctgcagatttgttccgccaccggataccagaactacgacatttaacataatgtcactcctttttcaccgtcttcgatatgaccgatcacatacggagtatctccggtcgctttgattgcttctattgtcttatctacatcagcaggatcaaccgcaacgatcataccaatacccatattataagtattgtacattgcatgctcgtctacatttccctcttttgcaagctttgtgaaaattggcggaaccggataactgtctttttctacaacggcttttactccgtcttttaacattcttggaatgttctcatagaatccgcctcctgtgatatggctgcaggctttcactttcactcctgcgttctttatgctctttaatgctttgacatagattcttgtcggagcaagcagtgcttctccgagtgtagttcccagatcatcataatatgtatccaacgattcttttgtcatctcgaatactttacgtaccagtgagaatccattgctgtgcacacctgaagatgccataccgatcagtacatctcctgcttttaagtcttctcctgtaatcatatcttttttatcacatacaccaactgcaaatcctgcaagatcgtattcatcttccggcataagtcccggatgttctgctgtctctccgccgatcagagctgcttctgactgcaggcatccttctgccacaccttttacgatagatgcgatcttctccggataattttttccacatgcaatatagtctaagaagaataacggctcgccgcctgcacatgcaatatcattcacacacatagctactgcatcgattccaatggtatcgtgcttatccatgatcatggcaagtttgacctttgttccacatccgtctgttcctgataacagcaccggttcttccatttctttgatcttcgcaagagaaaatgctcccgagaatcctccgagtcctccaagaacttccggacgcaaggtcttctttacatgctctttcataagttctactgacttgtaacctgcttcaatatccacaccagcttttttgtaatccataatccgatctccttttgtacctgttatttatttttgtacttttatatctattattttgatgccagatatgcctcatatccgatagaatcaagctttgctgctttggctttgactgcctctttctgttcttctgtataagctttcagtttcttcagaagttcttcatctgaagccgcaagaatctttgctgcaagaattgctgcattctttgcgccatcgatcgcaacggttgcaaccggaactcccggcggcatctgcatgattgaaaacactgcatccattccatccagattctttcctgaaagaggtacaccaataaccggaagggcaaataatgctgcacacattcccggaagggctgctgccattcctgcaccggcgatcataacctttattccgcggctttctgctcctctggtccattcaatcagttcatctggttcacgatgtgctgagatgatcgtcatctcatactcgattcctaactcttccagcattactgcagccttactcataactttaagatctgagtcactgcccatgataattcctacttttggcataattttcatcctttcttataagtttgacaaataaatcataccctatttattagaatttttcaatggttcatttaaaatctctgtcccgggaagtacaaattttccattttccagtaacacaatctcttttttatcctttgtaacaaccgtaatacttccaagttcttcatatggaatggtaatatctgtatggcagtggaaatatgcttttgatacatcttcttttctgcggatcgataccgaattgtctcttgcaataatctcttttccgttcggattatagactttgatatcctcgcaccagctgtaacatgtatctcccaccgcaaaatgcggtcccatcttctctgcgatcaggatcggcatcttatcctcgattccatacttcctggcagttatatatgcagttgtattcgttccgatcgcaaattcaccaagcggcagcgtcggatgtttgtataatacattatcgtgaatatacgctttattttccagatcgcgatcaaagttcgcacagttatactctgataccatgccatttgagaatgtgatctccagatcacgatactgcagttcattcagatacactttgctgacatgtaagactccgttcgttccttccagaacaggagaagtaaagacttccccgaccggaatattcacatctgccacacagttctcaaagattgtttcttttgccgagtcattcaacggatgtaactgcacattcagatctgtacgattcccattcgtcccgagaatatgcacgtattctccctgatccaatgcatcaatcagtgtctgctgtactttttcatatacttttgcatccagtgtgtttatacggataatctcatcgaaaatctcttcatacttctctccgatctccggcaccggataggcaatgatcgtaaaactgcgctcttctcctttgatatacctgttcaccatctggctctgacggctgtcatactgcaggatcatctcttcctgactctccgaaagctttgccacagtctcttttgccaccggttcgaatggttcttcaccaaacatgtcaatgcatgccggtcctgcaaacccggctgcctctttcttataatgttcatatgttgtctgcatcacttccagtttgcgctccaggtacttcttatccatgaagattgcctgatcatctttatgatcgtattcatactgcttatttgccactgctccgcagtatccgatcttgtaatgttgtctctttgtcaacacactgaccgctgcacgatatatgaccggttttaatcccattttttcaaagttctctatcgctttctttactacacgttcaaatccaagaatataacggatattcactaccgatttcttcgaaagatcttttccggtatttacgaatccaatgcggtatccctccgaatagacatctgccatcttctggatggtctcttccgggagacggttcagatgctccgctgtcttccattcgttttcgctgatatactctccaaactgatacagatatctgagatctttaagatcactgttcatgatcagatctgttgcgaaggattcttccggcaggatctgttctctgatacgatccgcaaggaatacatcacaataatcacttgcataccagtaaaaaatatcacgggctgtttttgcatccggtgtatcctcgaactggttatatatttcaatcaataattcatacaaaattgccagatattccgtctttccctcaaaaacataaacgactgccccacgaagttccgcatataacatcccaagaatctgtcctgattcttttccaaacatcttacacgcataatccggattcgcataactttcttcatactgctccggcaaaacatcctgatacagccgtctgttccatgttcttaattcttccagcgtaaatttctgataccttccgtccagaagttcatctctcagttcgtccaacataagcacgaactctgccatcttcttaaaataatctctgtaaggctctttcaccgtatcttctgtctgcatcagacggatacggtcaagtgccagttcatatctttcttctatcattctacataagccccctgacgaataatccaaccataacggcgagaaataccgcatttaccgtgattcccaccttgcatgttgtataaatcttttcgcgttctctgaatcctttcatgccaagccagattccaatcactgccatcgcacaggttcccagtccgaaaaatccgatcaatatattgacatttcctttatttaaaaatgaaaaaagaatcatcacgatcaccagaaatgcaatcaccactgcataagtacaggaatagacaccccttttggagtgtctgactgctttctgtccatatttcgttttgatcatctttttccgcttttttttacgggctttcgctaccgctttaattctatcatcttctgttcttagtttttttcccagcatgtcttctccttattgccgcacatattgcaaataatatatatccgcaaattccaccgatggtattcagtaacaggtcatctacatcaaagctccccacctttgtaataagctggaagacttccacgcacaggctcagtacaaagctgtaatatgccgttgcaataaaacttctttgtctgcttcccatcgggaggaaaaatccaaacggaataaatataatcacatttccaaataaattggtgaacattgcaaagaatcccacctgctcacgatactgccagaatcttttgatttctttaaacagtaccagattataatggtattccctcatctcacctgtacgtccataccaatcagagaacagcaggaaatatacaataaatattacatataatataaataatatctttcccagtatccggattcgttttctttttcctgaatccaacgtcctacaacctcctgtgtctcttcggtattagaataagattcctttcttttctttcagtaaacgggcaccgcttataatggagatcacacctgcggcgattcctactaccgtaactacaattcctaccgcaatccctgctgcaccggctagccccattgctttatatgctttttcattcatatcctgatcccccgttttctattttgctccgtactgttcataatatgcatcgattgcttcttttaatgtatcatcgatcacaactttcccgtcacattctttattatacaggcactctacaacttcttccattgttacgatcgcagctgtatcgaatccatacaaatctttgatctcatccaatgcacatttctcgccgccttttcctacttccatacggttcagggataccatcagacctacgattgttacatctgcggcaccttttacttttggtacggtctcttccatagactttcctgatgttgtcacatcttcgatcatgatcacacggtctccgtcttttaacttgcttccgagaaagcttcctttatcggcaccatgatctttttcttctttacggtcagaacaatagcgtacttcttttccgtaaagatcactgtaagcaattgccgtgaccactccaagcgggattcccttgtatgcaggtccgaacaacacgtcaaaatcatctccataggtatcatggattgccttcgcataatactgacctaattttttcagctgtgatcctgttacataagctccggcattcataaagaacggtgattttcttccgctctttaatgtaaattctccaaacttgagcacatcgctctctaccataaattcaataaactcctgtttataactttccattttgattccctccatatatttcagactctgtgcgtcttatttattgcataataattccatttaattctatcataagaaaatcagtttttcaattcacgtcagaaaaaaagaacagtatatacacgtaatcattacataatctttgtctcttccagcttttctgcaaatacctcgttcatccggattaccggtttgcgcagaagcaatcctagaatcaatgacaaaagcaggaagattcccagcttcccaagttccgtccagtatgtcataccatacattccgccaatcgtctccctgaatgccgacatactatgaacaaatggcagtaacggatatactgctttgaagaacgccggtgccacttcaatcgggaatgttcctccggaacctgccacctgcatgaccagaagtacaacactgactgcttttccgatatctccgaatgacaccgtcagtgtataaatgatattcacatatacgatgctcgagaaccatcctgccagcataaacaagaacggatgcttacactggatgcccagatataacagatctcccagacagatcagagtactctgcagcagaccaacgatcaggaagatgagataacggcccaggtattcctgatgtggttttacttttttcagaccttcggtacattttgtcgaaacacctgtctttaacatggcaaccagtacgattccgccgatccagatcgacaaggtggaatagaacggtgccatcgaagagccataattttcaatcttatagacctgattcgtcttcaggcttaccggtgctgccaggaactctccgatcacactggaatccccggagatcagttcttccaattgagaaaagtctccgcccgactgcatctgactgatctttcctgttgtatcactgatctttgcggatgctttatccaacagcttgcaggaatgatccagtgccttattgatctgtgtcagatctgcggaagccgaagatgacagatcatagactccatccacacttgcatccagctgatccatcagactgcccagactgctgctggtatctcccatggatttggaaagcttatccaaactgtttttcacattcttttcatagtcggatttcacatttgcaagactgtccgcactttcttttaccagtttatccagctctgctttattctggattgctgtgcctgatgcatctgtcagagaggatgccgtgctctgtaactgattcttaagctctgtctgtgttgcgattgtctcaccgagcttccctgaaatgttgccgagcaatgcattcagtttcgtattgccaagtccgctcactttatctgccatatcatctaccgaattctgcagtgactgataggcggctgttaccttttccacgctggatgccagagtgttcaatgtcgccgctacatctgccgcactctgtgaattggatgcaaatgcggaatcaatgatcccggacatctgtgaataaaattcctttccggaattcagtgccgcatttacgccatccgttgcaccgctgattgttccttcaatcccattgaatgatttcttcgttgtcttcaaggcatctgttgtcttatccgaacggttctgtgtctctttcagaaatgtgcctgtcgtatccagaagctgctgtgcagatgtcgtcattcccgcaaaggaacttaatgtcgcagatgccacattcaggtccgaaccgatctggtccagattatttgccagattccctgcaatggattctactccattctgatctgccacattggtaactgctttgaaagaagtaataaccgtatcactgatcgtttcaataaatacttcattaacctgtctctggatcgcgcttgctcctttatctgtaaccttcggtgcgatcgcattttcttttgcattcgaatagtatgtgatacttggtttactgatattttcagagaacagactcatcatatctgtactgaagttttccggtatcacgatcgccgcatagtattttccggattttactccggatactgcttttttcttgctggtaaatacccagtcaagctgcgaattactgcgaagcgatgtcagtacctgatctcccatattcagttcgagcggaatcaggctgccttcataccccttatccacgcttgccaccgcaacttttaagtttcctgtatttttatatggatcccagcttgctgcaatattaaaccaggcataaaggcagggaacaacggtgatccccataatgacgatcatggcgatcacattatttttaatccgttttatatccctccggaaaatctcccatatatttttcatacgcctttttcctcctttattccccgtatcagatcttctgttgtcattcctgtggcagcaagctgttttaacatcttatcgtgtatatattctacacagatcagatacagtgcaagcgcgatcagcgatatgatccataacaccagaaataccagtttggattccaggctgaacatcagtatcaggaaaatgagcgggataatgatcattccaaggaatccaaagcggatcatcttcggataacgcttctcgaatttttctgatctttccagaaattcctgtttccactcatcatcttccattaacgtcttcatcatcatggtcagttccggccgtttccgctctgctgtttccgtctctcccagcatcagctctgtctctgacagccgcttatcgaacagatgattcagattcataagcagcggacgaagtaccagaccgatgaaaagcgatatcgggaagaagattgccagtatccccagatatttccagatattcgctccatacataccggcaatgcattcacgcattgcactgattccatatgtgaaaggaagcagtggatgaagtttctggaaaaatgcaggtgtcatctcgatcggatatgttcctgccgatcccgggatctgtaaaataaccagtacaactcccagtgcttttccgatatgcttgaacgtaagtgccagtgcatagatcagatttacatagataaaggaacagaagatgcctacacatacgaatgcgaccgggtgtacgcattgtactttcagaagcacaatatcgcccagacacacgatcagaccctgtaccaggcctaccgccataaataacatccatctgccaaaataagcctgtgataccgtaaatctgtgaatcttcccgtctctatccacttcctgtttcagaatggataccaggatcagtccacctacccacaatgccagattggtataaaacggtgtcataccggatccataattttccacatcatacaatactttcgactgaacacttaccggcgaagacataaaaccggcaatggaatccgcatcaatcccctccagagaggtcagtttctgatacatctgtgaactttgcagtgctcccagatcgtcctgaaccgaagccagtgattcatctacccgcttcagcacctcttttgtctgtcccagtgccgaggcactgtctttcaagctgctgttgagctgattcaggatactcttcatctgttcaaccgttggttctacaccatccagtgttgaggccaggcttccgcttaatgaagccagactgtccagtgactggttcaattgcggcattaatgtctgtgcaaaattactgcggtaatcctgcagactttccttgctgtcttttgcaagcttttccagagatgtccgtgtactctgcgctgttgtcactgcattctgaattcctttattgccattcttcaatgaagccaccagcccctgaagggacgcattctggctctccaattcggaaatcttttgtgcgatcaatgccgaaaactgctgtgataattctgtatttccctgaatctgttcattcagcgcttttaactgactcagtaattcctgattcctggtaaggagagtggatactgttgtcaggcttccgtctactgctgtcagagcttgtcctgccttcgtctcgaatatgcccagttttgccgatgcagacacataggtattattcagaagcgtctcgccgttcgacatactatccgagaactgtgtcgaaaatattcctactgctgttcttgtgtctgaaagtaccgttccgctatctgaaagtgtctgcactcccgattttgccgatgcattgacctgatccagtgttttcaccgcattctggatcacttcatctgacttatccaccgttttctgaaaattttccagcactttgttatattcttccagattcttccttgtctcggcaaccgcacagatcagactcgaatttccctccgtcactcttcctgcgatatctccggctttttcactcagcagctttgaaatggattctgccgccaccgaagaaaaggtgtcattgatctcctgctggatcgtgcctgcacctgtatctgtgatcttcggagcgatcgcatttttcttttcattaatataataatccagctccggctgtttgatatctcccgataaaatgctcagaagcgattcgctgaaattatccggtatcacgatcgccgcataatattttccggatcttactcccttttttgcttcttttgcatctacaaacttccagccaagctggtcatttttcttcagattgtctacaatattttgtcctgcgtccagtgacatctgctcactgtcggcacctttatcctcattggcaatcgctacctgaattcctttggtattcccgtacgggtccatattggcagcgatattaaaccatgcataaagagacggcagtacactgattccaaccaggatcagtaccgccgcacggttacggaataaccggccgagatctcttttgaaaatctgaaatgatttcttcatccacacatcctcctttggtatcgtcatatacatatcagtataacaaaaacatttctgaaaatctactcaaaaaactgactgccagtcatgtttttattatagcatttgccatacaggcacccgtatttttaccgttcacggtttttcttatattttccttacatatttccaagaaaaaagagacattgccgatagcagtgtctctttatcattattttacaataccaaccatatctttcacggattcaaatccatttttcttcatatatgcttcgattccgtcaatgatctctattgttgcatttggattatagaaattcgcggttcccacagatactgcggatgctcctgcaaggatcatctcgattgcatcttccggtgtagcaattcctcccattccgataatcggaatattgaccgcctgcgccgtctggtataccatacggactgcgattggatgtacaaccggtcccgatacgccgccggtcttattagctaccgcaaatgttctgcggttgatatcaatcttcattcccgtcagggtattgatcagagacaatgcatccgcaccaccggcttctgctgcctttgcgatctctgtaatatccgtaacatttggtgtcagtttcatgatgatcggctgttttgcgatctttttgatctgagccgtcagttcttctacatgctttgcgtcctgtccaaatgcaaggaatcccgcattgacattcgggcacgagatattgatctccatcatatcgatcggctcatccgccagccgctcaacaaccgcaagatattcctccggcgcatgcccgcagacattcacaatgatctttgtatcatatttcttcagaaacggaatatctcttttgcagaacagatcaattcccggattctgaagtccgatcgcattcatcatcccgccgtatacctctgccacacgcggtgtcggattacccggccacgggacatttgcgactcccttggtcgtcaccgctccgagacggttcagatcgacaaactcaccgaattcttctcccgaaccaaatgtaccggaagccactgtaaccggattcttccactctacgccggcaatatttactttcatatccattataaatccacctccgtagataagaatactggtccgtctttacagattctcttgttattcacgttgctgtgtgcatctttttcctttgtcttgcagacacatgccagacaggcaccgattccgcatgccattctctcttccagagaaatatagcattcgatccctctctcttctgcataagtcttgatcgcccgcagcattggtgtcggtccgcatgcaaatatcatatctgcatccagattctgctcacggatagcatccatgacattcccttttgttcctacacttccgtcctctgtggaaatatataaggtcccgttctgttcaaattcgtctttcaggaatgtatgtgcatctctgtagccgacaacaatctgcttttcttcgcactgcatctgtttggcaagttccaggattggcggaacaccgattcctccacccatcaggaatactttctttccttctgctttctcatatggaaatccatttcccagaggtccgatcaccggcaccgtatctcctgcctttaattccgagaactgttttgttccggtcttttctccggttacacggtataccagtcttaatttttttccctctttatctatttcacagatactgatcggacgcggaagtaatttgcttgcatctgccgtgtatacagatacaaactgtcccggtctggcagtccgtgctgcttctgtctcaatccacagactgtagatcccgtctgccagcatctcctgtgacagaactttcgcctgttctttctttttttccatcttcctttatctcctgttaagattactctgtcatacgttttttatctgtcttttttgtcagatcagaccttatctgttctcaagtgctcccttgatgtctgctaccatagtttcaactgctgctctggatgcatcaccaaagttctcagctccaaactttgcatactgctcctgcttgtatgccgcaatgattcctcttgaagagttcacgattgctcccaatccatcttcattaaagaaatgtaccagatcttttccttttcccccctgtgcaccgtagccaggaactagaatatatgccttcggcattacttttctaagtacttttcccatctccggataagttgctccaactactgctcctacataactgtactcatcacccatgacttctgatccccatgcagccactttctctccgaccagttcatacagcggacgcccatcaatcttctgatcctggaattctccgctggatggattggaagtcttaacaaggacaaagattcccttcttttcttctttgcatacatccaggaatggattgactccgtctgaaccaaggtatggattgactgttacaaagtcttcgtcaaatggtgcatatgtcttgcttcctactttcacttttccaatatgaccaaccgcataagctgcagatgtagaaccaatatctcctctttttatatctccgatgacaaccagtcctttttccttacagtaatctaccgtctttttaaatgccgcaagtcccggaagaccgaattgttcatacatcgcgatctgtggttttactgcagggatcagatcatacgtcttatctacgatttctttattgaactgccagattgcttcagcggcaccttccagtgtctcaccatactctgcaaacgctttctgctgaacctgttccggaatgtagtttaacattggatccaaacctactacgatcggtgctcctgtcttctttatgttggctactaactgattaatcaatgtcttttcctcctattttacatgtatcatcttaattttacattatttatattttaccataaggcatactaaaagggaatgcctaactgcattcccttccaaactcttcttctgccatgtcattgccggcacaccattacttcatctgtgcctttactgtctctactgctttttcaagctggttatctgcatccggattttcttcatcgctctggtacttgatttttacatccggtgtaattccttttccattaatgcttcttccctttggagtaaaatactctgcaatcgtaagttttacagctgttccgtcatccagatcaaaaatctgctgtacaacaccctttccatatgtctgggttcctacaatcttaccgattccataatcctggattgcaccggagtagatttctgatgcgctggcactgttaccatttaccagaactgccagcggcttggtaaactgatgctcttcatcagatttcatctccgtctttttgccatctttgtcttctgtatagacgatcagtccctttggcagcatcagatccagcatatcacataccgtactgagtgaacctcccggattattacgcagatccaccactaatcctgtcattccctgcttctcaagatcatccaatgcttcttcgtactgatcataggttaccgtatcgaattcagacactctgatataaccgatcttgtcatccatcagcttatactctatcgtctgtgcctgcacagtgtctcttgtagcagtcacagttacctccttcgcattttctcctcttaatacggtaagttctactgttgttcctttttcgccttttattttacttacaactttcgaaaggtcttttcctgttacttcttttccttctaccttatataggatatcattgtccttaagtccagctttttcagccggagaatccttatatatctgaaccagagtaatcactcctgtctccgtgttctgagacatcacagcaccgattccggaatattccccaccggtcgattcatataattcttttgtctctttcttgttgtaatataccgagtatggatcattcagaccattgatatagcctttatagattccatcttccagattcttctcttttacgtcccccatataatgcttcttgaccaggttctgtaattccgatatcttatcctctgtttttgatgtgatatcactgcttccactatttacttttaatccgcaggacacaagtcccgctgccaataacatagcaagggcgccacaaagcgcccctttcaaaaaactttttctgtttttcatttatctgcctcttactatgatctgtcttttattacagatagtttgccggattgaccggtgttccattcaacattacctgaaaatgaagatgcggtccggtcgaattaccagttgttcccactgccgcaacattctgtcctttgctgactttctgccctgcacttacataaatcttactgcaatgcatgtaatatgtcagcagaccgttaccatgattgattaccagcagatttcctgcatttcctgcatatcctgctgagatcacagttcctgctgccgctgcatagattggtgttcctgttgcagctgcaaaatcaattcctttatgattcgtgcttgctcctgcaatcggctgtgttctatagccaaatggacttgagatatacccggccggacaaggatgggtaaacgttccattccctgatacaaccggcgaaccggcagagcttgaagatgaacttgtattcttagataccgctgctgcttgcgcttttttcgctgctgccgctgcttcggctgcctctttttgttttttctcagctgcggctgccgctgcttctaactgagccagcttattctttgtatcgccaagttcactgtccagcttctgtatctcgctctgtttgctcgtcagcaactgattgacattatcctgttttgcgatcagatcatcctgcatcgtctgcaattgtttgtattctttctgaagctctgcttcctgattctccacatccgttacaaccttctgaaactccaccagcatacttctgtcataaccggatatcgtattgatatattctgcattattcaaaaactctccgatcgatttagaagagcataggatttcaataaatccggtatttccgttctcatacataaaacggattctctttttcatgctttcatactgatcattttcatttgcctttgcaagaatcagctcgtcttctttattcgaaatttcactttccttatccgagatttttttctttgtcttttccatctcatttaccagatcattcagttgattggcaagagatgtcttctcactctcggcagtttttttcttgttctccagctcttctgcttttttctttgtgtcatctatctcagttgcatacgccggcatgaacattccacatgtaaatgccattgtcagcagaagacttatcatcttctttctatttatcatatgtcgttcctttccggatcagaaacattataccttcaaatgcttgcggattgtaaagaaacttccaacaaaaccgattcccacacctaaggcgattccgattggaagcaatgttctgtaaacagttgctaccggaaggaagtctataatgttattcagcaggctgaattttgtcataatatatgtaattactttatcatacataaagtacagaagtaccagcggaataaccgctcctacagctccaatgatcagaccttcgattacaaacggagcacggacgaatccgtcttttgcaccgatatacttcatgatcgcaatctcttcacgtcttactgtaatacccatagtaactgtattactgatcaggaaaacagatactgcaagcagaattgcaataattgctacggacacatagcccaccagcttattcacgctcgacaacgtctttgctaccacatctgatttgttgactttacgtacgccttccagtgattttgcaaaagatacaacgctcttctgctttgacacatccgaaagatacacttcatagttgtcagaatttgcaagcgggttatcactcttaaatccttccgccagatcgctggactctccaaagtactgacctttgaacttgttccatgcttcgtctgcacttacataattcactttcagtacgccgtcctctttcttaagctgggcaccaatcgaatctttctgttcctgtgttgtatcttcgttgaaaaatactgtaatcgccacaccttcttctgctttttccacgatataattaaagttcattaccatggaatagaacagtccaaacaggaagatgcatgccgccatcgttgcaatcgaagcaatggaaaacatcttatttctgcggatgttcttaactccttgtttcatcgaatatcctattgtactaattctcatgcttgtacccaccttttttctcgtcgcttacaatgacaccttttttcattgtaacaacccgcttctgcatttcgttcacgatttcctggttatgcgtaacgaccagaaccgtagttcctctgtcatttgcctcttccaacagtttcataatctcccatgaatttgtcggatccaggttaccggtaggctcatctgcaagcagaattgctggttcattcacgattgctcttgcgattgcaactctctgttgctcaccaccggataattcctttggaaatgccttgtatttttgggcaagccctaccagtgacaatgccgccggtacttttttcttgataattcttgtagatgtctctgttactctctgtgcaaacgcaatattttcatagatattgcgatcctttaacagacggaaatcctggaatacaacaccgatatttcttctgtacatcggcactctccgatgtttcatacggcttaagttattaccatttacgataattgttccagatgtaggctccagctctttcatgataagtttaatcaacgtagacttaccagatccgctgtctcccacgataaacacaaattcaccctgttcaatcttcagattgattccattcagggctgcaaccccttttgagtactctttcgttacttctcttagttcaatcataagttcctcctgattattaatactccagcgactccatatacttcatatacttcactaccataagtgcgattttaaatgtaatggcgtcttcaaacacacgcagatccagaccggtactcttctgcagtttatccagtctgtataccagtgtattacggtgtatatataattgtctggatgtttctgatacgttcagattattctcaaagaatttattgatcgttatcaatgtctcctcatcaaaatcatccggcgatttcccctcaaaaatctcacgtatgaacatcttacaaagtggaatcggcagctgatagatcagacgtccaattcccaaagcactatatgcaataacgctgcgttcactgaagaatatcttaccgacatcaagagctaatttggcttctttatatgattttgaaacttctttgatatcaccgacaactgttccgtatgctatcagaatatcttcttctccatcttctttcaggagcgtatacatattctccgcaatcttctccagttccgcatggccatcattcggttccagttcctttaccacgataatattcttctcatcaacagctgtcacaaaatccctggtacggttaccaagaagtgttctcacgttgtcgagcgcattcgtatctttttcatgctttgtttcaataataaagataacacgtcttacttctgtgtcaatatgtaatttcttagcacggttgtaaatatctaccagcagcagattatccagcaacaggtttttaacaaaattgtccttatcaaatctttctttatatgcgataagaagattctgaatctgaaaggccgcgatcttgcctaccatgtaaacatcatcacttcccccattggcaagaagtatgtattccagctgatgttcatcaaaaatcttaaaaaactgatatccctgcacgacctgactgtctgccggggattcaacaaaggaaagtacctcctctacgtagttctcctgttctgagaatgtgcttgcaagagatttaccgtctgtgtccatcacgcaaaagtcaattcgtgtaatccctttcaatccttcaattgtattttgaagtatttgattagatatcatattccatctcctccactcttttcaatatgcattttacacaacaaattcactacaataatctacaaaatacatatcgtcaaatcttatcttaatatatataaccaaaaaaataaagaggaaatcacacttttttggtgatttcctcagtttttttacattttgtacatatttattgcatagacatagtgacgaaataactttcttatatttttcttaggatttcattttcagcttatttttttccatttcacgtctgaaaatgtgattcaagagatactttgcaattttcccctgaccgaatcccggcttacgtggcgagaatatcttctttccaactccgatccaaactcttgcatccagaagatttctgttttttgcaataaaatcttcctgtaatggaaccgataatgccgaaaggacacaatccacttcacttccgttgatcgcattcaccagcatatcatccgctctgccttctgcagataccttcgccaacccaactaactgaaccccactatatgccttctgcagataccggaatgcctcctgcccttcttcttctgactctaccagcagatagagtcttttatggttcttatgcagatagcgcataaacatcttcagatacaatttcatattaatctcttccggcagttccggttcttccgctgcttcaaggatcagcttttcccccggcaatatcatatcaaattcattcatcttttctttcagttccgggagatcgttcatctgcatcagcgcatctaccgatacaacatctatcacactcacaggttcagattccagaaatgcaattgtttccttcatggcttctttcgctgtaaaactgtctatatttacacctaaaacattaatcttctcgttcatatcctcacctgctaactcttttaccagttgttcgattatagcaaatggatatttccttttcaacctttattacataatattcatactaattaatattcgtaatatttttgtcatttttgtcattctgtcgtttctttttcgtgatcaggcctccgattcttccggtttccttggaagtgagggatttccacccatctttcattacccggtcgagaagtcctaattcttccgcaatctcgtatttgactttttcatcaggtgtaagatcttccagacggacaggtattttcttttttgatggcatattgattgattcctttcgttttttatcagtatgccacctttcctgctatttcatacatcacagtattttttcatccctgaataaaaatatcctaatactcttccgggtcatccggtatgatgattgccgcaacgatataagccagtattcctgatcctgctcccattgagatcagcacaaatgccagtcttacaagcgtcggatctatattgaaatattttgcaattccaccgcatactccgcatatcattctgtcttttcttgaccggtataatctttttccttccataattctatcctccatattcctgatataatctacgatacatacgctgtttatatttcccgatttccggatccgtgtgcatctgcaggatctgccaccggcagttcctttcgaacgcatggcgatttacatctgttccataaatgtcacattgatagatccgataccacagtcgatatccattttcttgtctgcaccattgtcaatactgttctctctgccgaaacctgagaaactgtaatcgccacactgaatctctccgataccgcagtccagatcataattataatcgttctggtttccttttagctttaaattgatctctcctacaccgcagtctgcatcgatctttttcttcgcatcgcctgctgcggttacggaaccggctccacatttgaattctgctttatcagctgaaaattccagaatatttacttcacctgctccggcatttacctccagatctttggcaagaatctgttctgcttttaattctcccgccttcaggttcagttctacttcttccagctctatatctgcaggaagtgtcacggtaattgttccttttcctacattcctggtctttgtaatttttttatt

SEQ ID NO: 2812 - DNA, 729 bp, Unknown
  gut microbiota DNA sequence
aggagaaaaagacttaaatacaatcgcaaccgaaaacaatattcagccgaatcttctccgcaactggaagaaggagttcctcgataaagcatccgtggtttttaatgacacacgagaggataatctgaaagaaaaactcgctttagaacgcaaggaaaaagctgaatatgcgaaaaaagttggccagctcaccatgcaggtggattggttgaaaaaaaaatctgaagaaacacttggacctgactacgagagtaaatttagtccaaaaccttttgaagactaaagaacttccagttaaaacaggagctacacttcttgatatcaatcgtaccagtgtttattacaagggcatgcccatatctcaggaggagttggattgcaaatcgatcatagatcgattacacacggataatccggcctggggagcacgacaactgtctgctcaactgaagaagcgtgggcatcaggttggtcgccggaaaacgcgccgttatatgaatgaaatggggattgatccaatttatccaaaaatgaacctttctaaacgtatgcgacaggctaaagtctgcccgtatctgctacgtaacgccgttatcgaccgtccaaatcaggcatggtcaatcgacattacatacatccccattaagcgtggatttctgtatctgaccgctgtgattgactggtacagccgctgtatcgttggctgggaagtcgatgatactctggata

SEQ ID NO: 2813 - DNA, 22611 bp, Unknown
  gut microbiota DNA sequence
gaagaataaagacacacaggtaaatgtcgtcgtacatgcggcaaacattcctgttgcaaataatgctcccttgtaatctgtaaaataaagtaagatcagcatcattgtgttagcaattgcatagagtccatagccgacacagagtgtcctaaaatatccttccataagatcattaaatccaagcggaagatatgtcaaaagcagctgtccgatcgaaatagccagtgccgttgtaagtagctgctttaacgccgtatatttcagctccatgtttaagacctttctcatctcatttcccgcctgcaggatatccttgatttctcccttgtcattaaacaaactataataattccgatatttcggatagaaattcacttccacagatacaacgaaattaacggttgtaataagaatcgtcaaataggcgatcatcgcaggtacatcatgatacggtgcaccataaaataatccctgaacatgtacactgatcggtccgcaccacatgataacaagatgtgcaaatagtccgatgttcgtgaacaagcctgtaaaagcaagcggaaggaactgatccacccagcgtaaaaagaaaaatgcactgatctctctctgcggaaaataacggtacaacagcgtcacatcccaaagcagcatgattccataaccgatcgtaactgcgatcatcaacgcctctacatgtggaatcccaatcaggatcaataggaatccgaccaacaatgataccgctaccgctgtaataaatgaaataagaatccctttgtaatccttgatcgctgtcagataactcatcgcattccaggtgacgatcaattctccgaaaaactccaggcacaaaaactgatcaatcagattgattcctgaaaacagaagaaaaatcccatacatgattccgccgactacaagcagaagcgctgttgaaccccagaaagaagaaagcaccgcctcgtggcgttcttcatacagcatatccgcaatatatctcgtcacgaccatagagaagaaactggtcacggtcagcgaagcgagaagtgtgtaagtaatcatacagttcagaagttcccggttatgtctcgtcgcaccggtatgatcgcagataaaagcgattcctaccaacagcacgataccaagcagcatcggacctgtacagatcactcctgcatacccatacgcttttgccgttgctgcaagtccgcgcttctggaataatttttttaactcaaatccgattccggccatctgcctcttccacctcctgatacatcttccggtacttttcaatcatttcttcttttcgataatatgctttcactcgtttctgtgcattctcccccatgcggagtctccgagctctggaagcgcacatccgatccattgcctgtgcgagcccctctcgatacatcggtggaacacaatagcctgcttttccgtatcgatcctcctcgttaccattcagaagttccctgcagcatcctacatctgtagtcacacaaggccgccttgcagcaaatgattctaaaacagacagcggctgtccttccgatatactcgtcaaaattgtaaagtccagcttctccatataagagatgatatccactcgtcctgtaaagatcacattttccagatgaagctgatcgaccagcgcatagcactcctgcgcatactcctcatcatcgacgcctcccataatatggagacgcacatgctctcttgtcgtgcaaagctcataaaacgcatagatcatcgtcttgatatccttgatcggtgccagacgcacgatcgcaccgatgtcaacccatccgtcttcctttttcaatggaataggggaaagcctttcatagttgattccgttctcaacgacacgacatttccccttgtcacatcccatttggatctgtgcatgcatggcattggtaaataatgctgagactagaaacgctctcgtataaataatatccgacagcatatagaagaaagaaatccactgctttttaaatgccggctgtacccattttgcacgaatgatctcttcttcacgctctcttgtgtatatcccatgctctgtcagcagcactttcttcttataaacatgcccgcccaggcatgcaagaagtccgccatatcctgtacagattgcatgatagacatctgccttgggcacttcacttcccattagataaaggaccggaagcagcatagaacgcattgtgtgaaatgcatccgcaaacggagtatatggataatcttttatacagcactccgtcaatatattcaggaattcctcacttcttaaaaaagacataggattcagcttctgatcatgatagagccgaaacaagatttcccaattcgggcgtctacacagcatcagctctttcaggctgttcgtctcttcctctgtaaaggcatgaaacatttttccagaatccttcagccgcaaagcgtcatccagaaagacctcgtgaacttctacaacatttttcggaagctcgtagacaaatttccctttatccttcgcatttgccccaatcacccacagaacaaactcatgctctttcatttcattgatatactggtgcatccaggtggatacacctccaaatatgtagggataacacccctccaatatgagacagattctcacaattaactccttatctgtcgcgtgttaccgctttgtatttcaatcttctaatttctcaatagttactgttggttcctttgcctgaagcagatagagatttcctgtcagatgtgtaagttttcctcccgaaacttcacccggtgttccttcattgatcctcaccataaaatatgcttcatcatagaagtttttaagcttcaattctatagaccgctctgtcactgtctttgtgaatgtaaccgctccataacgctggatcgcaccggatagttctgaaccggtgagttgtctcaaggacggtgccgaatccaccagccagtccatataatcagcgaggttgcccttcatcttttcccagccaagcgccgcaccgcggtcttcgtccagaagatcatccggatgaataaaatgactgttcacaaaatgcatatttaattccgacagtgccgccatcttcatataattatcgataattgcaccggagatgatacgcggctgttctacaatcccatcctttgcaacttcaaattcctgcacatacgcaaactcaccggtgaaataattactggcgatcgtccggatctccgggaaatctttcgcgagcatcttccttccttctgctgacaatacattggacggcggtacatagactgacattgatacaccgggaaatgtatcctctccaaaatggatcaattcttttacagcctttttcatggccgcctcatttttccatgtatcatacggaagcacgtcaccataatccgcatttgaaagactcaacggctgatgattgtatccatgatacccgagttctccaccttgatgaagcagcatatttccaaaatactgaaaacgtctggtatccttctgtttcttaatcgttccatccgtcgcatcctcataattttcaataatcacaccagtatagcgaacgttgtgatcagatgcaagctcctgcatatccggccaccacacatccatatagaaatcactaatgctcattccatagtcccgcttcacataagtaccatctccctctggaaccggtgacggaaagtcatccagataaaatgctgatccattgatcaccggataaacccccacatcagtaaggagactgtaggaagccgcatagaatccacgcaccgctttctcatacagtccaaagttgtctactacaaacttcccttttccatattggttctcccaaatgacaggctgaccgtttttttcattgacacgcgcataaaccttcacattctcactcagctgcactgcccaggcagagtcatacggatccgtgattgcataagcctgtccgccgccaagcataaattccggttcaaaataaatactgtctacacgtatattgtcatatccggaagaaacgattccaagcttctgctcaatcactgatgaatacgctgttttctgaagtgtcagggcaaaaagtacattcccaccctctgacacccaatcacacagttccataagattctctttcaacggacttacatcgctcagtaatacaacaaccgtttcataagcatgataatctggaatagaggatgcactctgcaggtctaccacatctgttccaaccttcatatctttaaaaatttgttgaaactgctcccatgcagccacactcgcctcatcttcactgttacgaagtaccagacaggtcttcggcagtgatttcgcagccatctgttccgtaaccacttcttcctgactgagatatgcgacttttctgtttttttcagtatattgaattccacttcgttcagcaaaaaggaagaccgcgatcatcagaaatacacccaggatcaccagcatacttttaaacggaaatgttttcaatgattttaatccagccaaaaagccaatacctccttactcttagacgacagatagatctgctcctctttcatctgtcttaaacactgctgcaactccgctcccttttttcgttctgccagataccggatcttcaaaatccagaactcctctttccgatgccatttctgatccatcagccctagaatctcttccgcctgaacataatctcctgttttcatcagattttggaacagacgcacacatgtggaaagcgtcgttttcaccttcagcttttgtcttaaaagacggatataacgttttctctgttctctctccatctgggcttccagaatcccctgattcagatactcttccataaaatcacagtactgctccaggatctccggatcgtccggtgatgccgcatacagcttctccatcttctgcaaacaaaaatcatattccttggaaagttcaaccatggctgtgatcgcataatggacaacctctacatcttcattcatgcgggcctgtttcagaagatccatatattcttccggatcatcatttaacacatccatgatcagttcacggcgcactcccggttcgttaatcaaaagtgcttcctctaacggaacgatctttttgtccgtatccgaaactgcctgaaaaatatttttataaatctcttcatttacacgaagcttttccactcccggttctatcctattgtctcttctggtcagcatttgcaaatgcaaaagcagcacgcacactgttccccagaaaggaacgaagatcacaagtgccatcagatattttttcacctttagcagatgtgtctttatccccagccagaccagcacacagcagacaatatgtaacaggatcaggaatactccaagcactgtctgaatcataatttttctcctgtatttgcattctccatggtatcgatctcatgacagacgaagccgttattttccagtcttgcaagaatgatcggcaaggaacttctgtccgtctgtgaaagaatgaggaagagctctcctttttcagaaatccccctgacatcattttcacggaccgaagcctgtagcgctgtgtctgcctcttccagtgtcatcttcggatactccagcttcaaaagcacataggatgcccgattctcctccctcatagaatggaaggaatacagccgttcttcaaaatactcctgcttcaatatacgtgtaccctgcacgtactgcctgttcttgattgcctcctgatattccagtgcgcgcaaaagtgctgtttctaccagaccgcagagaatctggaacagattcagataatagagggaaagctgttcatttcccacttcctgaatgaaaatcagcatcacgagctctccatctttgtgaatcccgttcatatacatcggatagccgtccaggaaattccggtttacccacacctttccggacacaatcgtctctttcgcttccagataatcatccagacaaatggattttttcaacacatctgtcattccctgggatgcgatctcaagacgtccatagctctgattctttccaactgaataaatcgcaaatgtatgattctcaagaactgattccatcacatgcagagtttcaataaaaagctcctgcggaagaatgatatccagttttttcgtaatatcaaaaatcttaccaaagctgtcacggcttcccagaatctgcttcttgtactgccgtttatcagaaagcgtctcctgatacatttctctcataaacagaaatttatccaggatcagtttattctcctctttcatgaattgaatattatctctgtttttcagtcggatgtaaccacagatcgcgccgactacaaaatagaagataaacggaatccagttcgaaggttcgtagaaaagtgtcgtccagccgatcccggttttcgtatatgctgccagcaatgaaagtgtttccagccccgctgctgcaagcccgtaattaatgccgtacagactgctgaacagcacgatgtaaacaagcctcagatcgatcatctgaaactgcacctgatttcccgccacccggttcagtgcttcaaaaacaaaaaatgtgagcagcaattccgcgattttcacgattttatcatgtactttcaaaaaagtttttactacatcgatcttccgtgtcttatggttcgttttctcacaataatcctcataaatttctgtaagttcctccaaaagagaaatcttcggaaaccaaccgtattcatttctcagaacgtggtcatcagatatcccatcccggatcagcacctctgacaaataggtaatgtttgcagccggaaacatctgtgccagtctctccccgaactgttgaaaagtaaaatgaaatacctgcggaacctgaagacaggcgctcccctctccccagttatcaaaaatcttgtataataaatccccaagatcactcaaagcaagaaaatgcatctcctgtgccggtgcttcttcaaatgtaatctgcttcttattgatcacagttgagaacagcttgaaaaaataatcctcctcataagtaccggaataaagatacggcacacgcagaatcttgacagcgatctgatgcagttcgccgtatttcctgcagaactcttctgccgagcggaccatcagcgtctttcctgttgtatcttcatataaactatccggtcctgtaatatacagaagcctggaattcagattccctttatagtaatgtaatagcttgcgtaaagtctcaatctcaccctccatcgtcccatgaaatgtaagataattagaaaaataaatcactccctcaaattcatacgtcttgaaaatgtctttgaattcttcctccgtcttcggcatcgggtataccgataagctcttattgcgatttgacttttgttcagtctctccaagaagaagaatctgacactcagggaaagcctcctcgataaattctgttgtaatatatccgatatttccggtcaccagtaatttcatacgtcacctcgtaatcatatattgcgcatttctatcatttccaaactatcatttatgcagaaggtgtattttcttttatcctctttttgtctttatacatcttctcgtcagcacaatggatcagcttcggctgattcttttcctctgcatctttgtcccacgcttgatacttaacgctcccatttatctatattctcctctaatcgtgtctaaaaatatactctcgcatataatatgctaccatatcaactaattgaagtccataatttcattccaataattcccataacaagaaagggaccaagagcaaaactgtcctttcgtcccatctttcctgctgccagcatcatgcttacatatatgccgctcaatatgattcccagcattcctgcatatgtgataactttcacgccgttcaggaaaccggataccgccatcagctttatatcgccgcctccaaatccgccttttaacagaactgtcaacaccagcattggtactgcaatgaccacagcacccagacaccgttcctggacagacactcccacacggaataacatttccatacaggcaagtgtcaggattcctatatgtgtccacggctcaatgatctgatatttccagtccgcataagcaatacggcataagatcatcaggtaaacaaccgtaattccatactctgtaattttcaaacattcctttccgttttctcactgtttatctcatttagtaacatttcttacatggttcaagtccctgcgcttccgcttctgcccggggctcttcttttgccgtattcggattcatatttccacagtgattcgtcttgtggtatttgtttcctgtcgcagacacccatacatgctctcctattgctgtctgtgatgcctcctgctgtacttccgacgtactccgcgttccctgatccgaatcgtctcccggtgtatagtcattacacggttccgcactccagttcagattcgcaccgtcgctggtcacaacgatcgttccttgcttatccgtcctgtatacctgaatatccatactctggagcttatccatggtatctttgtccggatgtccatatttattattcgttccgcaactgatcaccgcatattccggcactgtcttctgaagaaaatcccatgaggtcgctgttgcagatccgtgatgccccgggacaagcacatcacaacttaagtcgatactggaattacacattgctgcttcgctttcgtgctccgcatctccggtaaatacaaagctgttttcaccattcatcaacttgattgctactgaattattgttgcttcccttcgcctctatcgtcttcggtgcaaggatctcgaatgagcctcttccaaatttatacgtctttccaaccgccggatgttgcatcttaagtccatcggatttgactgctttcacaaatgactgatacagcttgctcgtatgcacatagttgctggatatgacatttttcacatcaaatgcattcaggcatccaatcagtcctgccatatgatctgcatcatagtggctgctgatcaggtaatcaattttcgatacgccatgttctttcagataggatactacgaatcttgaagtcttcctgtccccaccgtcataaatcatcgtctttccttccgactgggccagaatagacagtccctgtcctacgtcgaggaaatgtaccttcatctcaccggattgtgtgaccgcattcttttctgccgcctgcaccggcatccggattccgacacctgccattgcaagcaccataagcagctgtatcaacgctgctgccagccgctgtctccatgtttgtttccatatttgtttcatctgtgtcttcccctttcacatccacatatttattatacacgaaatccctcactctgtgtatccggacaatttcttatccgaacagttacttttacatactcaggcaaaaaaatagaacccttttccaaggattctaaaaaaataagctggaaatcggacttgaaccgacgaccccttcattacgagtgaagtgctctaccgactgagctattccagcatgtgtctgtgacagccacgtctataattataccgcattttattatatttgcaagtactttttcaggaaaatgtgtagtgaattacacattttccttcatatgcactgccatctgcggatacggaatctcaattccattttcatccagcaggatcttgatctcttcgagcagtctccatctggtttcccaatattcctcattcttcacccatgcgcggattccaagcactaccgcactgtctgccagttcatgaacaaatacattgatctgttcgttcttgatgatacattcatctttgatcagcagattttcaatcactgattttgcctgtcggatatccgcatcataagaaatacccacacgcagatcaagctgcctttcatcttttgccgttgcattggtaatactgttgttggtcagcattccattcgggattacgattgtcttgttatcgatcgtactgagcttggtatagaagatctggatctcttttacggttccttcttttccgttgctatcctcgataatataatctccgactacaaacggttttaataaaaggatcaagactccgcctgcaaagttcgaaagacttccctgtaatgcaagaccgattgccacaccgccggatgccagtactgccgctacggacgttgtatcgaatccaaggctggagatcagactgaagacaagcagggcatacagtccgtatttcagcagggaatctacaaactgctccactcctttgtccgcaccggagcgctcaaaggaacgtctgacgatcttcctgatccaccggatcaccagccggccgataaagaatgccaccagtgccgccagcactttcaatccgaacgtgatcagtcccggtatgctgtcctgtacatattgtgtcagctgattaacctgtttgaccgcttcctgggtcgcatcggttacttcctgcgtcgtatctgcaattgttgtatctgtcatatgttatactcctcttgttgtcatctgtttcagcgcaagaaatgcgcttacatttccccttttatctccggtagtcctatgtgagaacagaatatccggattgcagtgtgtgcatacattggttaccgcaatatgatcttcgcgtattccggcttctgtgaatatccgttcattggcacgccagagatccaactggtatttcccgttttcttttttataaaacagctccggccagtacgcttcgtcaaagttttcccggaattgctgtatcacatccccgctcacttcatagcagtcctggcagatggacggaccgattgccgcaatgatatcttccggatcagagccatatgtcttctgcaccagttctatggtaacttttcctatcttaccgacggttccgcgccatccggaatgtgaaagaccgatcgccttcttcaccggatcgacaaaatacagcggaacacagtctgcataaaatgtaaccagacagattcccggcacatctgtgatcattccatcggtctcctgaaaacgctttcccctgtctccggcttttactaccgctacattggtcgtatgggtctgattggtgaatgtcatatcttccggctgtacaccgatggctccggcaatccttctctgattctctctgacatcttccggatcgtcacctctggttgtactgatattcatcgttgcccagcatcctttgctgacaccgccaagtctggtcgagaatccatgattcacgattccggtctcttccagcatcggataactcaagaacgggacaccgttcacttctttttcatcaaatatatggtcctgatttttataatgtaagcccagattcatgccatattcatcctttctgttccggatctcttcctatcctgtataatcaaatgcattccggtaaagtgtcacctcatgattctcgatgctcaccacatcgaatctgcatggtacctcatcgattccgttgaccgtcatatagcatagtgcacttttggaaatggttctctgtttggctggatttacagcctccgccggatgtccttttttatctgaagcgcgatatttcacctcacagaagaccagatatcccgcttctcttgctatgatatcaatctctccggtcttacaccggtaattatactccaggatctcatatccttcctgctccagatatgcaccggcaagccgttcataatggcttccggtctcccggttattcttccgttctcttcctgtatctccggccatagtcctcccgttcattttagcaaacattcttacagctttgctgtctgtgatatatttttatatgtatttttttataaatgtcattctgtggatcggtgatggtcccagttctttcagaccttcgatatgtttcttcgtgccatatcctttattggcagcgaaatcatatcccggcatcactgcatcatactctaccatcaggcggtccctggtcactttggcaatgatgcttgccgctgcaatggacacacttttggcatctcctttgatgatcggcacctgccggatatcgacgcccggtatcgtcactgcatcattcagaagcagatccggctctaccttcaggttccctatcgccatgcgcatcgcctcataagtcgcctgcaggatattgatctcatcaatccttgccggacttacgatcccgattcctgtcgccactgcacgctccatgatctcatcgtaaagtgcctccctcttcttctccgaaagctttttcgaatcattcagatacaggatcggatcatcttttggcagaatgactgctcccgctaccaccggaccggcaaatggaccgcggccgacttcatcgatcccacagatataggtacagtcgctgtattctttttcatagacgctcattgcttcggtacgctccagttctttctgaagcttttcctgttgttttttcagtttttcttcttctcgtttattcatgtcggatcactcctatattgtcaaatggatagatacgcacccaggctctgccgatcagatccttccgggtcagcactcctactcccggatctctgctgtccatactgtgattacggttatctcccatcacaaagtattcatcatctcccagcgtaaccggttctgcagccgtctgcgaatccttgatcttctccttcccatagatatcactggtcaggcgttttccatcgatatacacatatccgtcccggatctgcacagtctcacccggcattccgatgatacgtttgatataatatgtatcttcttcatatttatacggaaatacaatgatatcatagcgtttcggatcccggaaccggtaactgatcttatcaacgatcagattgtctccatcctgtaatgtcgtctccatggaagagccgcttaccatcgtccgctgtccgacaaaggtgatgatcagataggtcagaccgatgataagcagtatatacacaagccatccgccgagttcccccaggatgtctctttcttcttcctctctctttgaatgtctggacatattcgcgcgtgtcctttctaatatgcatccggatattccagagtcagtcttcccaggcgtccgttacggaaatcatccatcagaaggacagacgctttctctgtatccagttcatttccgcgtaccaggcaatgtctgctttcagcgatccttgcgatcatgccgtatggatccgcatcttcttctacgttatatttactctccaaaactcccggataattcttgttcataaatgtcacaagctctgctgccagttcttccgtctgcaggatctcatccttgatcgaaccgataaatgcaagcttaagacctactgcctgatcttcgaatcttggccataagattcccggtgtatcaagaagttctacattcttgttcagtctgatccactgttttcccttggtcacacccggcttattgcccgtcttcgcacaggcttttcctgccagtgcattgatgaatgttgactttccgacattcgggattcctactaccatggctctgaccggacggttcaggataccgcgctttctgtctctttcaatcttttctttacatgcttcctggatcacgccgttgatagacttgatccccccgccttttttagagttcacttttacaacggagaaccctttttcgcggaaatattccgaccaggcatcgttccatttatcttctgccaaatctgacttgttcagaaggatcagccttgctttattctttccaagttcgtcaatgtccgggttcctgctgctaatcggtactctggcatcaaccagctcaatgaccagatctattagtttgatattctcctgcatcatgcgttttgctttcgtcatgtgccctggataccattgaaaatgcatatcttcgttctcctcttatctattatctcacgaatccaaaattcttcttcggtgataccacaaaccaggcctttccgtaaatataagaccgttttaccgctccgatatctgcactccggctgtcttcgctgttctttctgttatcacccatcacaaaatattcatccccgccaagcttaaccttctcggctgcgatgcctgcggtatcaatcttcgtggttgtataatcttcttccagtttctctccattgatataaatccggttctctacgatctgtaccgtttctcccggaagtccaacaatcctcttcgtataataatgcgaactttcattgcccttcggcttaaagacaatgatatctccacgctttggagaagatgcattatatacaatacggtttaccagcactttatccgcattcttaagtaccggtctcatagaatctcccacggtactcacctgttgtccccagtaccatactgcgacaaatgcgatcaggcaggtaactgcgatcttaaacacccagcttatgccggatacgatcttttccagattcagatgaatcttcttcttctccttcgggagttttcccaacagtttcttttttgcctgacgtctgcggtaacttgatctccgggatcttcttcgtctttcaaaatccagattacttctgcgtctcatataatccccttatcttcatgacttgccacgggcagctccctgcgaaatacatggcaatatcaaaaaaggacaattacattatgtagttgtcctttttacattcattttcctgattattttactaattcttttactttagctttcttaccaacgcggtctcttaagtagttcagttttgctcttcttactttacctcttcttactacttcgatcttctcaacgtttggtgagtgtaccggccaagtcttctcaacaccgattccgttagaaaactttctaactgtaaatgtctctcttgctccgccaccctgtctcttcaggactgttccttcgaaaatctgtactctttcacggtttccttctttgatctttccgtaaactttaacagtatctccaacgtggaattctggtgctacttcttttaactgagcagcttcaatgttcttaataatatcgttcattatgtgtgacctccttgtttacttggatgttcttaatacatttgtaccagaggaccatctatttttcttcacaacacgctatattctatcatacccgatgcaaaattacaaggattttttcttgttttttgcactcttttctgctttatatgatcctactctgtaaccggctgcccgtctctttgtatttcctttgccagctttttttctttctcagtaagctctgccttttcaagcagatccggccggttcttcgcagtgcggatcacagactgttcgcgtctccatttttcaatattggcatgatgaccggacatcaatatctccggtacttttttgtcatgccacacttccggtctggaatactgcgggtattccagcagattatcctgaaagctttcgaattcagcagatacatcgttatggaggactccaggaaccagtctggatatcgcatcgatcatgatcatcgccggaagttctcccccggtcaggacataatccccgatggatacataatcggtcacgatctcctccagcacacgttcgtcaatcccttcataatgtccgcataagaatacaagatcttcttcctgtgcgaattcttctgccatagactggttgaatgtcttcccctgcggggacagatagatgactcttgtgcgtttctttccacacgccatgtccggctgttctccggctctttcttccccggctttcctttcccggatctgtcttgcaagtgcatcatagcactgatataccggctccgcctgcatcagcatccctgcaccgcctccatacggatagtcatccacgctgtgatgcttattgaacgcataatccctgatattcaaagcctctatagacaaaagtcctttattcaccgcacgcccgatgatactggtgttcagcccgtccatgaccatctccggaaataatgtcataatataaaaattcatatactatcctctttctagatcagcccgtccatcaggtggatcttcatcttatgattctctatatcaacatccaggatacattcgcggattgccggaaccagcacttctccatgttcctcggtctcgatcacatagacatcgttcgcaccggtctccatgacatcttttaatgttccgaatggttcatcgtcctctgttacaacctggataccgatcatatcggcgataaaatattcatcctcttccagtgccaccgcatcttttcgttctaccagaagcgggcatctcttgtaacgctcaatatcatttatattatcaattcctttgaatttcaggatcacaaactgtttaaagaatttgaccccctggatctccagaggttttttttctctcccggtgtctaacagcacatgctttaacgtcttaaaacgctccgggtcatctgtagtcggaaatactttgacttccccgcgcactccgtgtgtcgaagtgatgacgcctacctgtaacaattcttccatagatactccttttcttatatgttgcgggcatttctataccgctcttttcctctttcataacagatactgttcacatactctgatataagataagcgggacagaccacaaacgggcctgtcccgggacaaaatgggaatccccattattattctagtccatgatatctacgataactttcttatcttccttcgctgctgcggctttcacaactgagcggatcgccttcgcaatacggccctgttttccgattacttttcccatatcagattcagcaactcgtacttccagaactgtcgtcttcttctcttcgcgttcatttacaacaacgctttctggatcgtcgactaatgctttcgcaattacttcaactaattccttcataaatgcacacctccagtggcataattatttctcgatgcctgctgcctttaaaatctttgcaactgcttctgtaggctgtgctccgtttgcaagccatttcttagctgcttcttcgtcaactttgatagcacttggatcacagttcggatcgtatgttccgatctcgtcgatgaatcttccgtctcttggtgatctagaatctgctacgatgattctatagaaaggagccttcttctgtcccattcttcttaatctcatttttactgccatgttagtttacctccgtaaaatcataatattcatagtttattcttatacccagaacctgcctttggcatcttctaatgtataatctggaatctatataacgcgggatccgcggtatatcatatttaaaacgggaatccgaattttttcttctttcccggcttgccaaattgtttcatcagctttttcatctcgttaaactgcttgatcatgcggttcacttcgctgatgtccacccctgcacctttggcaattctgtgctttctggatggagaaagaatatccggattagctctttccgccggtgtcatggaatgaatgatcgcttccatccttcccatcttcctctcggcttccgctgtctgctcgtcgtccaatcccttcatcttactgcccatgcctccaagacctggcagcatgttcatgatatttccaagaccacccatattcttcatctgcttaatgctttccagataatcgtcaaaatcaaactggttcttcttaagcttctgggtcatctctctggctttctcttcatcgatctcggcctctgccttctcgataagtgacaggacatctcccattccgaggattcttgacgccatacggtccggatagaactgttccagatccgaaagtttttctcccatacctacatacaggatcggctttccggtaactgcctttacggacagtgccgcaccacctcttgtgtcaccatctaatttggtaacgatcacaccgtcgatgccgaccttttcattgaactcttttgccacattcacggcatcctgtccggtcattgcatcaataacaagtatggtctgatgtacttctacttcctctttgatctcttcaagctctgccatcatatcttcatcgatgtgaagtcgtccggctgtatcgaggatcacgaggtcgttgccattcttctgcgcatgttcgatcgccgccctggcgatattcgccggcttgtggttctctcccatggagaagacttccacaccctgcttctcaccattgacctgtaactgtttgatcgcagccggtctgtagacgtcacatgcaaccagcagtggtttcttgccctttaacttgaactttccggcaagctttgctgtcgtggtcgtcttacctgctccctgaagacctgccatcatgatgaccgtgatggcctttccaggctgaagctgaatctctgtagtctccgaacccatcaggttgatcagttcctcatttacaatcttgattaccatctgtcccggattcagaccattcattacatcctgaccgatcgcacgctcctgcacgctcttgatgaaatcttttaccactttaaagttaacatccgctgcaagtaatgcgcgcttgatctcttttaaagcttctttgacatcatcttctgtcagacgtcctttgcttcgcaggttcttaaatacgttttgaagtttctctgtcaagctgtcaaatgccatgctataactcctctataatttcatcggatatcttccggatgtctgcaacaagttcttctgcattctccttctcatatccatccagcaattcatcaatctgctttactttttctctgaccgacacgaatttctctaccagatgaagtttctcttcgtagcctttcagtgtctgggaacatctctttaccagatcatgtacaccctgtctgctgattccttcctctcttgcaatctcgccgagtgataaatcttccaggacaaactgctcatacacttctttctgatgatccgtaagaagttctccataaaaatcatataataatgcctgttctaatatttcattcatgtctttcacctccgatatcatataacacttccggatgggtgtcaagtattttttctttacacctttgttttttcaaaataaaattgatttcccaccggctttgtcgtaatatatctgatgggagatattgccggatgcagtatcttccgatcatgtccatatattataaggggagaatataatggcaaaaaagaattattacaagatgcttggtgtgtcaagaacggcttctcctgaagaaatctctgccgccaagaacagacttgcgaaaaaatatcatcccgatgccaacatgaagaatggtatcgatacaaccagaaaaatgcagcagatccttgaagcctaccgcatactttccgatccgaagaaacgcgcttcttacgaccgcaaagtattcggaaagccatctgcaggtgcagaccggaactttgatctgttcaatcttcataatatggaagaaacaacaccagtcaccggtacaccatttgtgaattattggcgggcagctgattctttatatgatatcacaatggaaagcgaacagcttttcaaagaaaaaaataaaaaacaggcagcggaccggctgtcggatctttcctctcaggcacttcgctatgccataacactgcgagaggcagagattcccgaaaagtactggctgcctccgatcatggactggctgctttttacctggtataagaaccggaatctcccggtatcttatctattgaaggtttacgatgattattcaaaaaaagaactcagtggattcaaacgtgtgaagcttcagaaagaactgcttcatttccagtattctctgaaacggctggtcagttatacttaatattctgctcacacatctgcaccgtctgcatattatgtactgtaaacatcattattggaggattcaatatgagcgatttgagtacagcaaactgtggatgcggatgcgaaggacgcgacagattcggcggggactgtggatgcggcggatgcagttgtggatgcaataacagcggatgcggcttcggcaacaacagctgcctgtggatcatccttcttctctgctgctgcggcggctttggcaatggatgcggcaatggctgcggatgtggcaacggtaacgacagctgtctgtggatcatccttcttctctgctgctgcggcggctttggcaatggttgcggtaatggttgcggcaacggctgtggatgtggatgctagacaacttacattttcctgtataggacttaagagacggagtcattttcccgtctcttttttcatatatatttataacgctgataccggaaggagtcaccatggccggaaaaccttctaaaccaatgacacccttcgataaatctgtcacaccctcctatttatataaatggaagctgtttcttgccttcctgcctccttccattcagcgctttcttgccgtctacatcaaatttaccgaattccggtatacgatggactatttccggggacttcctttccatgcattttcttttcaatcgatcagcgaacttgcgccttatatggatgaaaatgaacgggatatgatgaatcagatgacttctgtgatgcagatggcggaaatgatggcaatggcgcaggccggttccacaaccggagatcccggtgcttccggtcctgcaagccctgttgatcttatgaaagcaatgatgtccggcgaagatatggaaatgttccagaattacatgaaactgttcgacgaggaactttccgcatctggatcaccggcaaagaaaggagactcttcacatgaatgaaagaaccactcatacaacggactcttccggaagcaacaccggcaacagctggatggatcatccggctataaatggaatggatcctgtcaaactggagctgatccggctcgccgcaaaacagaccgccggcaaaagcggaagatcactggctcctgtgatgatggcactcatcaccagcgcaaacaaaaaaggaattcagttcactccgcaggaaatgtctctcatcctcgacatcctgaaagagggacgccccgccaaagagcaggagcagattgaccagatggtgcagatggtccgcacacatatgaagaatcatacataacaaaatagaagaagggctttaaagtccttcttctttacgcatcatacggagttctcttctcttttctcccttatcccactcttctttttcttcttctgtctcaagttccagtctcggtactcttaccggcctgtcattcttgtccagtgccaccattgtaaaatacgcatgattgattggcgtacgttccccgctcaacgcctctacataagtatctacctttacttccatagaggtattcccgacataagtcacttttccaatgatcacaactgtatctttgacatatgcacccctaaggaaactcagactgtctacagatgctgtgatcacatttctccttgtgtggcgttttgccaccatacctgccacttcatcgatccactgcataagtgcccctccgaacaaacggtcagacgcattcaggtgctgcggtcttaccatatgaaccgtctctacgattgaatccgatacctttcttttttccatttccataaaaaaacacctctcttttctttttaaactcttttattatagcaccgtatttgttatacttaaactaatttcaataaaagctgtttcacagcggaatggagttctcatgagaaatataaaattaacgatcgaatacgatggaagccgttaccagggatggacaagactgggaaaagacgaatccggcaataccatatcgaataaaatcacagaagttttaaagaaaatgacagaagaagatgatctggaacttttctgcggatgccgtaccgaagtcggcgtacatgcttatgcgcagattgccaacttccggacatcctgttctatcagcacccagaacatcaagcactatctgaaccgttatcttccgatggatattgcgatcatcgaagtggaagaagtgccggaacgtttccacgcacagctcaatgctacatccaagacttatgtataccgcatgaccattgatgatgtgccaagtgtctttgaccgtaaatatacctaccactgctaccgtatcccggacaaacgcatgatgcagcaggccgccgagaagctcaccggacgtcacgatttccgcaatttctccagtgcgaagaagacgaaatctacagtccgagagatctttgatattgatatctatggagacattgaggaaatgcagatcctgatccatgctgatgattttcttcacaacatggcccgcatcatcgttggcacactgatggatatcggactcggcaaccgctctgtgcaggatattgatgatatctttgccggaatcctggaagccagtgcaccttgcgatccgaaggggttgtatttgcaggaggttacctattaatttgatttgggatttaattcaggaaggctgtggatacccgaaccggaataaagcttggaaaggcg

SEQ ID NO: 2814 - DNA, 13657 bp, Unknown
  gut microbiota DNA sequence
acctttccaagttttattccgtgtgtatcaaatgccttacgaatggcaaatgcgtaaccgtagtggcttacgctgggttacacttccgggcattttatttattaacattcgctgccagtcacgacttgaaggaaacaatagataaggattattgtgaatgtggaatgccgttagaaacaattagagagtcagaagcaccgttaaaggaacgaagcgaacgtgtttgaggcgaacgccgagtttgagcgtagttcctttgcttttaggtgattctgactctcttagtgtttcttatggtatggaacctgaacaagaagccttatctattgtttccttcaaggactgagaggccgcttccccagttaataaattaaatcccaataatccttactccccgcatctctaatacttctatttcctccggtgtgaactgccggtccgtaattacaccggtgtagtcttccagctggttgatccaggtcatggattgtttgccaaatttcgactgatctactgccagataggatcttgcgcattgctttggcacctgccgtttcagccacattttttcatgtgtcggtgtcgtcacctggaagtcttcgttaatggaagccgctccaaagaatcccacatcaaaccggaagtcctttaacatctctgtagcatatctgccgaacagactgcccgtttctttctgcagcataccgccacagatatatactttcgcattgctgttttttaatacctgtgcaatctccagatcatttgtcacaacgatgatatccgggatgtcacagatccgttttgcgatctcacaggttgtcgttccggcatccaggaataccgaatctcccggatgtacgaattccgcacattttcctgcaattgctgctttgctttttttgttgctggtctgctttttctcataagccacttcctgctttgcaaccgcacctccatggcatcgttcgatcatattgctgttttccagctttaccagatctcttcggatcgtcatggagcttacatttagttctctggccagttcgtctacctgcacacttccgttctctctgatcagttcaacgatcatggcctgtctttctgccgcaagcatatcatttcctcctaccttatgccggatctgctacctgcagtccttttattcttccactttataaaaatcatacaaattctgtctctattgtcagcgatatctcatattccggatactgcttcttcatgtattctataaaagattccttcaactcttcccagtctccaagtgcatagtccacgatgagatcacagtagagtgtaccggtctctttgctcagatataacgcatgaaaactctttacgtgctcatttacgcgtacgaatttcccgatgtatctgcggatatcaacgatgtccgaagtatcttcatcgaccgcatagattccaaataccatcgtcacatgatactcttccatgatccgaagctgcaatcggtgaatctcttcatagacttctccgatgcttcttttatgatcgatctcgatatttactgaaccagaatagcggtccggtccataatcatgcagcatcatatcgatcgcactgatcactccatctgttgcacggatttctttatacagctttctcgcaagttcttctttccccgaacgtccgatcagatcggatgccgtattcttaagcgtgtccactccgctctttatcacgacaaaagaaaatacaatacctgcataagcatccagagagaaacctgtaaataaaaatatcacagatgacaggattgtcagacctgagaaatacgaatcatttcttccgtcttcccccactgccagtaatacttctgattctacggattttcctacttttattgtatacattcccagaataaatttggttacggctgttcctgcaacgatcagtaccgtcagtatactgacattcatatctgacggatgaaggattccttccacagactccttaagcatccccagtccggcatataatatcagaacgccgaccaccatacctgtcagatactctattcttccatacccaaacggatgcttttcatccggatgtttcccggaaagttttgtccctatataagtcaggaacgaagatcctgcatccgttgcattattgataccttccgacacgatcgcaatggacgatgccagtgtcccgatcattattttcactgctgcgatcagtaagttcactaatattccgatcacagacgttctgattatccgttcttgacggcttgattcattcataatacacctgttccttctttttttctgtatttatgataacatgccggcatttcatttacaagataacacagaatgttcgttctcttacattctccggcatacaaaaacggctggaagaaccggtacacgctccttccagccgtctcaggcttttcttattattttctatgatccttatataatccgtattacattacatgaatatattcagtatcaacacttctactactccgactgcccatgccaccgttgatgtcacagaccagatgcggagctggtctttcgcttcactcacgcccagcgttctgtttactacccagaagtaactgtcattgaagtatccgaagaacagagaacccacacagcatgctactgctccgaggatcggacttacacctgatgctgcgatgatcggtgctgtgatacttgctgctgttgtcattgctactgttcctgaaccctggatgaatctcattgctgtcgcgatcagaagcggcaggataatgatcgggattgctgtctttgcaagtccttccgccatgaatgttccaagtcctgaatctttgatgatctgtccaagagctccgcctccgcctgttaccagcatgatgattccggctgaagccattcctttttccatctctgtaagagcttcatgtctgtcaaggcttcttccaagtgtcagaattgctacgatcagtcccagtccgactgctacgatcggctgaccgaggaatacaagtacattcatgaatccttctgtcttgcccatcgctgttgccacggtattgatcaggatcagaatgatcggaatgatcagaggcataaaggattccagtgctcccggaacacctgtcatatccattgaaaatgctgcttcgtaattaggctcctggtaaggcatctctacgatctcgccttcttcgttcgggattctgtagtatttctttgaaagatataatcttgaatatgcgatacatgcaattgccatcggaagtgcaagtaccagtgtcagcaggatgaattttcctacgtctactccaaagattccgcagactcctaacgggccaggtgtcggtggtaccagggagtgtgtgattacaagacctgctgccagtgctgttccgagtccgatcacagatttcttcgttgctttggagattgcctttgcaatcggtgccaatacaacgaatccggaatcacagaagattggaatcgataccaggaatccagtcagcgcaagggcttcttcttctctcttcttaccaaagagttttaagaatgtatgtgccattctcttggccgcacctgtcacttcaaagatctggcccatcataacaccgaatccaatgatgattccgatacttcctagagttccgccaaaccctgaagtgatcgaattcacgataccaaatgtcttctcgacaccgtctacttcaattgtaatatttgtaagcggcatgccgccaatcacgccgactacaactgtactgatgatcaaggcgagaaatgcctggatctttgtctttaatactaaaaatatcaggactgcgatacctattgccagtccgataagcattctttccccactaagtccgtttaccataattcagacctcctacgttctctctttttgtttttgcagtttttactgccatcctttttacgtttttttgttttcttttacttattttccggtaaaattcggtgcatatttcgctgcaagtctgattgcctcgatcatgctgactgcgcttacaattccttttcccgcaatatcgaatgcggttccgtgatccacagatgtccgaaggatcggcataccatttgtgatcgcaatcgttttttcgaagtccagcgtctttgttgcaatatgtccctggtcatgatagagcgataatacactggtatatttgccctgtgcagcctgatggaataccgaatccgccccgatcggtcctgccacatcatagccttctgctttcagttcttcaattgccggcatgatctcttcaacttcttcccagccaaagagtccgtgttctccactgtgcggattcaatcctgcaattgccatagtcccttctttcacgccaagtctttccaatgcttttgtgcatcgtttgacataatcaatgattctgtcttttttgatcatatctaacatctgtctcagtgatacatgacgtgtcaggaagaatactctcattccattcgtctcaaacatagtcagcggatcttccgtatgcgtcagtgccccgaatatctctgtgtgaccgatatatggaacttctgctgcatgaagagattccttgttgatcggtgtcgttgcaactgcatcaacctgtcccgcatttgccagttcgatactcttagcgatgtattcatatgccgcttttccgcacatgccgcttacttttccgtaagcaaatgtatccatatccacgttgtcaagatcgatcaggttcagcactcccttttcatccactgcctcatccggctcttttatctcattgatctttaagttctctcctgtgatctcgattgctttttccagaatctttctgtcaccgacaatgacgcagactgcaatctggaacacctcatcggatgcaatggatttcgccacgatctccggtcctacacctgccggatccccgattggaattgcaataactggtttcttcatttctctcatcctttcttagatatataatttttctttcaaataagtaatgcacttattgatcgcatctttattcccctggcttccgccttttgtaatgatatgtacaccttcgaattcgccttttaagaattgtccgtaagcggcaagcggaagtacttcatccagcagacttaatcctgcggtatcaaaccttttgcagacagcaaccgtgacatctccgccacttgtatatagtcccttgaacgtgtcttctgtcttgaagatccggtatgtgatctctgcaaatgcactgttgatcattccggttacttcatccaaggagcactggtatctttccatatatggagtaaaatcaattctgttctccggatagattccgtctccggttactgttgaaatgttatttctgtcacattcacccagaatagaattgaccactctgcgtatctcctgttctctgcgtttttcaccttccagaagttctcttgtatgaacaaattcattatgtgttctctgcgagagccacagttcttccatctgggctgtggtattggcattcacgcttcctaccactgcaagaatctttgtcttctgctttttcttgttcggagtgatcagttttctggatagcgttgcggtaaatactcccggatctacggcgatgacttttaatccgctggtgatcactgcatctgcgatcagatccagatcttcctgtgtaatacaatccagtgtaatgatcctgctcccttcttcaacgcattttttcatcagatccgcaagataatgcttcccatacatcaggtctttcatacagattgttgacacctgatatttactctgctgtctgaaaagttcccctacttccgatatctttaccggtgtcttcggatccacggcgatattcgtcttatgtaacggcagcccgtctaccagcatatatcctccacagatgatccttcccgaagccgggaaacacggtgcaacaattgctatgtaatcttctcccaggctgtccagcatcgcatccgtctcacttccgagatttccgcgaagtgtactgtcaatccggttggcatacacttttacattatcattcttaagcaggttacagacattgtgtacccggttatatgcgatctgtgcatccactcctctgctgtctgtcggatataatacgcagtcacaatccgataaggtcgacagttcgatccgttctgtattcatgactgtgtatgctttataattcatctttttcagtagtactcccgtcgcattagccccggtcaggtcatctgcgatcacaacacactgtggcataatcattctccttttttcacattttcaaacatttattattgttttgttgtgtttacatattacatctattgttcgtttttgtcaatataatctattttttatcaatctttttgtttatttccacagtatatcgtgttcgtttttgtttattttttcattctcagtcagttcattccgtatataagtatataaatcgatgaaaggattccagatattctttacgcaagcctatcggatgttaatacttctacagcttctcttaatgtcgtgatctcacctacatttcccggaaagatcacatatggtgtcattgggaatttgctttcttctcccgtctgccataccggaattcccggtttgatctggccaagaacgttggctttctttactgccagtgcctttgttcccacatcactggatgtaattccaccctttgcaattacaaagcttggtgtcacacttaagcggccgaccagcgactgtactgcatctgaaatttttacggataatcttaattcatcttctttatctcctgtatctgcagtgatcagtgctcttgtcgtatagcagcagactgtctttcctgccttgatgcatgtttcttccagatccagacatctttttacttctttttcaaatgcctcatcgtcttttacaagtgttgcatccagttcaatgaattcaatatctgtcaattttttcagttcttctacctgttttgtcgtcttatccgtatgagagcctacaacgatgattcctccgttatctgtctcttttactaccatctgttctctgctaagaagcggctgatcggttactccgcccataacttttacgatagccgctgccgtacggaacatgaataccttgccttttgccattgctctgtacagtgccacgcagaatactttcacatcggcatagtccacagcatttacaatgatcttattaaaatctttcaccgccatcaatgcttcttcgatcttgtcgatattcatatcatggatatcttccagtgaaatgcatgtaacatcggaagccttatatgctccctttgtcttctcttctacatattctggcattgttgctgcgctgtaaccgaatgtcttatctttggcaaattctgtctcatttgcaggaaccagatcctcgccgtatcttacataatgtacattatcgatcgtaaatcttccgccttctttaaagaacgggcagaggatctctccatcaatcgtctttccggtattagcttcgtaatttttcttcagaagttctgtctccaatggataatgtccacggagagtggaatcgcttctgctgatgaatatatattcttttccagtctcttttgcaacttcatcaaccacagcggcaatctcattgtgtgctttggttgtctgttctgctgtaaatcctctggaattagtcaggatatagaacaaattgttctcctcatcaaatccctgacggatggtatctttttcccagtttgtgtatacggaaatatcatgcactgtctggacaccggtcggatcatcgtctaaaacaacaatctttttattatttttttcaatttctttctttaacagttcatcgatataagcttcgtctatctgcttatacgaagttaatacttctgcgttcaatgccatattccttctcctttactcttccgtcttttttacttctacatcagcaagtttttcgaaatactgaacaattccgccgtggtcatcattcatatgtccatggatcttcagtgtctgaaggatctcataaagctgcgctgtatatggaatcggtacatcgattgaatgtgctgtatttacgacattcttgatatccttatggttgattctgatcggtccgcccggtttgaagttacgttcaatgatcatcgggatcttggcatccagtactgcacttcctgcgagtccgccgcggatcgcatggtatactttctccggatcagcgcccgcttttattgccagaacaaatgcttcggatactactgcgatcgtgttattaacaataacctggttggcaagctttgtaacacttccgcttccgcttccgccgatcagcagtgcagaagatccgagaatatcaaaatactctttcattgcatcaaagtctttctgatctccaccggccatgatcgcaagtgttcctgcgacagctcctggctcgccaccggataccggtgcatctacaaatcctacaccttttgcttttaatccttcatagcattctttggattctaccggtgttacggaactcatgtcacacacaaccgttccttctttgatcgtagatgcaacaccatcttcatcaaataagatagattttgaaattgcaccgcttggaaccatgataatgattctttcacactgttcaccaatctctgcataagaagcttcttttgctcctgcttccacaacatctgcaactgcctctttgttcaggtctgataccataagttctacacctgcgttcaataagttctttgccatcggtcttcccatgataccaagtccaataaatcctactttcattttcatacatcctttctttttccatttcacatgacattttcacatatgttcatttctgtttgtatcagcgaaatgtatcgttctttcttgtttctgtcttcactttactacataccggtataccggtcaaggtgctatttatctttctcttatttcaacagtttttccgttttgtttttgtgtatttttaacatatagtcgattttctttttgttattttcttaacattatatacaatttttttagcccttattttccttttttcttgaccattttgcgactgtattgtatgatattgatagaaaaaatgtatgatttttgttaaataaataattatcatgaagtataaggagttactatgctaccactcaatgaacaggcctacaattatctccagaagctcatcctggagaatcatttttcttatcaggaagtctattccgagacaaaattatcaaaagaacttggaatttcgcgcactccgttaagagatgccgtgcaccggcttgcgcaggaaggttatattgatatcattcccagcaaaggatttatgctgcatcagatgaaccgcaaagatgtaaacgaaacatttcaggtacgttccgcgctggaaacatattgtaccgtccagatctgtaaagagttctcttcccgtaaggcaaaaaagctttttaaagatcttgactggatcatggaatgtatgaaagatattatggaaaccacacattccatcaaagaattttccgaatatgattttcagttccacacaaaaatcatagattatctggaaaatatacagttttcaaatgtatttgctatgttcatgtaccgtatgaaacgtctggcagaactttctcttgcacataaaggacgtatggaacagacatacgaggaacatatggccattttgaattgtatgaagaatggcgatacttcacgcatctatgagattacattgaaacatatggaaacaccgcgtgatatcaatttggaagatctgtaaaaaaaccgtgcagctaatttcaactgcacggtttttccatatatatttcttctgttttctttgtatctccgattgcacggaagccatatttttcataaaaggcttttgcatcttttgtatgcagcattccatacaggtgcccattctctttcatgatccgattcatcaaaatggttccgaatccctgaccgcggtacttttcttctataacgaaatccatcagataaaacgtcgtgacaccgtctgtcagaacccttgcaaatccaatctgtctgtcttttccggccatactgctttccttgattctgccttcaccggtgccggctttcagaaacagaccatatggacaagaattctccatacttttccggatcatctcttccgttctgtcttctgcccattctgtactccgtaatagatctgtcacttccgacagctgcatattctctatatcttttctgatatagtaagacgattctctgtcttctccttctgctgtgatcttatcttccgatatctgccggatcacttcacgcagcttcgtaagatatggatctgccatacattctttctccccgtaagtcatctgaagatcatattccagcggaagccaggttgtaatatccgcctcgttatgctgaatcaaagtctccatcttatccagggcatgcacgatcttcgcttccattgtctcttctctttccagttccccgaacaattcatccaactcctgccgctcttttcccggaagcattgcggtcagcagtgtgagcgcatctccttctgtttcccggtcgtcatccgtcttcacaaatgccggaatatcaccggttagcgcttcccccagatcatggaacaggcacatcttcatcaccttatccatgtcacaattcggaaattcttcttttaccagccacgcaaatacacatagacggtacgtgtgttctgccacactttcccgcctgtgatctgtcattctggaatggcgcatattacatttcaggtgttctgccacacccataaagtctaataatgtttctggtctcattcttcctctactcgttcagatattccaacaggccctgatattcttttttcattaatctgtttccatgcatatagaaatgctgcagcttatcgtaatccttctccatacgtgatacggtcgggatcagtggacggatcacaaagatcttcccttcttcttccagcttttcgatcagcttcatctgcctgttatataccgcatttcttgtcatgatcgcacgtaccagattcggatattttttataggctcttttataaagctgttctgttgcttttagcgctctcttcttgcggtaacccggatttctcgtcagcactacaacgatcttgtcatttcctttttccaatgcatactcgatcggaatggagtctgcaagtcccccgtccatatacggaattccgtctacatttgcaatcggtgctgcaagcggcatactgcttgatgcacggcagatcttcatcagacgttccggatccttatcttctgacagatactctgcagctcctgtgatgcaattcgtaacaaccagttcgcattccatctcggatgcaaaatatgtctcgaaatcaaatggatagatttcattcgggaatttatcaaacaacatatccatatccatcagtgctttttctttcaatgtcttcttcaatccgtatacataatcatattctttctcacggtggatcacgcattcccggctccgtccagcctgttttgatacataatcaactgcattgcaggcacctgcagatacaccgatcacattggacatataaagttcttttcccatcagataatcaaggactcccgatgtaaatactccgcggttggctccgccttccaatactaatgttgcttttatcataaacttcatacctctcttttgctttctattcttcgtagttaccattatataccctttttcatagaaggaaaagaggaacttcccttgctattttcccatatatttgatactatatgctagtcagcgtctgcaaatccgaacgcagtcactatcaacagagattcaaacgacaaggagaatataaaccaatatgattagtacaagtaatgtaacattacgggttggtaaaaaagccctgttcgaagatgttaatattaaatttacagaaggaaactgctacggtctgattggagcaaacggtgcaggtaaatctacatttttaaaaatcctgtccggacagcttgaaccgacgaacggtgaagttatcatcacaccaggtgagcgtctttctttcctgcagcaggatcatttcaaatatgatgaatatccggtactggatactgttatgatgggaaatgcaagactctatgagatcatgaaagaaaaagaagccatctatgcaaaagaggatttcaccgatgaagatggtatgaaagccagcgaactggaaggcgaattcgcagccatgaacggctgggaagcagaatccgatgccgcaactttgttaaatggtctcggcattccggttgagatgcattatgaaatgatgaagaacttaaatggtccggaaaaggtaaaagtcctgcttgcacaggcactgttcggtaatccggatatcctgctcctcgacgagcctaccaaccacttagaccttgatgcgatcgcatggctcgaggaattcctgatcaactttgacaatactgtcatcgttgtatcccatgaccgttacttcctgaacaaggtctgcacacagatcgcagatatcgattatggcaagatcaagctctatgccggtaactatgacttctggtatgaatccagccagcttctgatccgtcagatgaaagaagccaataagaaaaaggaagaaaagatcaaagagttgcaggaattcatctctcgtttcagtgccaatgcttcaaaatccaagcaggctacttccagaaaacgtgcactggaaaagatccagcttgatgacatccagccatccagccgtaaatatccttacatcgacttccgtccaaaccgcgagatcggtaatgaagtccttacggtagagggattaagcaaaacaatcgacggcgaaaaagttctggataacatttcctttactctgaaccacgatgacaaggttgcattcgtcggaagcaatgagcttgcaaagacaacactcttccagattcttgccggagagctggaaccggatgagggtacttataaatggggaatcacaacaacccaggcctacttcccacttgacagcggaagtgaatttgacaatgattacagcatcgtagactggctgacccagtattccgaagaaaaggatgccacttatgtacgtggattcctcggtcgtatgctgttctccggtgatgacggtgtgaaaaaggtgcgtgttctttccggaggtgaaaaggtacgctgtctgttatccaagatgatgatcagcggtgcaaatgtactgatacttgatgagcctaccaaccacctggatatggaaagcatcaccgcactgaacaacggaatgacaaaattccctggtgtacttcttttctcttccagagaccaccagattgtacagactactgccaaccgtatcatggagattgttccgggcggcaaactgatcgataagatcactacttatgatgaatatcttgaaagtgatgagatggctcgtaagagacagacttatactgttcaggaggaagataattaaattgattgggatttaattcaggaaggcatgactacccggacctgcataaaaagtaggaagc

SEQ ID NO: 2815 - DNA, 21007 bp, Unknown
  gut microbiota DNA sequence
agagtccacgcatagatattacagctacacatgagtctcacaaattaaaacaagccagatccatcgatcagtatgttgacttgttgcgttatacgcctgttactcccccatcggtcatttatcatctaaaagaaaatatcataattaataaattttgtcaataagcaatcatttattcctttttctgtggtatgctttacacagagattttccccggaacaactctgaaaagaaccaataaaggagtcacaacaatgcctcactactacatgtttcacaaacctttcggctgtgtcactgccagacgcgatgaccgctatccgacggttatggactattttgaagaattacagaatgacaggctttctccggtcggacgccttgaccgtgagacgaccggacttctcctgatcacggatgacggtatcttcaatcagaagctcactcatccttcctatcacaaagagaaaacttatgaattcacccttctcggcaatctgacaccggaactggtacacaagctggaaacaggtgtcattctgaaaggcgccgataccccgaccgtcccggctgaaattaccgtaacaggacatgcggtaatgtccgatattctttccacattaccggtggagattcagaaagatatccacaaaaaccgtcctgagcaccctgttacctatggaataattaccatttccgaagggaagaaacgtcagatccggcgcatgatgaaatcggtccactgctgcgtgattgaattgaaacgcatttccatcggaaatattgtacttgatgaatcgctgcgtcccggtgagtggaaagaaatctttccggataatgcttaagataaaaaaactccccgtctattctgccgcaccagaaatggtgccatgccagaaactccgggggagttttttatctttatattttcttttgctttcaattcagtccggcttaattgcctgagtctgaactacttgaacttgatgaatcactcgagcttgatgaactgcttgagcttgatgaactgcttgagcttgtctcaacctgaatgcactggttagccagccattcttttacaagatcattcagtgcgatctctttcagttctgacttggatgcggctttcttcagagccttcacactgtcgtatccgtatgcatccgcaatcttcttaagctctgtcttataagtctcatcatccaacttaatgttctctttatctgcaattgcctttgttaccaatgtctgctttacactggattttgcagcttttgttacctgcttttcgaatttctcaacagttgttcccatctgctgttcgatcagatcatcatatgacatattgtaagcttctgcaacagatttgtactgagagatcagggaatcttcgatcttctttacatctttctcagggtatttcttaacttttgtattatcaagaaccttctgccatgctgcctgctgtaaagaatcattatatgtcttctcgttatcttcctcgagagacttcttcacttcttctttatattcttctactgtcttagattcctttgacaccttctttacaaacttgtccgtaagcttcggtgtcttctttttggaaatagattttactgtaattgtaaatgtaacatcttttcctgccaggtcagagcttccgtaattctccggaaactttccgttccagtcaaaggtatcgcctgcattatgtccgatgatactgtcttcaaatccatcgatgaaagagtttgaacctatctccaatggataatctgtggatgatccgccgtcaaatgcttctccgttcatctttccgacaaaatcaattgtcgctgtatcacctttctttactgcacggcctgttacttcttctgttgttgaattttcatccagtactgattgaatctgtgtattcacatcatcatccgttacttcacttggtttgtcaaccttatctacttcaacgcctttataaacagaaatcttaacattctctgtttccagacctttggcagactggcaaccagtcatcataagagagactgccataacacctgttaataacattgccactttctttttcatagtgcacctcgttttattattcattttaaggtgggcatcataatcccatctgatttcttggtatacgtttacgcatactactttgttatatcacatttagaaaaactttcatagcattttcacatatatttcattcttttatcaaatttttcattttgaaatcgtctacttttcccgtatacttcttgcactcccaccaaaacaatgttagaatatttgttatggaatatagaatataggaggtttattgtgaagacatttacaattgtattattggtaatccttgtgattttgattgttgcatgtgttgtattatatttcgttggaaagaaagccgagaagaaacaggcagatcagcaggcacaacttgatgcagttgcacagactgtttccatcctggttatcgataaagggcgtatgaaattaaaagaagccggcttaccggatatcgtaatcgaaaatacaccaaagtatcttcgtcgttctaaagtaccggtagtaaaagccaaagtcggaccaaagatcatgacacttatgtgcgatgcacaggtttatcctttgatcccggttaaaaaagaagtaaaagctactatcagcggtatttacatcacagcagtaaaaggtgtaagaggtccgctggacgtaccggaaaagaaaaaaggattttttgcaagattaagaaacaaataagtacttaataaataacagcattggaacttactgacccaatgctgttatttttatgtctatattacagtctgcaaccggatctccgttgatgtccagcgcatagttcacatgtaccgtgatcttttcatcctgttcttcgaaccggatgtcttttgtaaagaccccaatcatcatctcaccatatggtgtctcatactgtgtcatattgatcttgtctttctcgaataccatatgcgtatttgtaattccactcttaatgatctcaaccttccggtcatccataattctgaccttgttcttgatcgttcccggaattccttctaccagttcatcataaatcacatagtgttttccgtttttttcataataattcgcaggtgcgatcacttcgatcggttcatttcccggctcatcaccctgcgcttctatcccggtcacatcctgatgcagaccggatatacttaataatacgtcttttgtcatatattctcctaataatcttcaatatcaattgcctgtgtcttatctacatcatatggcaggattgaattggcaaatttcttaaacttttctgccgcatcactgacataaaaatcatatgccgccggttctccggatgtattggcaattttctgctcttccagtatctgcttcaaatccatcgctgtctcgtacgccggatttacaatatgtacagactctccaaaatatgccataatcctggatctgagaagcggatagtgggtacatcccagaatcagtgtatcaatctccgactttctcatatcggacagatagatatcgatcacttcttctgtgatcttatgctttgcaaatccttcttctaccagcggaacaaataacggacatggtttccctataacttccgcttccggcataagttttctgatctctttggtataagtctcgctcttgatcgttgcctctgtaccaagtacaccgatctgaccgtttttcgtctctcttacagcagctcttgctccaggtacgatcacaccgatgatcggaatatcaaattcttcctgcaccgtatccagtgccagtgcactggccgtgttgcatgcgatcacgattgcctttacattctttgtcttcaggaaacggatgatctgtctggaaaaacggataatgttattctttgacttacttccgtatggaactcttgctgtatccccaaaatatactacattttcattcggcagctgacgcatgatctctcttgtgacggtcaaaccgccgactcccgaatcaaacacaccgattgctgcagtgttcctgtttttattttccacgatattaaatctccttttatgaatactccaccatattttactattgtaccgtcttggacgtgcattttcaagagattttatgtcgaaacctcccttgtatactttaccataaaaaaagttacctgccataaaacagataactttttattctttattccgattctaattacagagccaactgtttcgcgatctcatactgataatccggaatcttctttgtcattccgagtgcttcatcaatatcaaagtctacatactctccatgtttgtaacctacaacacggtttgtctttccttcaagcagaagatctacggcttttgctcccatgatagaagcgtatactctgtctttacatgtcgggcttccaccacgctgcatgtgtccgagaatagttgctcttgtctccataccggttgcttcttcaattctcttagccatgttcatagaatctccaacaccctctgcattgatgatgatgtagttcttctttccacgttttcttgattcctgaatatcttcaatgatcttctcttcgtcataatcatgttcttcaggcatcaggatcttctctgctccatttgcaataccgcaccaaagtgcaaggtatccagcatctctacccataacctcgatgatagagcatctctcatgagaagttgatgtatcacgtactttgtcaatagcctgcatagctgtattaacggctgtatcaaatccaattgtatattccgtacaggcaatatcgagatcgatcgttcccggaagtccaattgtgttgattccaaagttagcaagtttctgagctccggcaaatgatccgtcaccaccgatgactaccagaccatcaataccatattttttacagatagctgctgctttctgctgaccttcctctgtacgcatctctgcacaacgggctgtctgaagaattgtacctccgcgctcaattgtatcggatacgtctctggctgacagatcgataatttcctcgtttaaaagtccctgatatcctcttctgatacctcttactttcagtcctttacccagtgctgtacgaacaacggcacggattgctgcgttcattccaggagcatctccaccacttgtcaatacacctattgtacgaattacttttttgtctgccatgattcattcctccattgtattagtttgttccaattatcttctaaccattatcatttctctccgatgatattgtacatgaattaatgcacgctttcaatgggtttttctataacttttacacaactttcaccaagataattcgtcaatctgctcaacaacacctcatctgctgtcacattccagcctttcggcaggcgttttactgctttttcttttttgcaataaatgataacttcatccattccttcagagactttcaaaatatcctgcaacattccttcctgctgaagatatgtctctttatctggatactgcagccataattcctttcgcgtctgagcaaatggaatcacctgttcgcagatcagtttgctcggtgcatcatcttcctctgatacacggcccttgatgaataccttggcttcctcattcagatacatctgattcttttcaaaatctctcgggaagatcacgacttctaccgatccaaccagatcttccagtgtgataaatgccatcactttatttgtcttggtatacttgatcgtcttattcgtaatcatacctccgacaatctcttttgcgccgtcatgcaccttcgttcttccggtttcatcatccagctggaaatccaacgtcgtcctggatatattttttctccatttttcttcatagtcttccagtgggtgtccgctcagatatactccgagcacttctttttcaaatgcaagctttgtctctttttcatactcgccaacatccggaagtggtatatcgaattctgatttctgatcatcacttacgatatcgaacagtgaaagctgtcccgtcatagagtatttccgctcccggttcacctgatccagaatctgcacatagaccaccatgaactgctttcttgtaccacccagactgtcaaatgctccggacttgataaagctttctattgtacgcttattgacctcttttccggacagccgctcgataaagtctttcaggttgctgaatggccctccgttttttctttctttgatgatcgattctatcaccggctttccgatactcttgatcgccgccaggccataacggatgttaccgctgtcaacggagaaacttccctctcctttattgatatccggcggaaggatcttaattcccatctgccggcagctgtaaatatactctgacactttccccggattatcgatcacggaagtcataagtgctgccataaattctaccggataataatattttaaccaggctgtctgataagataccaccgcatatgccgcagcatgcgacttgttaaatgcatatttggcaaaatcgatcatttcatcatagatcttatttgccgtcttctcgtcgattccattggcaatacagcctggtacgccctcatccggattcccatacacaaagttctgacgttctttctgcatgacgtcgcccttcttcttggacattgctcttcgcaggaggtcacttcgtccgagtgtataacctgccagatcacgcacgatctgcataacctgctcctgatatacgatacagccgtaagtcggcgcaaggatcggctccagctgcgggcagtcataggtaatgctttccgggttattcttgcctttgatatactgcgggatgaagtccatcggacccggacggtataatgaaataccggcgataatatcttccagattctgtggcttcagttctttcatgaagttcttcataccggcgctttcaagctggaatactccgtccgtctttcctgttccgatggatgcaaggactgctttatcatcataatctatcttattgatatcaatcgtctttccactgctgatacctgccagacgttctgcatcctggataactgttaatgtacgaagtcccaggaaatccatcttcaaaagtcccagttcttccagagttgtcatggtaaactgtgtcgtcacagagccatcggatccaagtgaaagaggcacaaactcctctattgccctctgaccgatcacgacacctgccgcatgcatggatgtatgtctcggaagaccttccagtcttctcgacatatcgatcagttcctttacctgttcatcttcctgatacagttttttgaattccggattcatcttcagcgctttatctaacgtaatattcagctctgtcggcaccatctttgcaatgctgtctacaaatgcatatggaagatccatcacacgtcccacatcacggatgactccgcgggccgccatcgtaccaaaagttacgatctgtaccacccggtctgcaccgtactttcttcctacatagtcgataacttcctgccgcctttcgaaacagaagtccacgtcaatatcaggcatggatactcgttccggattcaggaaccgctcgaacagcagctgatacttgatcggatcaatacttgtgattcccagacaatacgatacgatacttcctgccgccgaacctcgtcccggtccgaccttgattccctgtgttcttgcataattgataaaatcccacacgatcagaaaataatccacatatcccatagattgaatgaccgacaactcatactccagacgttctttcagcgaatgatccccgtccggataacgttctttcaggccatcaaagcaaagcttattcagatattcccaggaagtatatccctccggcacatcatatttcggcaatttggtaacaccgaattcaatctccacattacaacggtccgcaatcttctgtgtattctccagtgcctgcaacgcatatggaaacagctgccgcatctcttcctcagacttaatataatactgaccgccttcataccgcatacggtcttcatcttctagtttctttccagtctggatacacagcagaatatcatgtggctttacatcttcggcataggtataatgtacatcattcgtcgcaacaagctcaatccccgtctcctgagccatacgaaggagcgactgattcacgatctgctgctcctgcatcccatgatcctgcagttccaggaaaaaattcccttttccgaaaatgtcctgatacctaagtgctgctgcctttccttcttcatacatcccacgcaggatattcttctgtacctcaccggccagacatgcactgagcgcaatgatcccttcgtgaaattcctgcagtacttcaatatctaccctcggtttataataatagccttccgtaaatcctctggatacgatcttcatcagattatgatatccgatatcattttctgccagaagtaccagatggtagtaacggtcatcaccgcttccgacagcctctttatcaaatcgggatcccggtgcaacatagacctcgcacccgagaaccggtttgattcctgctgcttttgccgcacggtaaaaatcaataacaccatacatcacaccatggtccgtaatcgccacactgttcatcccgagttcttttaccctggctacacattctttaattttatttgagccatccaacaggctgtactctgtatggacgtgaagatgtgcaaagctcatagctttctcccttcctgttaaatatattgaaaaaaggtgctcccttcagggaacaccctctcaaacattcatgtttgccttagtcttcttttccagttccaagaagcatgaattttacaagtttatcgatatcctgtggctcatgagcaacgatttccaattccggaatttctccgttagagaagatatttgccatagatacatactgagataattttgactttaagttcagtctgtcaccttcacctgttacaagttcaacttttccttcacaagaatcaactactttgaaaaatccttcgatatctgtaatattctgtactttcatttctcattctcctttttattcattttattattaacaatcttaatgcttttattataccttatttctttttcatttcaatattcttttctgaaatttttatacgaccttctttaagaagtcttccgacagcacgtttgaacgcatttttactcaatccgaattcctgtttgatcagttccggatccgccttgtcattaaacggaagcttcccgccatattcttccatacgtttcatgatcagcgctgcatcctcatccatctgaagaaatgctttttctctgacacttaagtctaattttccgtcctctcttactttcaggactctggcagatacacgatcaccgacttttaacctgccaaaagcttctctctttggaattaatgcactgtaacagttatccactgccacaaacacgccaaagttatcactcgtctcgtaaatgattccttctacatgatcatcctttttatatggagaatctgtacgaagcttctcatatactttcatcgttgcacaaagtcttccggacttgtccacgtaaagtgcaaccagaacttcatcaccttttttcactttcgcagtctgctctttgaatggaagaagaagatctttctccagtccccagtcaaggaatgcaccgattcttcctgtgtctgcaaccttcaatacagccagttcatccagcgtgatcttcggttcctgtgtggttgcgatcagacggtcggaggaatctttgtataagaatacttctaccggatctccgacttctacatctttcggcacctgttttttcggaagcagaactttgtcatctttgtttcccagatatactccgaactccacttctttgacgatcatcaatcttcttttctttcccaaataatctgttaatcccatatatttcctctctgtttccttctctttttaatgtatctgttacctgcttacgcaaatctgaattcgatcactgcatacggctttgcattttcatcacataattcaacgactgttctgtcatcttctgctgcaatccgcggatagatcatatcaccatatactgcagatttcttatattccactcgcatctggtgtacttctttgtctttcggaagcgactccagtgccatctgcacatactggcagttattaacatgctcattcgtgtcgatatgatatctgcgcaccggaaagctttccagttcttccgattctgttggaagaggaatctttctggattcgtatgtcatctcatatggctctccggttccatatggggcaatctctgattcatccggtcttgccggacgtcctctctctatatccatgtatacccacagggaattggcatatgcgacatcgtttccattctcatctgtcatgcagaaattacgctccccgaacaatcccttgaaatccgtcgcccaggtactggtctgtatcttctctcctatctccggataccgttctacgactacctgccacgacgacaggatccaggctcttttccgctcgctgcaatgcatgattcccagtccgagatcttccgattgaaatgtgctgcagtcctgaaaataattcacgatccccggcagtgtgattcttctggtatgatccacttcactgaaccggattcttccctctgtagtatattgattgtctctcatagttagtctgactcctttatatgctcttcttccgtattcttatcggaattcccgaagaaaaaccattttatcttgaattccgaagcagcagttaccatctcatattcttctgcactgagtgcttctttcagttctttttttccgtcttcatcaaccaccgcacaggtcgcattggtaaagcacaggctcgggtacagcacgcaccaccagttatgtccttttccgcttccgagagtgatcctcagcgcctcatactctccttccggaaatatgatatcaccataccgtttatccgggaaatagcagctcgtcacctttgcctgtgcccggtatgacacgccttctttttttaacacttcatcagcagtcttcaccagttccttctgatgctttttcacccagtctttcgttaactgtgcgcttttacgctccgtttccggcatctgtgatttcatatagctaagtagcgtatcccggacgtgcaatttaatccgctgatccttcacactgttgctttctgcgatcacatgaaagcggaacacttcctctgccagcgtcttctgcgtctgtgcaatctccgcatgaacaacttccatacgccgttccataatcccggttgtcagctcaaatgacagcagacatgctataatcaggcaaattctttcccgtttcatctatgtatctccttcctgcctcttaccgttcacggatactgcatgaacggtaattcttactgatacaggaagtcttgacacaatggttcttatctatacactcctggcatactttctgaattttttgttttctagttctgctttgtacggatcacatcgatcacggtcgttacctgattatcgatatgtttacacataacatctgttgcagctttcttctcccctttgctgatatactcgataattgccgcatgttctgcaatgagctgtggatatgcttcttcacgcttcagatattccacacgataacggtacatctgctcacgcaggttattcagaagcagaatcagtttctgattatccgttgccatgtaaatgatatcatgaaaacgtacatcggcttccgcaatctctgtgatatccttgctttttaagatcatcttgaactcttcggccgctttcttcatctcttcgatctcttcatctgtgatcttctcacatgcaagctgaaccgccagttcttccaaagcctttcttacttccaggacatcccgcatattcttctctgtgatctctgcgacttccgctccctttctcgggatcatcagcacaagaccttccagctccagcttacggatagcttcacggatcggagtacggctgactcccagtttattggcaagctggatctccatcagtctttctcccggttttaactcacctcgaagaatcgcctgtctcaaagtattgaacacgacgtctctaagtggcagatactcattcatgtttactttaaaattcggttccatgcctatttcctccttgcattatgtatgccggtcacatacacctgctttgctaattgcttttctcttatctttgctgctgcttttcttgctttctcttttgtctcataaaggccgaataccgttggaccacttccgctcatcatcgcattcagtgccccctgctccttcatgacatttttaatctgttcaataaccggatattcttcgattgttactttctccagtacatttcccatccgggatgctacttttgtaatatcctggtcatacagcccatcgatgattccgtcaatatccggatgattctcaatctcatgggaatccagcttctcatagaccagttttgtcgacacactgatcggcggttttgcgatcagcacatggcatttcggacatgccggaagtggtgtgaggatctctcctatcccttctgcaagaacggttccgcgcataacacaataaggaacatctgctcccagtgtcacgcctctttccatcagttctttctgtgaaagtccaagcgaaaacatacggttgatcccgaacagtactgctgctgcgttcgaacttccgcctgccattcctgccgctaccggtatatgtttatctaatgtgatcttcacgccttcctttacatgaaactccttcatcagaaggtctgctgcctgatacgccaggttattctcattcacgggcagataaaaaagattcgtcaacaattctatacccggttttttcgtcttttccatccggatctggtcatacaggtataccgtctgcatcaccatccgcacatcgtgataaccgttctctctccgtcccagaacatccagacccagattaatctttccaagtgctttcaattccattttatccatcttatttatctccttacattttgtatacaatgttcttacagtatacccaaattttgcttaaaaatcaatattttatcgcctttatttataccttctttttccatataattaacttcttttatattttccaccgttgtgttatattttttcgcaagattccataatgtatccccctgttgtacgaaatatccgacaattccgggacggctttccaactcttcggtatccatcgggcggaattccgcagattcaatattctgtatctgcaccggttctttctgaaaacagttgaatgccagaacggctttcacttctacttcaccgcttcccatgagatttaccgaaagctgctcgaccgtacaatccatatcttccatatccggttcgccgcccccgttttccaggagataactgaacggaaccattccattccatacgccaaacggcgtctgatcatcttcccgcacatataaaaactgcaagtgcagcacaccgtcgatatgtacaccatccgtctctgcttttactgtttccatctgaatctttcctttacagtgacagatctgcaagatatcctctttcagctccggcagtgttaattcctcactgatcctgcatttggaatgattctggagttttaaccggaagaacctcttttctttcacctccggaatacagatatgatccagcatatacagatcttccagtatctggatcttctcttcctcgtagacaatcagacggacttgcagcgttgcttctatgccaagaatacgcatctcgccgttctcatccatccgcggctctacattgatatccgtaagatgtaattctgactgatgatacattccgggcatcacacccatacattcgatctgcccctcatacggaactgtccggcttatccaatccgtctttccttctgccgtttcgtacaggcagaacatgttaagttcaccactaatcagcagttcatctgttcctaactgtgtatccgcttttccacctgtcacatccgtccacaaaagtgtgccgatatgctcctttgtaccgctcaatgtgacctcttctttaatcctgtaagtatcttttccggtagcaaatacttttagaatctcttcttctttcattttcttaaaaaccggaactttctcttctacatcggttgtaatctcttcaccggtacacttttcggttccgatggaaatctctgccagtgtcttgatgttcagttttcttgagtggatcatcgttacagtaacctcggtgtcagacgtctgaagcaccaggtttccttccggttcctgctctagatagatcatctcttcaaatgggatccgcccttccaggcttgccggtaccggaaccatctcatctgccatatagagaactttgaactccagttttcccgatactttcagatagctttctacctgtttcatctcctctacccgcaacatcccattgcttaatataatctttcccacatcccgttttgcctccggaacattataatccccgtcaatatagaactggtcatttactgtccttccattttgaaatatacggatctcttttttctgatattccattgttcctgcctccttttacaacatcttttattcatatataatctgcttttccgtgtacggaatctttatgacaatgtatggatatgtctttttcttgtgtattttttcctttttctccgggccctgaagcgttgtacggataaccactgtatccactgtctcataacatgcatttacttcaatgctgtagccggtcgtctgctgtgtcccgtacccccgcactacatacaggtatgtttcttcctttcctgtatctgcataactgatccacatttccttttttccagcttcttttatctcttctttcagttgttccggaatctcttctttctttacaatctcatatgtaacatctcctgttttctgttcttctatcgtgccgaaactacaaccggaaagcagcgttgtcactgcgatcacggttaagagcatttttattctcttcaatacagccttcttctattttctctctactatcttacacactatgggtgtaaaaaatgcggattttatgttatgataaaataactagaatgaaaaggagtattcgttatgagaattataccagttgccttattcgtgatcttattcctgatcatcggcattccggttcttggaattgaatggctgattggaaaaatcagcaaaaagacaatggattattccagtctgcggatcgtccagtgggcatttaaagtgatcatccgtcttgccgggatcgagctcactgtcatcggtgaggagaatgttccggatgagccggttctttttatcggaaaccacagaagttattttgatatcgtgatcacatatgcaagatgcaaaaacctgaccggttacattgccaaaaaagagatgctctctatcccgcttctccgcacctggatgaagcgtctctactgtctcttccttgacagggagaatccgaaagaaggcttaaagactatccttcaggcaatcgattatgtaaaacacggtgtatctatctgtatctttccggaaggtaccaggaacaacggcgaagaattatctttacttccgttccacaacggttcctttaagattgcagagaagaccggatgtccgatcgtaccgatgagtctgaataatacctgtgatatttttgaaggtcatatacctttcattaagaaaacacacgttattttggaatatggcaaaccaatctatccgaaagaactggacaaagacgagaaaaaacgtatcggcgaacattgcagtaacatcatccgcgagactattcataagaatcaggcacttgtttagtgcctgtttttttcttttacatttattctcttaagtgctataataaaacggtataactaaaaaagaaatgtactgcaaacagcagtaaaaaggagtttgaaaatgagcaaacgcaatcttaccttgctgaccgatctgtacgagctcaccatgatgcaagggtattacgaaaaagggcagaatgaaaaagttatttttgatgtattttttcgtcagaacccttgcaacaacggatattctgtatgtgccggtcttgatcaggtaattgattatataaagaatctgcattttacttatgaagatgtagattatttaagaggtcttgggatttttaaagaggacttccttcattatctgagcggtttccacttcagtggtgatatctatgccatccctgagggaaccgtcgtatttccgaaggagcctcttctgaaagtgattgctccgattatggaagcgcagcttgttgagacagcgatcctgaatatcatcaatcatcagtcactgatcgcaaccaagacttcccgtattgtatttgccgctaacggcgatggtattatggaattcggtctgcgccgtgcacagggtcctgatgcaggattatatggtgcaagagcagcgatgatcgggggatgtgtcggcacatccaatgtacttgccggacagatgtttgatgtccctgttatgggaacccacgcacacagctggatcatgagttttccggatgaatacactgcattcaggacttacgcagagatgtatccggacaactgcacactcttagttgacacatacgatacgttaaaatccggtgtcccgaatgccatccgtgtattccgggaattcaaagattccggaaaaccactgaacaaatacggaatccgcctggacagtggtgatcttgcatacctttcaaaagaagcacggaagatgctggacgatgcaggcttccctgaagctaccatctgtgcttccaatgatctggatgaattccttcttcacgatctgaagatgcagggcgcagccattgattcctggggtgtcggtaccaacctgatcacatccaaggactgcccttccttcggaggtgtgtacaagctggctgccatccagaatgaagaaggcgaattcgttccgaagataaaaatatctgaaaataccgagaagatcaccaatcctggtaataagacgatctaccgtatctatgaaaaaaagagcggtaagatcaaggcagaccttatctgtttttccgatgaagtcatcgatatcgaacaggatctgcttctcttcgacccgatagagacatggaaaaagacgaaactttccggtggcacctatacagtacgcgagattcttgtacctgtcttcaaaaacggcgaatgcatttacaaatctccgacattaaaagagattgcctcatattgctgcacggaaaaagacactttatgggatgagaccaagcgtctcttctatccgcacagagtttatgtggatctttccaaaaaactctacgatgttaaaaaatcactgctggatcagatgaatatgacagattaaaggaggacttattgatcatgaaaattatagtattagcaggcggactcagtccggaaagagatgtatccttactttcgggagccggaatttgtaaaactctccgggagatgggacatcaggcatttcttctggatgtgttcttcggccttccatacgattccgataaattagaagaaatattcgaccgtccggacggcgggcttgagatttccaagggaatctcaacatctgtaccggatctgggtgcacttcgcaaatcacgcccggatcagtcaccttccgaaatcggaccaaatgttattgaactctgccagatggctgatatcacattcatggctcttcacggttctatcggtgaaaacggaaaacttcaggcaacttttgataacctgggaatcaaatacaccggaccgaactctcttggatgtacattatccatgaacaaactggtcacaaaacagattttcaaaaccagtggtgtcccgactccaagaggaacttcactgacagtaaaaacgaaagatacccgtctggatgaacttggatactaccttccactggttgtaaagccatgctcaaacggatctagtatcggtgtatacatctgtcacacagaagaagactattatgatgcgatccacaaatcttttgatatagacaacacagacgaggttgtcatcgaaccatttatcaaaggacgtgaatttgcctgcggtattcttgccggaaaagcacttccgctcgttgaaattgttccaaaggacggactctttgattatgcgaacaaatatcaggcaggcggtgcttccgaaatctgtcctcctatatcactggatgcagagacacaagaactgatccagcgtgccggagaacgtgccttcgaagcactccgcatggatgtatactcccgtgcagactttatcgtatccgatgcagacggtgaattctactgtctggaaatgaatgcccttccgggaatgaccgcagcaagccttcttccgaaagctgccaaagctgccggatatgaatacagcgaactttgtgaggccattattcaggaatccatgaaagcccgctattaaggaggatgaatatccatgaaaaatctttcaattgaaaatataaccagagcctgcaaagggactttccacggcgatgagagtattctcagccaggaagtatccggtgtcgtgatcgacagccggaaagtccagcctggttacttattcgttgccattgacggagaacgtgtcaacgcacacaaattcatcccggacactgtaaaagccggtgctatgtgtgttgtctcccacgaagatctcggtgagacggattttccttatattctggtagaatccacagggcaggcactgcttgacattgccaagctttatcgtgattcttttgatatgaaagttgtcggaattaccggaagtgtcggaaagaccagtaccaaagagatgattgcctctgttctggctcagaaatatcatgtacataaaacacttggaaacttcaataacgaatggggacttccgatcacgatcttcgatatgccggaggatacagaggttgccgtacttgagatgggtgtcaatcactttggtgagatgcgccgcctttcatctgtatccagccctgacatctgtgtgatcaccaatatcggtatcgcacatctggagttcttcaagacaagagagggcattcttcaggaaaaatcacagatgatccaggatatgaaaaacggcggttccatcattctaaacggtgatgacgaccttctttgcaagatgagtcctgtcaaaggtgtcgctcctgtattcttcgggacaggaagcaactgtgcattccgtgccgacaatattgaacctcagggactccgcggaacttcctgcacgatcacattaaaggatgggacttccttcgactgtctggttcctgtacccggcatccacatggtaagcaatgcggttgcaggtgctgctgtcggatatacactgggactgactgccagcgagatcaaagccggcatcgaatccctgccgtctatcccggggcgtaaccatatcatagaaacagaccatatgatcatcttagacgattgctacaatgccaatccaatctctatgaaggcttccatcgatgtccttaatatggcaatcggacgtaaggttgcagtccttggtaatatgggagaacttggtgatactgctgaagttcttcatgcagaagtcggtacttacgcagcacaacagaatgtagaccttgtctgcggaatcggagacctgacacacgctctggtagaagaagcatccaggggcacacatacccaggcactttggtttgctgataatgaaagcttcattcaggctataccggacatcatcaaagatggggacaatgttctggtaaaagcctcccacggaatgaattttccacagattgttcatgctttggaagaattataaaataacaaaaaagaacgaaacaaacgagatatttaaggagattattatatggcttatcagattctcgcccttgatctggacggaactcttaccaactcccaaaaagaaattacaaagccgaccctggatgctctgatcgagattcaggaagccggtaaaaaagttgttctcgctagcggacgcccgacaaaaggtgtcgttccgctggcagagcagcttcatctggaagattatggaagttacatcctttctttcaacggtggacgtatcaccgactgccggacaaaaaaagcaatctacaataaaatacttccggctgactgtgcaaaaggtgtctacgaaacggtgataaaatatgccggacacggcgtagacatcctcacttacacatccgaacatattttatccggcatccactccaatcaatacacagagctggagtcccgcatcaatcagatgccgatcattgatgccggtgctgactttctggatgtcatccctgatgatccgaataaattcctcgtaaccggagatcccgatatcttagaccagatacgcaaagaactcagcaaacagtttcactcttatctgtccgtctactgttcggatcctttctttgtagaggttatgccggccggaatcgacaaggcacattctttattaaaattactgacaagtatcggtcttactgctgatgaaatgatctgctgcggagatggatacaacgatctgaccatgatcgaaaccgcaggacttggcgtagccatggcaaatgcacaaccagccgttcttgataaggcggattatattacgaagtctaatgatgaggacggggtgctgcatgtgatcaatgagtttatgcggtaatttgatttattaactggaaagcggcctctcagtccttgaaggaaacaatagataaggcttcttgttcaggttccataccataagaaacac

SEQ ID NO: 2816 - DNA, 938 bp, Unknown
  gut microbiota DNA sequence
attagagctaaatgttgcgccagacaccacatccacatccagcgtctgtcctgcaatgattctgtccaccactgcttttgcacggttaaagaatgctgcatcgtccgaagaacttaagatatcaattgccgtaatctgtttatctttgatcgttaccgcaacagtcacctcgccggcataaccggtacctgttcctttatagattccgtctgccagatcaaaagaaccttttaccttgctttctgtcttcttcgcttcctcggcatccgttgtctttgtctctttcgtctgtgcctgagcttcataaaccggtgcctgatagccgcttaatgacaccccgatacaggctgcgactacaatcgccgaggcggccggtgcaccctgttttatttttttgattactttttctttatccatgtcttccccctctactttttcattacatttaccttataatccgattgaaaatcatctgcaattccttctgatacatataattgatcgtcatctgtaagcaggatcacatcaaatttatcactatacttcttccagaatttctctgctttttcttttcccatgataaaaagcgaagtagataatccatccgcaagtgttccgtcatcacttacgattgtcacagaagtcagtccattctctgccggataaccggtagacggatcaatgatatggtgatagctcttcccatttttttcaaagtatctctcgtatccgcccgatgtgataaccgccttgtcctttgcctgcaggattccaagataatttccatcttcttccggactttctaccgcaaccttccatgcacttccatctggttttgcaccaagaagctgtacatttcctccaagacttaccagaccgctcgtcacaccgcactttttataaatctgcataatccttgacgatgtatatcccttcgc

SEQ ID NO: 2817 - DNA, 12905 bp, Unknown
  gut microbiota DNA sequence
gagatatactaccgatttattggaaaagtagactgataatgaggggtcatatctttaactaagggaaactgggtgatcacatccggatacagtttggagacaatgtaaagaacatggatctgaaggttctggcaagacttggaatgctggaaatataggaaaatgtcaatccgaaaatgcagcgatacaatctgagaaaattgtataagaataaaaatgaccaatagtcaaaaactgtattgactgttggtcttttttgatgtatattgcaattaggtacaaaaaatgaccaatagtcataaaggaggggcggttatgaatatggttgcatttggcaaaaaggtagtaaagttcagaatcccgatactgatcatcagtatcttactcctgattccggcgggacttggatatgtgaataccagagtcaattatgatgtgctgacgtatttgccggaagatatagagacgatgcaagggcaggatattctggtaaaagacttcggaaccggtgcattttccatgttcattgtggatggaatggaagataaagaggtatcggccctgaaagcaaagattgagaacgtggaacatgttcagaaagttttatggtatgattcgctggctgatatcagtatgccaaagagcatgatcccaaaggatgtctatgaggtgttcaattccgatacaggaacgatgatggcgattttttttgacgagggtacttcatctgacggaacgatggaagccattggggagatccgtaaactggcaggaaaacagtgctttttaagtggtatgtcagcaattgttacggatacgaagaatctggctgagaaggagacaccgttatatgtactgatcgcagtcgtattggcagtgatcgtattaggtcttacgatggattcctattttattcctttactttttatgctgagtatcggaatggcaatcgtgtataatttgggaagcaactacttctttggagagatctcgtatattacgaaggcattggcagcagtacttcagctcggagtgacactggattattcgatctttctgatgcacagctatgaagaacagcaggtccgttacaacggtgataaagaacgggcaatggcacatgcgatatcgcagacattctcatctgtaatcgggagctcggttacgacagtggcaggatttattgccctgtgttttatgacatttacactgggaatggatatcggtgtagttatggtaaaaggtgtcatcctcggagtgattgcctgtgtgacaatcctgccatctatgatcctgtgctgtgacaaatggatcatgaagacgatgcataagcctttccttccggatattggaaagatatcagataaagttacgaagcggtatatgatctatgtaatccttttccttgtacttttgttccctgcaatctatggaaataaccatacagccgtatattacaatctggatgagacactgccaaaagaccttccaagtattattgcaaatgagaagctaaaaaaagattatgacatgaatacgacgcatatgattcttgtagacagttccgtagaatcggcagatgttgcaaaaatgattgataagatggatgatgtcgatggtgttaaatgggcacttggactggatgcactgatcggaccggcaattccgcaggatatgatcccgaattctgtaacagatatgttgaagaatgataagtatcaactgctattggtcaattctgagtataaggttgcatcggatgaactgaatgcccagatcaaagatctgaataaaatattacataaatatgacaaaggtggtatgttgatcggtgagggcccgttgacagcagatctgatcgatattacagatacggatttcaagacagtcagtatggtatcgatcggtatcattttcgtgatcatattgatattatttaaatccatttcgcttccggttattctggttggtgttattgaatttgctatctttgtaaatatgggaatcccgtattatacaggaacgaaactgccattcgtcgcatcgattgtcatcggcacgatccagcttggatcaacggtggattatgcgatcctcatgacaacgagatataagagagaacgcaatcacggagcggagaaatacgattcgatcactaccgcacaccgtgcatcagcacagtcgatcatggtaagtgcgctgagtttctttgcagcaacaatcggtgtcggattgtattcaaatattgatatgatcagctcgttgtgtatattgatggcgagaggtgcaatcatcagtatgatcgtagtcatctttgtattaccgtcgatgttcatggtatttgataaggtgattgtgaagacaagtaagggattcttacctgtgaaataaagcatataaggattgatttatataaccagaataaaagcaagccccgtatttttgtggggcttgcttttactcgataattttcccgtcgatacttatcgttacaacttgccatggaatgaattttccgctattctgaagtgctttttttgctgccatctcaagaccgccgcagcatggaacttccattcttacaattgtcacactttgaatattgttattttggattatcgcagtcagtttttcactgtaatctacctgatctaattttggacagccgattaatgttactttattttggataaaatcctgatgaaagcttgcgtaagcataagcagtacaatcggctgcgattaaaagctttgcatcgttaaaatatggtgcactgactggagccagtttaatctgtaccggccagttctgaagttttgatagctgctctacgcttggagttgattttatggtttcaggtgtttcggatcgctgaatctgcatacttctagaaccaggacagccggtgtgtgtagacattgcctgatttttggcaaatacttttttctgcgcttctttcacggcttcttcatcatatgcaggtgcttctctttcctcaaatgaaatggcaccggtaggacattccgggagacaatcaccaagtccgtcacagaaatgttctcttactaattctgcttttccgttaatgatgtcaatggctccttcgtgacaggcagttgcacaggcaccgcatccattacacttttctttatcaattcgaataatttttcttatcatttttatcctccgtcaatagtatttaacttttgtttctgccagaattatagtatgataaatacaacttgtatgtttgatttccaacaggaggggagattttgaaaaaatatttaccggttctaagaaacagttcattttttaaaggtcttacggatgaagagatattatctatcttgcattgtgtagaggcaacagcagtttcaaaagagagggattcctatattttcagagctgcagattctacagaagtaatggggcttgtggtgtcaggttgtgttcttggtattcaggaagacctgtggggacatcgaaatattttatcaaaatgccatgccggcgatttctttggagaaccgtatgcagcaagcccgggggctgttctgaatatcagtgtggtagcagatgaggactgtgagattctcttactgaatatccagaggctgttggtcacttgtccaactgcatgcgagcatcatcagaagctgatccgcaatctggtcagtgttctggcaaataagatactgatcttgaacgataagatcacacatgttggcaagcgaacgacaaaagagaaactattgtcatatctgtcagccgaatccatcagacattcatctttgtcctttgacattccttttgaccgacagcagctggcagattatctttgtattgatcgagcagcaatgtctacagaaatatcaaagttacaaaaagaaggctttataaaaacaaatcgaaatcattttgaattgactgtttctaagaatgtggattcaagaatgaagggaagagcaatatattaacatcataaatcaatttgacaatatgatattttgtggtataattttcatgctgtgaaaacagccgacagttcatttgtaccttcctgtcgaaaaataaaaccggggctaatcatgaggatttcaggctctgcgtgcgaagatacacgcagagctttttgtatattagatatggattttctgatatataaaaactgctccatttaggatgcatagctcttaacaggtacatacatttcacatataggagagttgaaatatgtattatttacaaacaaaagccagttttgatgcagcacattttctatggaaatacgaaggaaaatgtagaaacatccacggacatcgttggaatgttgttgcaaaaatcaagagtcaggagttggaacgagaaggacagacacgaggaatggtagtggattttggtaatctgaaaaacgacctgaaagtattttgtgattactttgaccatagtctgatttacgagacaggatctctgaaagcagaaacggtagctgcacttcagaaggaagagtttcatttggaagaagtctcttttcgtccgacagcagaaaatttcgcatattatttctacaaaaaattgacggattcagggtatggagttcattgtgtggaagtatatgagacgcctaataattgtgcagtttatgaggaagagtagatgaaggtagcagagaaatttaccagtattaatggggaaggcacgcgcgcaggagaacttgcagtatttgttcgttttaaagggtgtaacctgcgatgcagttattgtgatactctgtgggctaatgaacctgagtgcccatataacgaggaaactccagaagaaatattaaattatgttcttggaactggaattcataatgtgacactgacaggaggagaaccgctgctgcaaaaagacatcaggaatttaatccatcttcttttacaagcggggctgcaagttgaagttgagacgaatggagcagtcgctttggcagcattttgtgaagaacgtccggtatttacaatggactataagttaccatcaagcgggtgcgaagaacatatgataacagagaacatgaaactgcttgaaaagaatgatactgtaaaatttgtatctggcagtcaggaagatttattgaaagcattggaattgattcggacttacgatctgacaaatagatgtcatgtttatcttagccctgtttttggagcaatagaaccgatgcaaatagtagaatttatgttgaaacatcggttgaatggtgtacggttgcagatacagatgcataaagtaatctgggatcccgatgaacggggagtataaatagtgagaggtgatagagatgaaagcattagttctttttagtggaggaattgattcaacaacggcattgggactggcaatcaaaaagtatgggaaagaccaggtcattgctctttcggtttcctatggacaaaagcatgataaagaaattaaagctgcaatagcagttgcccaatattatggcgtggagcatttgttcctggatttaagtaagatatttcaatatagtaactgttcactgcttcaacagtctacagaagacattccggaggagagttacgcagaacagatttcaaaaacaaatggcgataaaccagtaagcacatatgtaccgttccgaaacggattatttctttcttcggcggcaagtattgcactgagcaaagactgcgaagtaatttattatggagctcatgcagatgattctgcaggttttgcatatccggattgctcaccggtattcaatcaggctatgaatgaagcaatatgggaaggttccggacatcagctaaaaatagaagcaccttttgttaatgtatccaaagccgaagtggtaaggattggattagaactgggagttccttacgagttgacctggtcctgttacgaaggtggagagaagccttgcggaaaatgtggaacatgcattgatcgagcagcggcatttcaggcaaatcaaatggaagatccggcgttgagatagaggagaaagcgatgagagaaaaagaaaatttaacactattgggaaatcagcaaacagagtacagtatggattataatccatccgtattagaggcatttcagaataaacatcctgaaaatgattattttgtcaagtttaactgccctgaatttacaagcctgtgtccgattaccggacagccggactttgcaacaattacgatttcttatgttccggatgaacgtcttgtggagagcaaatccttaaaattatatttgttctcatttagaaatcatggagattttcacgaagatgtaatcaatataattatgaaagatctggtcaagcttcttgaaccgaaatatatagaagtctgggggaaatttcttcctagaggaggattgtctattgatccgtattgtaattacggaaagccgggtacagattgggagcaggttgcctggaatcgtatgagtaatcatgatatgtttccggagagggttgataatcggtgagagttgttataataaaggaacataggttttgcagagaagaatctgatcataaagccgatgcaggatttttgaatcctgtatcggcttcggagattccatagagatttaaaaaaatttatttattataattcatcagcgttttgatgtcttcttccggcgtggtgataggtgctataccgtaattttctaccagaaaattcaaaatattaggagacaaaaatgccggaagagaaggaccaagacgaatgttcttgatacccaggtgtaaaagtgttaacaggatacagacggccttctgttcgtaccaggagagaacgaaggaaagtggaagttcatttacggagcatccaaatgcatctgcaagtgctacagcaacctgaatcgcaccataagcatcattacactgccccatatccattagtcgtggcagaccaccgatttctccaagatcgagatcgttgaaacggaattttccgcatgccagagtaaggacaatactgtcagaaggtgtctgttttacaaattctgtgtaatagtttcgtccaggtttagcaccatcacagccggcaaccagaaagaaatgacggattgcacctgattttactgcttcaattacagtgtttgcatgggacaggatggctgcatgaccaaaaccggttgtcacttttgtaccgccattgatgccggtgagtacctgatcttccttgtaaccaccaagttccagcgctttttcaataaccggcgtaaaatctttcttctcatcaatatgaacagcaccggggaaggcaaccatttctgttgtaaatactctgtcagcataactgctttttggcggcatcagacagttggtggtgtagagaatcggagctggaagatgatcaaactctttttgctgattctgccatgcggttccaaaattcccttttaagtgtgagaatttttttaagagtggataggcatgggcagggagcatttcaccatgagtatagatattgattccttttccctttgtctgttcaagtaaaagctgcaggtctttcaaatcatgtccggttacaacaataaatggtcccttttctattgtaagtgtaacattggttggttctggtgtcccataggtttctgtatttgccttatcaagaagtgccatacacttcaggttgatttctcctacttttagtactgtaggaagcagtgcatctgcactttcttcataaccaatcttaaataatgcttcacagaagaagcgattcacttcagtatcttcataattcagaacatttgcatgataggcataggcagccattccacgaattccgaaaagaatcagagatttcaaagagcgtatatcttcgttggcattccatagctgttgcatatcgtattcgtctgttttaccgtaaggtgattgacatttgctgcagtcaggaaccagtctttctttttcagctcggactttttgtatcatgttttcaattgagacatcgtcaaaatttacatttgtaactgtggtaaacagcccttcaattatgacctgtccggttcttttggaaatagctgttgtactatcgacagctcttgcaagaccaatcaaggcacctgtcagttcatcctgtaatctggctgtatctgccttttttccacagacaccggaatttcctgtacatccggcgcatccgacggtctgctcacactgaaagcaaaacattttcttatccattattgtattctccttttttattctataatttttccatcaatacttatcgttataacctgccatggtaagaattttccactatcctgaagcgccttttttgccgccatttccagaccaccacagcaaggaacttccattcttacaattgttacactttgaatgttgttattttgaataattgcagtcaatttctcactataatctacctgatctaatttaggacagccgattaatgttactttatttcggataaaatcctgatgaaagcttgcatatgcataagcagtacaatcggctgcgattaatagttttgcgccgttaaaatatggtgcacttacaggtgccagtttaatctgtactggccagttctgaagttttgatagctgctctacgcttggagctgattttatggtttcaggtgtttcggatcgctgaatctgcatacttctagaaccaggacagccggtgtgtgtagacattgcttgatttttggcaaatacttttttctgcgcttcttttacggcttcttcatcatatgcaggagcctctctttcttcaaaagaaatggcacctgtaggacattccgggagacaatcgccaagcccgtcacagaaatgttctcttaccaattctgcttttccgttaatgatgtcaatggcaccttcatgacaggcatctgcacaggcaccgcatccattacatttttctttatcaattcgaataatctttcttatcatttttaccctccgtctatagcataaaatttttatttctgttagaatcatagtataataaatgcaacttgtatgtttgatttccaacaggaggaacaattttgaaaaaatttttacccattttaaggaacagtcctttctttaaaggtcttactgatgacgagatattatccatattgcactgtgtagaggcaacaacagtttcaaaagagagagattcttatattttcagagcagcagattctacagaagtaatgggacttgtggtgtcaggctgtgttcttgttatccaggaagacctttgggggcatcgaaatattttatcaaaatgtcatgccggtgattttttcggagaaccatatgcggcaagtccgggtgctgttttgaatatcagtgtggtagcagatgaggactgtgaaattattttcctaaatgtccagaagcttctggttacttgtccaactgcatgcgagcatcatcagaagttgattcgtaacctggtcagtgtcctggcaaataagatactgatcttgaacgataagatcacacatgttggcaagcgaacgacaagagagaaactattgtcatatctgtcagccgaatccatcagacattcatctttatcctttgatattccttttgaccggcagcagttagcagattatctttgtattgaccgtgcagcaatgtctacggagatatcaaagttacaaaaagaaggttttataaaaacaaatcgaaagcattttgaattaatggtttctaatgatgtggattcaacaaggaaaatgtgatgtatatcaagggaaatatagaattaatttgagaattattattttgcagaagaatgagaatggatggaggtaaaaatgattatcagaaaagcgaaagaaaaagatattccgagaattttagagttattagagcaagtgttacaaattcatgcagatataaggcctgatatttttattccgggcacgaccaaatatacgatagacgaattgagagagcttttgaaacataaagaaaagccaatatatgttgcggtggatgaggatgatgtttgtgtagggtatgcattttgtcaattacaagagcagcctttttcaaacaacatggttccgtttaagacgttttttattgatgatctttgtgtcagtcaagaggttcgaggtcagcatgttggcgaaagtctgtttgaatatgtaaaaaatgaagcgaaacagatagggtgctatgaagtgacattgaatgtatgggcgggaaatacttcagcagagaaattttatgaaaaaatgggaatgcgaacgaaagaaagacaaatggaatatatattggtagaaaaataatatgcagaaatagaaaacatggaaataagactattacgatattttttcgaatgatcatatacaaacgctgcagattcttgctgacgcagcaaaatatgatgtggcatgtacatcaagcgggctgcttttactccggaagaaatctgtgacttaacagtagagttttataagtgtaattatatcgagggtctgtttttgagttccggaatcttaaagaatccgacttatacgattgagaagatgtgagagacgttattgttgcttcggacgagctgattgcatcagcaggatatcttgcagatcgtatcagtgttaatcttgaaccggtaagtgatgaagaatatagaaaactaaaataggaccagacatggcaaagtgcttctgccatgaattagaacatttagacggagaaatatttttagacaaagctgttgaataaataacgctttgatagtatcaatagaaggcgatattgattagtaaaacaaggagatttttatgattaaagttattatgatgtgtggaatatgcggttccgggaaaacaacttatgcaaagcagaaagaaaaagaaggctatgttcgcttgtccattgatgaggaaatgtggaaaacttacgggagaaaggggattgattatccaaacgaacagtatgagaaactttcagaaatagtggaaatggcactccagaaggaactcctgtctctcattcaacaaggaaaatatgtagtccttgatttcagcttttggaataaggaaaacagagagtattataaaaggcttatagaaaaagctggcggtacaccagaacttgtttatatgaaggctagtaaaggaaccttacaaaagagattgtataaaaggaatcagtctttgaatgctaattctccattcataataacaaatgagatactagagcatcattataatgattttcaagaaccatgtggcgaaggagaaaaagtaattttacaggaagaagattgtgttggggcggccactgatagcctcgaccacctttggtgataggcaatacgagggggaatttccgttaccgaagatgaagactacaaatgtatatccagtacaattaaagtaatggcttgtatcaaatctcactggcgatgaagtacctgcgttcatctgatgaggagtggacagtatttgtaaatgctttcgataagctgattcaaaataataatggtgtggtcagtcttgcagcaatgaatcttcctgcggattggaaagaacatttaagtgtataaatgcagtggaattgcataaaataataaagcagacctaaccaagcactttttgctcaaatcggttaggctttcggcggagtgttacgataagcacttcgccatttttattttgataaggaacattcaccttttacttacatatgattgcacaatttgaacgaaaaaagtctcatgatcatgtgagaaaatgaaagtgaaacttattagatgatataattgtcatatcggctaaaaaatagcgcagtgggcaaaaggaatggcgtttttgccgatagtgtgatatactaattagtagattgatacgttttggatatgggttatgatttgtgatggaggattgtagatgagataccttttagttgctgatatagcaaaaaaatggaatatgtcagagcgcagtgttagaaattactgtgcccaagggcgtgtgaacggtgcatttcttactggtaagacatggaacattccagaaaacgcagaaaaaccggagcgcaccaacaaaagaaaagaagagccgattactctgttggatattctgaaagagcagaaggcaagtaaatattccggtgggatttatcataagacacagattgatttgacctataactctaaccatatggagggaagccgcctgacacacgatcaaactagatatatctttgaaaccaatactattggcgtagaaaaagaagtgctgaatgtggatgatgtgatcgaaacggcaaatcacttccggtgcattgacatgattattgatcatgcaaaagcagctctgacggagaagttcatcaaagaacttcacttggttttgaagaacggcaccagtgattccagaaaagaatggtttgctgttggagattataagaaacttccgaatgaagtcggcggcagggatacagcccttccagaagaagtttccgataaaatgaaggccttgctgacggaatataacgccaaagaagaaaagacctttgcggatattctggacttccatgtgaaatttgagcggattcatccgttccaggacggcaacggtcgtgtgggcaggttgattatgtttaaggagtgtctgaaatacaatatcgttccgttcattattgaggacaatctgaagttattctattatcgtggattgaaggaatgggatgacgaacaaggttatctgacagatacctgtctgactgcgcaggataagtataaggcgtatttggattattttaggattgcctactgaaattgaaataaggctaccgcaattccactggctttagacggtgggttaaggtagccaaaaatcagaaattattgtatactcatggcatgggaacat

SEQ ID NO: 2818 - DNA, 10522 bp, Unknown
  gut microbiota DNA sequence
gtttgattgttgccggacgattagaaaggacaatgacacggtcggcaagtgagattgcttccgacaggtcgtgcgtgaccagaagtgcagattttccttcattccggatgatctgcccgatgtcatcgccaacctgaagcctggtctgatagtccagggcagaaaaaggttcatccagaagaagaagctccggctccaggacgagtgtgcggatcagggcagcacgctgccgcatcccgccggacaactccgaaggccttgcattcttaaagtcaccgagtccatagatgtcaagaagctcatgtgcccgttgcttcgtacgcgctgtcagtgcgtgctggacttccagcccaaggattacgttattataaatcgtgcgccattcaaagagttcatcgtgttgtaacatataaccgacatttgtcgtgctctctttcaaaggctttccgttgatcttaatctgtccctctgtacaaggcagcagtccgcagatcagcgaaagcagtgtagatttgccacacccggaggggcccacaatggcggcaaattcgccttttttcaatgaaaatgagatatcagacagagccagggtctccccttgcagagtatgatacgtgtaagaaatgtgctgtagatttaaaatctgttcccgaaccggttccatagaagacctcctacaagcgaaaaataacctatataagaataacctatataagtaagatatgccgcagacagaaaacaggtgaataaatgtggtgtgtgtggtaaaatgctgatatggaaatgccagaaagacattaacacaccaggagaggtcattacatgttacaaaaaataaattatcaaaaagaactggatagattaatcacggatctgcaaaaagaagaaaaagtcccgacgcttctgcttcacagctgttgcgccccgtgcagcagttatgtgttggaatacttaagcaattacttcagaatcacggtactttattacaacccgaacatttacccggagagtgaatacagcaagcgcatcatcgaacagcagacactgatcggggcgatgcatacgaaatatccggtgcagttcattgcgggcagctatgaaaaagagaaattctatgcgatggcaaagggactggaagaagtaaaagaaggcggcgtgcgctgcttcaaatgctatgaactccgcttaagagaggccgcagagattgcaaaagccggaggatatgagtatttcacgacgactctcagcatcagcccgcttaaaaatgcagcaaaattgaatgagattggattaaaacttgcagaagagtatggcgtggcatatctgacatcggatttcaaaaagaagaacggatataagcggtccgtagaattatccgcgcagtatgggctttaccggcaggattactgtggatgtgaattctccatgcgccagcgcctgaaagaacagcaggaaggaaaagaacacagtgaaaatgcataaatggaatcagaaaattgcatggattaagaaaaaaatcacgttttagggtgaataaatatgtaaatttctgtaataatatttgcttttacgcggaaatgtgttaaaatcggaaacagtaaacttaaaaatgaaaggaagaaatccatatggcacagttatggggaggccgtttcacaaaagaaacagaccagttagtatataatttcaacgcttccattacatttgacaaaagattctataagcaggatatcaaaggcagtcttgcacatgtagcaatgcttgcaaagcagggaatcttaacggaagaagaaaaagaacagatcacagacggactgaatggcattttggcagatgtagagtccggaaaattagaaatatcagataaatatgaagacatccacagctttgtggaagcaacactgatcgaccgcatcggtgatccgggaaagaaacttcacaccggacgaagcagaaatgaccaggttgcattagatatgaagcttttcaccagagacgagatccatgagatcgacgcccaggtaaaagaacttctggaagtgatccttcacgtgatggaggaaaatgtcgagacatacatgcctggattcacacaccttcagaaagcgcagccgatcacactggcccaccacatgggagcatattttgaaatgttccgcagagaccacgagagactgcaggacatcgcaaagcgtatgaatacctgtccgctcggttccggagcacttgcggggacaacctatccgctggaccgtgagtacacagccgaattacttggattcgacggaccgacactgaacagcatggacggggtatccgacagagattacttattagaactgttatctgcactcagcatcatcatgatgcacctgagcagattctgtgaggaagtcatcatctggaattcgaatgaataccagttcgtggagatcgatgacgcatacagcaccggaagcagtatcatgccgcagaagaagaacccggatatcgcagaactcgtaagaggtaagacaggacgcgtatatggtgcattaaatgcactgcttacaacgatgaaaggtattcctcttgcatacaataaagacatgcaggaagataaagaatgggcattcgatgccatggataccgcaaaaggctgcatcacattatttgccggtatgttaaagaccatgcagttcaacaaagaccgcatggaagaaagtgcaaaacacggattcaccaacgcaacagatgcagcagattatctggtaaatcacggtgtaccattcagagatgcacatggcatcgtaggaaaactggtgctgacctgtatcgagaagaagatcccgttagatgcacttccgctggaagagtacaagaagatctcaccggtatttgaagaagacatatatgaagcaattgatcttgagacatgtgtgaataagcgtatcacgatcggagcaccgggaaaggatgcgatggcaaagtcaatcgcagcttataagaaatacatggctgaataaaaaacaaaagtaagggagagaaaagaagatggagaagaaattaagagtaggtattttaggagcaacaggaatggttggacagcgttttatctcattgcttgaaaatcacccttggtttgaagtagtaacagtagcagcaagcccgcgttcagcaggaaagacatacgaagaggcagtcggcggacgttggaaaatggatacaccaatgccggaaggcgttaagaaactgatcgtaaagaatgtaaatgaagtagaagaagtatcttctaccgtagattttgtattcagtgccgtagatatgacaaaagacgagatcaaagcaatcgaagaagcatatgcaaagacagagacaccggttgtatcaaacaacagcgcacaccgctggacaaaagatgtaccgatggtagtgcctgagatcaacgcagcgcacttcgacctcatcaagactcagaaagagcgtctcggaacaacacgcggattcatcgcagtaaaaccaaactgctccatccagagctacacacctgcacttgcagcatggaaagaattcggaccaaaagaagttgttgttacaacataccaggcaatctccggagcaggtaagacattcaaagactggccggaaatgattgagaacatcatcccatacatcggaggcgaagaagaaaagagcgaaaaagaacctctgcgtgtactcggaacactggaaaatggtgaaattaaacttgcagaagagccaaagatcacatgccagtgcttaagagttcctgtactgaacggacacacggcagctgtattcatcaacttcgaaaagaagccaaccaaagaacagctgatcgagaaactggaaagcttcaagggattcccacaggaagcagaacttccaagtgcaccaaagcagttcatccagtacctgtcagaagacgacagaccacaggtaaaagctgacgttaactacgaaaacggaatgggcgtatccatcggacgtctgagagaagacagcatgtatgattacaaattcatcggactgtcacacaacactgtccgcggtgcggcaggcggagccgtactttgcgccgaagcactgactgctaagggatatatccaggcgaagtagccaaggggacggggaatccggtttttttagtgtccctggtggtacactcacctgcttagcattcacaaggcgaagacataaaaaggcaaaagcataaaaaagatgaaagcataaaatataaaaaggcgggaactgcaacatgtaaaaaggcgcagttcccgcctttttatacgttatatctccagcaaagaagccggtcccgcctgccgatacaaaatccgatcacaaatctgatcgcaaatctgaacaccagttttgtcacaagtctgaatacgagctgaacacgatacatctcagtgttgagaataaaagatggttttgctataataaagtatacaataaactcgctgattacaaagtgccagtggggacactgaaaaaaccaaaaacaccgtccccatggcccatggcaagaaacggaggaagcccctatggaccgagaattattgaactacacacagaaccgagaactttcctggctgagattcgatcagcgtgtattggaagaagcaagagataagagcgtgccgctattagaacgtatgaaattcgtagccatcttcaccagtaacttagatgaattcttcatgattcgtgtcggaagtctctatgacatggtgcagacagacgacagacacagagacagccggtcgggaatgacaccgcaggagcagctggatgcgatctacgcagcagttgccccgttatataaagaacgtgacaagacctacgccgggatcaagaaagaactgtccccatacggagtctgcggactggactttaaagaactggaggcagacgagaagaaatatgttaagaaatgtttcaaagagcagatcctgccggtactgtcaccgcagatcgtagacagcagccacccgttcccgcatcttatgaataaagatatctacgtaacagccaatctgaagcatatcaatagcaggaagaataaagacggcaaagaaaaagaacagattctcggaatcgtaccggttccgacctatgtatccgatatactgatgcttccgggacatgacatccgttatatccgcatggagaaagttatcatggaatacctggatctggtatttgaccagtacgaagtatccgacccgaactacatctgcgtgacaagaaatgcagacgtatctccggacgatgaggcactggaggttaccgatgacttccggaaactcatgcagagtaccctgcacaaacgccgcaggatggcggtagtaagattagaaacagcggagaaattgacatcggaaatgcaggaatacttctgtaagaaattcaagatcacaccggagcagatcttccgcacgaagatgccgatgaaactggattatatgttctccatcgcaggaaatcttccggagtccatgaagaaagcactggtctacgaaccattctccccgcaaaaatcagcacatgtacaggacggaaacatgttaaaacaggtgaaaaagaatgatatcctgttgttctacccatacgaaagcatggatccattcctgaagctgatcaaagatgccgcagcagatccgaatgtaatgacgatcaagatcaccatctaccgcctggcgaagaaggcaagactggtggaatacctgtgcgcagctgcggaaaatggaaaagaagtcaccgtactgatcgagctgcgtgcaagatttgacgagcagaacaacatcgactggtcggaacgtctggaagaagccggatgccgtgtgatctacggattcgacggttacaaagtgcattccaagatctgtctgatcacatacaggaaccgcaatgacatccagtatatcacacaggtcggaaccggcaattataacgagaagacagctgccatgtataccgatctgtccctgatgacagccgatccgcgaatcggacaagacgccgcagaatttttcaagaatatgtccattggcaatctgcagggcagctatcaatacctgatcgtatcaccggtcagcttaaagagccgtatcttacagatgatggacgaagagatagcaaaaggaagcgaaggacgcatcattatgaagatgaactccgtgacagatgtggacttcataaagaaagtatccgaggcctcctgcgccggagtaagggtagacttgattgttcgcggaatctgctgtatactaccgggagtgcctggatttacggaaaatgtcagagtgatgagcgtggttggccgctatctggaacatccacgtatctttagcttcggaaccggcaaagagcagaagatctatatcggctccgcagacatgatgacaagaaatacagaaaaaagagtagaagtagcctgcccggtattagacgggcagatcagacgccagatcaaccatgacctgaagatcatgttaagcgataacgtgaaagcaaggatcatgcagaaagacggcacatatatgaaacgaaccggcggtataaaagctgtggactcccaggcagtcttcatggaagaagcacagcacggcagccgagaagaagaccaacggggacggggattactggcttttttcctgtccctccggcacagaaaaaaataaaagccatcagggacaggaaaaaagccagtaattcccgtccccatcggctcaccaaggagtaacacaattacatgggaaaatcactatacattgccgaaaaacccagcgtagcgcaggagttcgccaaggcattgcatatcaatacacagagaaaagacggatatctcgaatcggcagaagcaatcgtaacctggtgcgtcggacacctggtcacgatgagttatccggaagaatacgatccggcattaaaaaggtggagtcttgagactctgccttttatcccgcaggaattcaaatacgaagtcattccggcagtgtcaaagcagttccgaatcgtatcgggactgctgaaccgcacagacgtagatacaatctatgtctgtaccgactcgggacgggaaggagaatacatctaccgtctggtcgaacagcaggcaggcgtaaaaggcaagaaccgccgccgcgtatggatcgactcccagacagaagaagagatcctgcgcgggatcaaagaagcaaaagacttaaaagaatacgacaacctggcagcatcggcttacctaagagccaaagaagactacctgatgggaatcaacttctcccgccttctgacattgaaatacggcaacagcatctccaattatctgaatacgaaatattccgtcgtatccgtaggccgcgttatgacctgcgtcctcggcatggtcgtgcgcagagaacgggagatcagggaattcgtagagaccccgttctacagagtcctaagcaccatcggagagaaaggggcaacattcgaaggcgaatggcgggcagtcaaaggatcaaaatggttcgaatccttcgacctctataaggaaaatggattcaaagaaacggaaaaggcagaagaactgatccgcttcctaagcaacagcgagtcagacgccagccagcccctgacctgccagatcgtgtccatagaaaagaagaaagaaaagaagaacccgccgttattattcaacctggccgagatccagaatgaatgttccaagcggttcaagatcagcccggatgagacactccggatcatccaggaactatatgaaaaaaagctcgtcacctacccaagaacggacgcccgcgtgctgtcaacagcagtggcaaaagagattcacaagaacttaaacggtctgatgcagtacgaaccggcaaagccatatcttcaggatatcgtgaaattcggcagccacaaaggactggagaagacgagatacgtcaatgacaaacagatcacagaccactatgcgatcatcccgacaggacagggcatgggagcactaaaaggacttccgaatctgtcacagagggtgtatgatgtgatcgtaagacgattcttaagcatcttctacccgccggctgtctatcagaaagtatcgatcgtgacgaagatcaaagaagaatccttcttctcaagcttcaaagtactggcagaagaaggctatctgaaagttacaggtgtgccgggcaggaagaacgacaataacgataatacagacagtaccgaggacaaagacactgatgcagccttcttcgccaggatccagagcctcaagaaaggcatgacccttccggtacagtccctggacatcaaagaaggcaagacctcgccgccgaagcgctacaattccggttcactgatccttgccatggaaaatgcaggacagctcatcgaagatgaagaactccgcgcccagatcaaaggaagcggaatcggcaccagtgccaccagaggcgagatactgaagaaattattcaataataaatatctggcgctcaataaaaagacccagatcgtcacgccgacgatgttaggggaaatgatctacgatgtcgtagaccattccatccggccgctcctgaacccggaacttacggcaagctgggaaaaaggtctgacgtatgtggcagacggagatatcacatcagatgaatatatgaaaaagctggatgattttgtatcaagacgcacacttgcagtcaaaggtctgaacaatcagtatcagatgcgggcgtgctatgataaggcagcgcagttttataagaagccggtgagaaagaccggaaaaactaaaaaataaaaaaggagaaccaacatgtcagaacaattaactatcaaaaacctctacaaccacatggatgaaaccatcgcaaaagacatcttcgaaggagccacctacccatgggaaatccttccaaagatcagcggcttcatcaaagaactcggaaagacccttcctgcagatgaatacgatcaggtcggcgaagacgtatggatcgccaaatccgcaaccgtattccagacagcctacatccacggaccggcgatcatcggaaagaacgcagaagtccgccagtgcgcattcatccgcggaaatgcgatcgtcggcgaaggcgcagtcgtaggtaactcgacagaacttaagaacgtcatcctgttcaacaaagtacaggtgccgcactataattacgtgggcgattccatcctcggctacaaatcccatatgggggccggatccatcacatccaatgtcaaatccgacaaaaaactcgtcgtagtaaaagccggagacgaaaggatcgagacaggtcttaagaaattcggagccatgctcggagacgaagtagaagtcggctgcggcagcgtactgaatccggggaccgtgatcggaagccacagcaacatctatccgctgtcaagcgtcagaggattcgtaccggcacacagcatctacaagagacagggcgaagtagtggagaaagtagaagagtaatcaacacacggaggaaaaatcaatgaacaaaatagcattcatcggcgtaggcatcatgggcagatccatggtccgcaatctcatgaaagcaggattcgaattacacatctacgccagaaccagatccaaagtcgaagacgtgatcagcgaaggagccaccttccacgacaccatcgcagactgcgtaaaagacgcagaagcagtcatcaccatcgtaggcttcccgaccgatgtagaagaagtctacttcgatgcaggcaacatcttagacagcgcaaaagaaggcgcatacctgatcgacatgacgaccacaagcccgatgctggaccagaagatcgcagaagaaggaaccaaaagaggcttccacgtactggacgcgccggtcaccggcggtgacatcggggcaaagaacggtacactctccatcctggtcggcggttccagagaagactacgaagcctgcatgccgttattcgaggcgatgggaaccaacatcaactaccagggaggatccggctgcggccagcacgccaagcttgcgaaccagatcatgatcgccggcaccttatccggagtctgcgaggcactcacctatgcgaaggccaaaggcctgaaccttcagacagtcctcgattccgtatcgaccggagcggcaggaagcaagcagttagataccttcggaccgaagattctggcaggagattacgcaccgggattcttcctgaagcacttcgtcaaagacatgaagatcgcccttaccgaagcgaacatgagcaatctcaatctggacgtattaagccaggtgcttgccaactacgaactcctccaggcagaaggctgcggagatctcggcacccaggcactgatcaagtactacgaagaagagatggacgtataagacatgtcgaaaaaaagacaaaaaatgggtaaaattgtataaattgttgatacatagttgaagcctgcttaaagatatgataaaattatacatgtttatgaatggatgagggatgtgggcaaaaa

SEQ ID NO: 2819 - DNA, 266 bp, Unknown
  gut microbiota DNA sequence
agtgaattttccatggttttccagtttgagcatattatgcttgatcaggaagaaggaaaggaaaaatgggatactattccattgaatatggttaagctgaaaaaatgccttgcgaagtggcagaatactttatatcagacaggatggaacagcctgttcatgaataaccatgatcttcccagaatcgtgtcgcgctggggaaatgacggaaaatacagaaaagagtcggcaaaaatgctggcgacaatgcttcatggaatgcaggg

SEQ ID NO: 2820 - DNA, 46387 bp, Unknown
  gut microbiota DNA sequence
cgatcaatgtatgacataacaaccggttacatacaatatagggaaataccgcatcggcgcatccgatcatctcatgtgccacacggatatttaccgaggaaatgtatttcaggttctttaccttcccattttccataatagcctgtcccgacaatcccactctgtgtcctccttcgatcgtgataaatccctgccgcatctcctgctcgcacgcatatagggaataattactgatgtattccagcatttcgcggatattatctttcgtcaccaggtatggccgtctggctttcgctccgggaataacttctgtgtcatgatacaggaagatcagcggctttccctcccggagacggatctcctgtaagtattcgaactccagcttttccttttgtataatacttctgacatcccatggcaggacttttaagattgtatcttctttcatgttcatcacctctttacacccatgtatatgtggatgggcggagattatgactggtatttttccagaaacacaaaaaagcctcgggtttccactaccggaaatccgaggctttcacataatatctgatattaaattataatcttattccgctacatccttcatagagaatgagattcttcccatcttgtccttgccaaggcatacaaccttaacaacatcgccaagtgtgagaacgtcttctacacgattcactctttctttggaaagcttagaaatgtgtaccattccttcttttccaggtgcgaactcaaggaatgcaccgaagtctttgatgctgacaacttttccttccagaacctgtccggcctcaaaatctgtgacgatgatgtggatcatcttctgtgcttcttccatacctttggcatctgttccgcagatagatacggcaccatcatctgtaatgtcgatcttcacacctgtctgctcgatgatcgcattgattgtctttccacgctgtccgacaacatcaccgatcttctgtggatcgatctgcatctggatgatcttcggagcgaattctccaacctctgctcttggagcatcgattgctttattcataacttcatcaatgatgtaaagtcttgcttttcttgtcttagcaatagcttcttcaatgatcggtcttgtcagtccgtggatcttgatatccatctggatcgctgtgatacctttatgtgtaccggctaccttgaagtccatgtctccgaagaagtcttccagcccctggatatctgtaagcaccagataatcatcgtctgtatcaccggtaacaagtccacatgagatacctgctactgcagccttgattggtacacctgctgacatcagtgacatagaagatgcacatacacttgcctgagatgtagaaccgttagattcgaatgtctcagatacagtacggatcgcatacgggaattctgcttcgcttggaagtaccggaagcagcgcacgctctgccagtgctccatgtccgatctcgcggcgtcccggtcctctggatggctttgtctcacctacagagtatgatgggaagttgtaatgatgcatatatcttttgactgtctctgcttcatccagaccatccagtttctgagcttcagaaagtggtgctaatgtacagatattgcagatctgtgtctgtccacgagtgaacattgcagagccatgtactctagggatcaggtcaacttctgccgcaagtggtctgatctggtcgatctctcttccgtccggacgtttgtggtcttttaagatcatcttacgtaccgtcttcttctgatactgatatacagcttcaggaagaactgcaagccactcttcattttcagcaaatgcttcttctaatttttctgttacggcgcggatattctcttctcttgtctgtttatcatcggagaatactgctacttccatctcttccggagtaacgatctctttgattgctgcaaagagttcttccggaactgcacagctttcatattcgtgtttcggttttccgcattctgccacgattgtatcaataaatgcgattaccttctggtttaattcatgcgcagcaaagatcgcatcgatcatctgctgctcaggaacttcatttgctcctgcttcgatcatgatgactttctcttttgtcgaagcaaccgttaaagccatgtcagatactgctttctgagctgctgtagggttgaatacgaattcgccgtcaaccagacctacctgtgtagtagagattggtccgtcaaacgggatatcagagattgttgttgcgattgctgcaccaagcatagctgtaagctccggtgaacaatcctgatcgacagataatacaaggttttccagtgttacatcgttacggtaatccttcgggaacagtggtctcatcggacggtcgatcacacgacatgtaaggattgcattctcagatgcttttccttctctcttattgaatcccccaggaatctttcctaccgcatacattctttcattgtattcaacgctcagtgggaagaaatcgattccgtctcttggcttctctgaagcagttgctgtacacagtacagttgtatcaccataatgcattaacacagcaccatttgcctgttttgcaactctgccgacatcaactcttaaggttcttccggcgagttccatctcaaatgttttatacataaatgtgttctcctttattttttcttttgtggttcaagatcaccccgaaactactgaaaaacacatttttatatcaaatatacttttcagtggtctcggtgaagttttcctaatccacaatcttacttattatagcatacactttcacaaaaagctatacctaaaatcgttcacatgctctgtcactgatgactaactgatgacttttattgcttattccgataatagaaaagggacattcttccgaatgtccccataaaaagcatgaattattttcttaatccaagtttctcgatcagtgcacgatatctttcgatgtctgtcttcttcaggtatgcaagaagtcctcttctctgtcctaccatcttaagaagtcctcttcttgagtggtgatcctttggattagctttgaaatgatctgtaagatcattgattcttgctgtcaggatagcgatctgtacttccggtgatcctgtatctcctgctgttctgccatactgtgctacgatctgttctttctgttctttagaaatcatgtttgtttcctcctgtattctcttaaattaaaacgcctgatattaagtaacggttggagtttccagttaccgaacaccggcttcaacgttgcttagtatatcatatgaacttccctgtgtaaagagaaatttatacaattccaaaatattccattccctttgcaatatccttatcaatctgttctttcagtgctccgattccattgaatttttgttccggtctccggaattccatcagactgatccggactttttctccgtatgcatttcccgaatatccaaaaagaaacgcttcgatcaacagcttcttctcttccgttacagtgggcttaataccgacatttgcaattcccggataggtcttgccctgtacatcgatcttacagaaatagactccgtgtgccggcacgatctttccgtcaggccatgcaacattcagtgtcggaaatccgagcgtacggccaagctgcctgccatgttcgaccatcccctctacttcaaatggataaccaagcagtttttctgccagtcccacatctccggcttttaccacttcttttacataagtactgctgatgatccggtcatgataacattctttttctatgacgatcagctgatagtcatattgatctgcatattccgccagcatatgcacatccccgcgtttctcacatccgaatgtaaagtctgttcctaccacaacatatttggcatgaaaaagatcatgaatgatctcctgtataaaatcctccgcacttttctgacggaaagattcagtaaacgggcattcgatcaggtaatcgacttcgtctttcaccctttcctgccgttcttccccgaccatcagaagttccggagtaatccctctttccttccatagcggtctcatgtcaaacgaacatacgatgctgttaatattctcctgttctcctaattcacgaacttttgtcacaagcacctgatggcctctgtgtaatccatcaaactttccaaaagtcaccgctgccctgccgcttccgttatattccgcaagctccctgatatactgcatagtcttttcttcctcgtttactcgttaaaaaacatcttgacgatgtgatattttttttctttttctttccactgataaatagcaatgaatttacctgattcctcatacagacgcacctgtctgtcttcctcctgactgtctgcgtctttcagcatcttctcatccagcggattcccgttttttgcaaatgctttccagtcatccttcactgtgatctttggatataacgggaacatttcatcaagtggcaccagaatctcctcaagcatcccctcctgctttaatgctccgatttcttccagtgtctttgcatcctttatctgaaacgccgatactcttgtacggatcagtgattccatacatccgccacatccaagctgttcgccgatatcgtggcaaagagtcctgatataggttcctttggaacacgacacctccatacggacccgcggaagatccatttctatgatccggatatccaggattttcaccggacgggcttttctttctacgacctttccttctctggcaagctcatataattttttcccgtttaccttaagtgccgaatacatcggtggaatctgatcatagtctccgataaagctttcgattacttctcttactttatctgctgtaagtgtttccgtacttttttcttccagaatcctgcccttgatatcctgtgtgtcagttgtcataccgagaagcataactgcctcataagtcttatccttatccgtcagaagatcacaaagcttggttgcttttcccaagcaaaccggaagaacacctgtcgcatccggatcaagtgttccggtgtgtccgatttttttctgtcccacgatcccacggagttttgctactacatcgtgggaagtgaaccctttttctttatacacattaatgattccgtgtatcatagtttactgctcctgtgtcttttccagtttttccatctgcgcttcgatctgttttgacagattgttcagcacatcaaacggtgttcctgtcattgtaaatccagctgccttcttatgaccaccaccgccaaaatactgtgcaatcctgctgacatcgaccttctcttttgaacggaggcttactttgaattcattctgcctcagttcatacataaacacggcaacttctaccccttccgttacacggagctggcttacaattccttccagatctttcggtcttaccccgtaaaactccatcacatcttttcggataaaagatgcaataccggttccattcagaaacaggatactttccatcaatgcgcgccccattacaagattctgtgcgtaggatttcgcatagaatgtctcttctatgatctttggtgcgtcaattcctttttccagaagtttcgcagccacccggaatgtctccggtccggcacaggaatactggaatactcccgtatcatgcacgattccaagatatagtgcttccgctacatttttagaaaccttctcttcatccaacagtccgtataccagctctgatgttgaacttgcttccggaacgatatgattgacctctgcaaagccaatgttgctgatatgatgatctacacagaatgtatgctttgcttttacaaacaatgatttggaatattccagtctgtctgtatccccgcaatccagggaaataaagagatcatatattttttcttcattatccacagactccagaattgtctctgttccatttaagaaatgaaaagattccgggatatctttcagataaatgtctacggttttatcactgtaattttcgcggatatactgtccgagtcccacgcaggaacccacacaatctccgtccgggcgtatatgtccgccgatcgcaatcgtggacacattctccaatactttactcagcatcttcctcaacaccttccgttttcaggtctttggttacttcatcgatcttctttgacatattgacaccatattcaatagactgatccagcacgaacctgatctccggtgtattacggagattcaatgttcttgccagttcccggcggatatatccttccgcactctgcagacccttgatcgtctgttcctgctcgtaagcatctccgagcacactgatatatgccttacatgtcttaaggtccggcgcaacttctgcagctacaaccgaagtccacggtgcaacacgcgggtcttttaatcccccgcggatgatgttcgataactcgtgctgcacctctgtatttactcttgtattcttaatacttctttttctcatttttatatcaactcctagcgtggaatctctaccatctcaaatgcctctacgaggtcaccttctttgatgtcattgaagtttgcaaatacgaatccgcattcgtaacctgcttttacttcttttacatcgtctttgaatctcttcagtgatgccagaggtccttcaaatattacaataccgtcacgtgtcaggcggacagaacagtctctcttgaacagaccgtcaaggacataagatccggcgattgttccgactcccgaagccttgaatgtctgacgtacttctgcgtgtccgagtactttctcctcaaatacaggatccagcatacctttcatggccgcttctacgtcttcgatcgcattgtagatgacacggtacagacgaatgtctacaccttcacggtctgccgtttcttttgcagttgcatcaggacgtacattaaatccgatgataatagcatttgatgcagaagcaagacttacgtccgattcattgatcgcaccaacaccaccgtggatgatcttaacgactacttcatcgttcgagagtttcagcaggctctgtttgattgcttctacagatccctgtacatctgcttttacgacgattccaagttcttttaagttcccctcctggatctgtgtaaacagatcatccagagaaagtttggattttgtctcttccagaagttttactttgctctgtgagataaatgtctctgcgaagtttcttgcttctttttcatttccgcatccaacgataacctctccggcattcggtacatcattcagtcccaggatctctaccggtgtagacgggcctgcttctttgactcttcttcccttatcatccatcatggctcttactttaccaaacgcagaaccggcagcgattggatctccgacgcgaagtgttcccttctgaaccaggatattggcaacagaacctcttcccttatccagttttgcttccaggacaagacctctggcgcgacggtttggatttgcctttaattccattacttctgctgtcagagcgatcatttccatcagatcttccagtccttcacctgtcttggcagataccggaacaaagatcgtgcttccgccccagtcttccggaatcagttcatactctgtcagttcctgttttacacggtcgatgttggcactaggtttatccatcttattaacagcaacgatgatctctacacccgcagcctttgcatggttgatcgcttctactgtctgcggcataacaccatcatctgctgctactacaagaacagcgatatctgtagaacttgctccacgcatacgcattgctgtgaacgcctcatgtcccggagtatccaggaatgtgatcttctctccgttgatttctacaacatacgcaccaatgtgctgtgtgataccaccggcctcacggtcaataacattggtatgacggatcgcatccagaagagaagttttaccatggtcaacgtgacccataacacagactaccggcggacgtttcttcattttcttttcgtcctcttcgtcttccttcagaagttcttcgattacatctacaacttcttccttctcacacaggacatcgaattccagcgcgatctcttctgctgtctcgtaatcgatttcctggtttacagtagcaatcttgccctgcataaacagctttttcacgatcacagatggtacgatcttcatcttgtctgccagttctttgattgtcaggacttccgggattgtgatctgtttgatctcttcttctaccttctgttctttctgctgtggtttctgaagctgctgcttcggctcgtttttcttcttaccctttgacattctttcttcatcatcgcgacgataatctttcttcttgtgatcgtcttttcccttggcattctttctctgtggtttctgtccttcgattgcaggagccggaatgcttgtgttatttcttctgtcatttcttctgttatctgatttttctccgaatttgcgtccctgtctgtcatcaccacggttgttgtcatatctgttatcgcggtctccctgatttctgtcggaacggccattctgcggacggtcgcctctctggaatctctgtccgcctcttccttcctgacgatcactacgtccgtctcttccgccgccgcgtctgtcgctgccgcggttatttctgttgtcgtctctgtttgatctttctgttctttcatttctgtccggtctttcgtttctttccggacgtctgccctgtgctctttctgctgccggcctctctgttctctttggagcctgtgcctctcctgttgctgcgttctgtgccgcagggcgctttgccggacggccgttatttgcctgcatctgttttccctgtccggaattctgacggtttccgccggatcttcttcctttattaccgccgttctgtgtattctgcggacggaatacatgcacgatattctttttctttggtgtttctgatttttctgtattttcgtttatatttgtttctatatctttatttgacatatgatctgcctcctctacgcaattgtctgattctctgtgtctatatgcttccggataccttttgcgaatccctcatcaaggaccaccaaagatgcgcggaattcttttcccattgcatgccccaatgtctctttgtctttgtaaaaatagatcggaacctgataaaagtcacacatgttctgaaatttcttcttggtattatcggatgcatcgtctgcaacgatcacaagacatgctcttccggattttacttctttctccgtacagaactctccacttgcaaccttgccggcttttgtagccagaccaatcatagataatgctttattctgactcaagtacttccatctccttttccagtgcttcatacacttcttttggaatagcctgcttaaaggatctctccaggcctttgttcttcactgcttttgcaaggcagccgccattcggacagagataagcaccgcgtccgttctttcttcctgtcgcatccagcagaaattctccctccgatgtgcggatgacacgaatcatctcttttttactcttcatttcctgacatcctacgcatttgcgcataggaacttttttatttactcccacgaattatcacctattcctctgtgtcctcaacttcgtcgaatgtgatctctgcgtcgtcttcatcatattcagcatctgccgtgttctctacatcgaattcttctgcatcgtcgtcatactcttcttcgtacacgccctcgcttaattccatgtagttttccggaagttctccggactcgattgcctgcgtttcatttttgatgtcgatcttatatcctgtcagtcttgctgcaagtcttgcattctgtccttctttaccgattgccagagataactgataatccggaacgataacgctggctgtcttttcatccggatcagccattacagagataacctttgccgggcttaatgcattctcgatcagaatagccgggttgtcactccagttgatgatatcgatcttctccccacgcagctcattgacgatcgcattgactctggctccgttcataccgacgcatgctccgaccggatctacgtcaggatcgttagaccatacggcaatttttgttctgcttcccgcttctcttgcaatgctcttgatctctacggtaccatccttcacttctgtaacttctgattcaaacagacgttttacaagttccggatgtgtacgggacacgaggatctttggtccctttgtcgtattctttacttctactacatacaatttgatacgttctgtcggtttgaatacctcgccttttacctgttcgttctctgtcagcatagcatctgccttaccaaggttgatgctgacattctttccgacataacgctgcacaatacctgttacgatatctttttctttttcaaaatactgatcgtatacaaccttacgctcttcttcgcggatcttctgcaagatcaggttcttggcattctgtgttgcaatacgtccgaatgatttagactcgatcggaatatgcacgatatcaccaagttcaaacttgctgtcaatctcttttgcatcttccagactgatctgttccagtttgtcttctacttcttccacaactgttttctcagcatataactgatactcacatgtttctttgttcatgatcagtttgatattatctgttttgccgaaatggtttttacaggcattcatcagtgaattttcaatggcgtctaacagtgtttctttgctgatatctttctctttctccagtatatttaacgcttctaataattctgtattcatggtctttcctccttgcttatccatgccgtttaaaaatcaaacgctaatcggatcagtgcgatctcgctcttttcaaatgttttctcggtctcatcttccatctcgatcgtaaccgttgtctcatcgtaatcttttaagattccggtgaattctttctgtctgtcaatcatgcggtaggttctgatctcgacttcttctccaaggcttctcctgaagtccttttccttcttcagcggtctgccaagtccgggtgaactgacttccaggatataggaatcttcgatataatctttctcatccaaaatgtcggaaagtctgcggcttacagcctcacagtcattcactccgattccgcccggtttatcaatatatgcacgaagataccagttacttccttcttttacatattcgacatccaccagttcaaatccatactcttccacgatcggaagcaggatctcttctgttttctgttcatacatttctttttttgacaatctaaaatcctccttatgcagaccttatttatctacgttatacgatcagccggtcttctttcatttatgctttttacctgcttatctgcaggatctgccactggcagattctgctgcatactttgatatgcaacaaagaagagtgaacgatatgtccactcttctgccggttgatttatgtaactgaattaactatagcaccgtttttctgcaaaatcaagggattttgcgtatttttttacatttttccatgtttgaatgccatcatcatctcatttgtcaggctcagatcttcggcctctaccggcatctgctccctttcaaaccactctgccatggcaagttcatcggtatcgagcgtgataccgtcttccccgtccagttcacagaagaatcccatcagcagtgtatcggtaaaggaccacggctgactcttataataccgcagattctttaccttcagtccgacttcttccatgacctcacgccttaccgtctcctcaatggattcacccgtttcattaaagcctgcgagcagtgcatactttttgtattctcttcccgcatacttcgacatcaggatcttatttccatgtgtgacagctatgatcaccgccggacatatcttcggaaattccatcattccacaatccggacaacgcatcatgcgttctttgtcgtcatgtaccataggctgcccgcagtggccgcagaatttccgtgactgataccagcggtaaagctgccatcctgtcactgcggcaaattgtctgtactttggtctggcctcgcggaaatactgattatccttcagttcaaaccccggaaagtctgccgggtcgatcccatccgccagatagtaaccctgtccgtcaatcgagaagagatacgtataatcttcatagatatccggataacagactgcagcctctttgaatgtcagaaaagaaatctcctgatcttccagcttcaccagaatctttcttccttcataatacaagatcacgctgtcttcctttggcggctccgggacatattcatttctatatacatgtggttcaatgttctgtatcatatcgtttaccctctgtactttgttcctgtaccatctcgttttgcaagcttcagacggttcagggtgacttctttttcatggtatgaaatcttacactcagttccctcttcaaacaggtatacatttgtcaatgcatcgtcttttttcaagcggataccccgcactccgatcgcgcctttcttcttctccgtaacttctgctgccggaaaacgcaggaaaaatccatctgccgtctgcagtacaatatgctggttctccgtcaccaccctgatattcacgacttcatcttccggctgaagttttgttgccgcaatggtgcgttttgttacctggaattcgcttccgccgaccttcttgaccatgccctgctttgtggcaaacaacagattcgcataccgcatctgttcggaatcacagatatatacaatttcttcctgtgtactgtcgtaattactgatattgtcgatcggctgtcctttatcacggaattttccatatggaagatccatcactttcacctgatgcatcttcccatcctttgtaaaaatacagatcctgccggtattcatgcagtgcaggatgtatttattttcattatctgctgcctctttattacgctcatacgtactgacatcaaccgtctttgcatatccgaaacgatccatcaggaatacgatctcctgctcttccactttcttctcttcaaacacagcctcttctgcattctctacaaccgtacgtctctttcttgcgaattctttcttgatacggtccagatcttccatgatgacagccgccatagaatcataattattcaggatatcttcatatcttgcgatcttcgcaagtgtctcttcgtgctctttctgaagtgcttcaatctccagaccgatcagtttatagagcctcatttccaggatcgcagttgcctgacgctctgtaaaccttaacattcctgccattttttttgaaatagaagacttgaatttgatattctctgtctcaccgttcaccagacatgcctttgcatcttttatgctctggcttcctcttaatatctcaatgatcaggtcgattacatcacacgctttgatcagaccttcctggatttcttttttatcctgttctttcttcagcagtgtattatattttctcgttgccatgtcaaaccggaaatctacatgtgcctcaataatacgtttcaggcccatagtctccggtcttccgtctgcaactgccagcatatttactccgaaagtatcttccagtctggtcttcttataaagcatattggtcaggttttctacatctgccccctttttcaggtcgatgacgatacggatgccttctttggatgactggttggaaatgtctacgatatccgttgtcttcttggtctccaccagattgcagacatcatttaagaattttccgattcccgcaccgatcatcgtatacgggatctctgtgataaccagacgcttctttccgcccttcacatcttccacttcaacttttccgcggatcttgatctttccggttcctgtctcgtatatctgtggcaggtcgtccttattgaccacgattcctcctgtcgggaagtccggtcctttgatatatttcattaattgtcgggtcgtgatctcatcatttttcatgtaggctttcaccccgtccacaacctcacccagattgtgtgtcggaatactggttgccataccgaccgcaataccttccgcaccgttgaccagaaggttcggaatacgtactggaagtacggccggttccttctctgtctcgtcaaagtttggcacaaagtctacaatgtccttgtccagatcggccagatatgcttcctgcgtgatcttcgcaagcctcgcttcggtataacgcattgccgctgcaccgtctccttcgatcgaaccaaagttaccgtgtccgtctacaaggaccatcccttttttaaattcctgtgccatgaccaccagtgcatcatagatggagctgtccccatgcgggtgatatttacccatggtatctccgacgatacgcgcacacttacggtacggtttatcataccgtattcccagttcatgcatgtcataaagtgtacgtctctgtaccggttttaatccgtctcttacatccggcagggctctggcaatgattacactcatcgcataatcaatatatgattttttcatcacatccgaatattcggttctgacgatctgtgaatcctgcattttctctctcctattctatatatcaagttccgcttccgtcgcattctcatagataaaggaacgtctcggcggtacttccgatcccatcagcatctcggttacactggatgccattcttgcatcttcaatctctaccagtttcaggatcctggtctccggattcagggtagtctcccacaactgctccgcatccatctctccaagacctttgtatctctgcaaggtaaatggaccgtcatgtgtctttctgtatttttccagtgctttgtcatcatacagatactcttcttcgcccttcttcggcatcgccttgtaaagaggcggcatcgcaatatagacatgtccttcaaagatcagttccggcataaagcggtagaacaacgtcaggagcagtgtcgagatatgggcaccgtccacatccgcatcagccatgatgatgatcttatcataacgcagcttgctgatgtcaaagtcatttccgtatccttcggaaaatccacagccaaatgcattgatcattgtcttgatctctgcgtttgccagtactttatcgatacttgctttttccacattcaggatcttaccacggattggcaggattgcctggaacatacggtctctggccgtctttgcagaacctccggcagaatccccctccacaatgaaaatctcacattttgacgcatcacggctctcacagttggcaagctttccgttactgtcaaatgagtatttctgctttgtcagcagattggtcttcgcacgttcttccgtcttgcggatctttgccgccttttctgcacatccgatcaccttcttaagggtctcaagattccggtcaaaaaagcggatgatctcatcattcgtcaccttactacaggctttcgccgcatccgggttatcaagctttgtcttggtctgtccttcgaatctcggatccggatgtttgatggatacgatcgcagtcataccgttacggatatccgccccggtaaaattcgcatccttttctttcaaaactccaagttctcttgcatactggttgattgctgtcgtaaacgtcgtcttgaatccggtcagatgcgttcctccctctgcattatagatattattgcagaaaccaagcacattttcatggaactcattgacatactggaaagccacctcaacttcgatgccttctgcttcccctttgaaatacaccggatcatgcacgacttcttttttgtgattcagttcgcggatgaatccaaggattccatccggctcatgataaatgacctgttccggctccgctcccctcttatcttcgaacacgatcttaagatccgggttcagatacgctgtctcatgaagcctgctttttacctcttctgctttgaactttgtcttttcaaatatggtatcatccggaaggaaattcaccttcgttccggtctttcttgtctttccgatcgtcggcaataatccatcttccagttcgatcaccggttttccctgttcatacctgtcatgatggatatatccgtccctgctgatctgtacatccatataagttgacaatgcatttacgacagaggaaccgacaccatggagtcccccgctggtcttgtatgccgaatcgtcgaactttccgcccgcatgaagtgtcgtatataccacacgtgccgccgatacgccggtcgcatgaaggtctaccggcacaccacgtccgttatctgcgatcgttgctgatccatctttttccaatgtcacatggatctcgttgcagtatccagccaggtgctcatccaccgcattatccacaatctcatagatcagatggttcaggcctttggtagaaacacttcctatatacattccgggtctttttcttaccgcttccagtccttccaggatcgcgatactgcccgcatcatatgtattctttttcgccattctttctatatcctttctccgtttcatccgtatgaaaaatgccgaaagctattctgtcatatattattcataaggatcatacagatttttccatactttgaatatcttatcataaaaatatttttgaatcaagacaacacctgatgcagaagttctgcaagaatctccatcgcattgcgcatctcttccactgtattggtctgcgctccggcttcgatcagaagtgtctttggcttgaaatgcatattataacggtacgcacgcagaaaaatgtgtctggcaaatcccggataatatgttgccgctgcaatctccatctgcagggaaaatgccaggttatcttccaggtatgggttggacagataactgatatttccatttgcccgcgtcctgctgagcccgttgaagaacatgatctgcgccgtcggcttaccgtctatctctgtcaccaggtgcgtcccttccgccacgccatcccggtgaagatcgatcacaacttcgatagccggattctctttcagtattttctgcacatccggctctgcaagctgatacgccttactccgatccagttttccattcaccagatcatataccccttcgtgatgatatgtggatattccatacttttgattcaaaagttcagacagatacgtccccattcccacaattgatgtaccggcatctcccggaacagaatctgcaaattgttcctgggaatgcgtgtggtagatcagaactttagccccttttgtatccggatttaatttcatatcttttcccatcagcttatctgcattgatcagtccctcatctgccatagtactgctgtccacggtatagaaatgactcataagatattcataatctcttagcttttccatggaaatatctgcttttaccactggtgttttccatgtctccttctcctctgtatccggattctgtgtgatcagtttgccatttttatctacggcgttctcatcattttcctgtttttccagtatcatggcatacgtcctggaatcttcgccggccgtctcttccttcccttgttctgtcataaatgcaccggcaggccataaccaccgcatcactgcccatgccagatcctttgacggagtatccgtctgatccttttctgccgcatagacaagtgccggcagcatcattctgacagcaccgtccgcaatctcctgtttccctttttctgcaaaaaacctttcatttattattccggttccgacacctgtttctttcatgatacagatcagaaaacatccggcaatgatcctcaccgcatgctgtatatattttttgcatctgctctgcatgtcttgttctttcacacctgcacaccccgatattttgttaatcttacgctctactttctaaaggtaaggtatgcagtcatctcgctttctatgctgtttcttcttttttttctgattcccctgcttttcctgaaaataacagattcaatgcctccgagacagtatagctgatccttcttatcgtctcatcgatatctttcggtgttacgaacattccgttcagatgtggtgcgatcagttcttttaccagttcgtatttttccgcagaattgtatccttgcaatacgacacctacccctttcaaattctccgacgtctccagtgccgcaataaaattctccatcgtgtcatttacaatcgttgcggcatccactaccgtcggaacaccgatcgcgatcaccgggattcccatcgtctctttcgtgatcacgcttctgtgattccccacacccgctccgggatggatcccggcatccgagatctgtatggtccggttcagtcttttactgcttcttgccgccagcgcatcgatcaccaggatcatatccggctttgtctcctttacgactccctgcacaatctctgccgtctccatccctgtctgcgccatcactcccggaacgattgcacttacgatccggcttttttcttctacgccatatcttccatattcctgtaccatatgcctggtgatattcaactgatctaccacatatggtcccaacgcatccggcgtcacttcacggttaccaagccctactgtcaatatcgagcatcccttttctttcgaatgctctttttcattgtctgcgtttctgtttttcgtttcctcattttccacatatttttccaaaaatcctgccagagtttctgatatctctctgtgatatccatcatctgccgatgccatatcagggacttccaatgtaagatatgttcccaccggttttcccatcatcttcgccccgttctccgtttcaatcctgacggttgtaatcttaatctccctctcttcatcgtattcttcttccagtacaacgccggacacttctacatgatctgattcaaaccgttctttttgctccatcgcaagatccgtccggatcgtatacttttccaccatcgttttctccatcctttcttaaattaatactagtttttccaatattttcagaaatatgtattgacagaatctaattcatgtcctaaaataaattcgtatgtttcgttagatcgtccgtgtccggctctaacgaactggaaatcgaattataaaaatcgaaatacattgatatcggaggtggacaaattggctaatatcaaatctgcaaagaaaagaattttagtaaacgaaacaaaagctgctagaaacaaagcaatcaagtctaaagtaaaaacttgcgtaaagaaagttgaaacagctgtagctaagaaagatgccgctgctgctgcagaagcattaaaagttgcaatcgttgaaatcaacaaagctggaagcaagggtgtttaccacaaaaacacatgctctagaaagatttcccgtctgacaaaagctgttaacggaattgcttaataatagagattaaactcgagttgcaaatttcgagcccggatcatcccgtcaatgatccgggctttttgttataaatacaaccgtaaagtccataataaaaaggatatggctgacgccatatcctttttgtatctatcgtattcttacaaatctgattagttgttgatcagtttgtcttctccattccagctgtagagctttctgatctctgctccgactttctctgatggatgttctgaagcaagttttctcatagctttgaagtgtacctgacgtcctgccggagacatgtctaataagaattcttttgcaaatgttccgtcctggatgtctgtcagaatctgtttcatagctttctttgtctcagctgtaacgatcttaggtcctgttacatagtcaccatattcagctgtgttagagatagagtatctcattccagcgaatcctgactgatagatcaggtctacgatcagtttcatctcatggatacactcgaagtaagcgtttcttggatcatatccagcttcgcaaagtgtctcgaaaccagcctgcataagtgcacaaacaccaccgcaaagtactgcctgctcaccgaagaggtctgtctctgtctctgttctgaatgttgtctcaagaagaccagctcttgctccaccgattgcaagaccatatgcaagtgcacgatcccaagcttttcctgtagcatcctgctctacagcgataaggcaaggtgttccttttccagcctgatactcacttcttactgtgtgtcccggtgccttaggagcgatcattgttacatctacattctttggtgggttgatgcatccaaagtgaatgttgaaaccatgagcgaacattaacatgttaccttcttcaaggtttggttcaatatctttcttgtacatatctgcctgtaactcatcgttgatcaggatcatgataatgtcagcctgttttgctgcttcagctgctgtgaatactttgaatccctgagcttcagcttttgcccatgatttacttccttcataaaggccaacgataacatcgcatccggactcttttaagttcagagcatgtgcatgtccctggctaccataaccgatgatagcgatcttctgtccctctaatactgataaattacaatcttcctgataaaaaattcttgctgccattatagcatacctcctaaaaaataaatgattttttattttcttaaacaaggggtcgcccttccaccgggctcgtctctgtttaatgtctgattaaaatgtgttaccgtttgtccattataatatatcaattataatgtgttgatgtttccttcctgatcaatgactgttacatccttgattcctctctgcaatccggtaatacctgttcttgcaagttcaagaatctcgtaaccttccagaagttccagaaacgcatctacttttgaaccatttcctgtcagttccaccatcagggaatccttctctacatcaacaatcttcgcgcggaatatatccgccacagatatgatctccgttctctccgtcttattcgcccgaaccttcaccatgatcagttcgcgatataccgaatcttccggatgaagtactttgatctcaatgacatcttccagctttctgacctgcttttcgatttgcgataagatcagctcatctccgctggccacaatggtaattctggtaaatctcggatctgccgtaactccggcagttatactgtcgatactgtatcctcgtctgctgaacagtccggatacacggcttaatacaccaggattattgtctaccaataatgaaaatactctttgcatattgcacctcttttctatcatttataaaaaacagagtgcgttctgtttttttataataacaactacttcttcttttgtcaagtattggcacccatatttttacatttttcacaaaatgcaggattaccgcattatttcaggatgatcccggcaatgtcttccggcgtcccggcaacgtatactgcgcctgctttttccagttcttcacggttgccgaatccgtataatacccccatacagtcaattccttcctgctttgccccaagcacatcatgttcacggtcaccgatcattagtatcctcttcttatcctgcatccggcaggtatcaatcagatatccgatcacctctgccttactgcctctgcctccgtccagttccatacctgccacatattcaaaatattgatccaggtcaaaatgttcaatgatccttctcgcatatacttccggtttggacgtcgcaacaaaaagtcttttccctgctgccttcaatgcctttaatgatttttcaaatccgggatacaccgaacactcaaaaatccccgtatcctgataatattccctgtaatactccaccgccttccagcttttctcgtcgtcaaatccatagaatctggcgaacgaatcggtaagcggcggaccgatgaatttatataatttttcccgttcggtctcttcgattccgaatttctccagcgcatacatcaccgaattcgtaattcccggtgaagaatcgatgatcgtgccatccagatcaaagaaacagatatcatacattttatcaagcttttctttttccatattctctacctgcctgcttcaaaaaaataccggagccgtccttctgcgttttttccgcatccgtcacaccccggtattattataaccgttccatctatacttttgcaaactgtatcatccagagaagcagaagatgcaccggataaaatccgtagaaaaaccatttttcccagccgtgtgctgttttgtctgctttgttatacatacactgtataaccactcccgatgctgccggcccgatacaggcgcatgcagaatgtatgagcgcactctccagcccgcagtccgccctgtatgacaacacattcaacagaaagaagagtcccgctgcttttccatatgccagtgatacttttttcctgtccccatatgcatttgcaaacagcatcgtaaataccggtgccagaagtgcccagtccgtccagagcgaacagattaccagcacgcacagccatagcattttctcccctttatgttttacatgatctgcaacccacaccactcccagacatagaagaaggctgaacatcatgttcaggttcgtctgtttcaatgccagcatgaaggggatctgtgaaaggatcccaaatacaagcagccgcagtgcatagttctttacagatcttgtgtaatgatatccttccacaaggaaatagcacatagtaatggctgtaaaatacccgatatcaaccataacttcctgccctgtactgccttcttttaaaaatatataggcaaaatgattacagaacatagctgccattgccagatattttattgcatttctactcatacttccctctccattttcattcttcgatatttctgataaatccgacataggtcgctccaaaataaactacatatacgccaaagaacagggcgaatgaaattgcaaaatactgtaacaccggtgtactgactcctgtatagaagttaaatccggcacccatatacaccgctatgattccgctgatcactgccgaaaggattgccggacacagataatacccgaacagctgacggaatacggtctgttggatctcgcgtcttccaaggccgattttcgaaagcacctggtagcggaacctatattttgccgaatcgctcagctgttgtaccgataacaccgtcaatgcaatacacaaaataccagccctatatacatacatgggaatgtgatacaactcatcatatatctgacctcagccgatgcattttcccgcacaagattcaccgcagcatatgtgacaatggtatccgtaccataacatacattatcatcgtcttcttccatgtatgtatgaccggcataatcatgtttatctgacagatcatccagcttattctgcaggttatccggcacttttttcttcacactcaccgcaagttccgaatagtacggtgtcatctgctgtatccgttcatccggcacaacgatgatataatcaccgccgttatgtccgtcctgcgaaaatgattcggtgcagatcttcctgcaggtcagtgtctctccacggtcctgaagcttcacgtcatccgtaaaatctccggtttccttatacactctttgcttcatctgaaggatatattcattttttccaagcgtttccgtggaatatcccagcatttttctcagatgattgtaatcactcagccccatatatgtatcatatctgcaatatgcatcatcaccggaacctttacgtatctttttctcatccggtgttccgtcttctctgcggtactcatctccaaaataccgcagatgcgtatacagccatgtattcattgtgttcgtatgattttcataaatacggtacacgcacgaatcctttacaccggcttcttctccgacaatatccaattccttggcaaaatcatattccggattctgactgttcacctgtacatcaaatggaaatttcatctctaaaacctgattctgccagttcgtaaacattaatgcaaccgagcaccccagaaatgcgaccataaaaagcaccgtaagtgttcccatggtaaaccgcatcgttttcaatttagatgcaaactgacgcagcaggaacagattctgcccccggtagaccgcatttccttttttcttcacatagcagatgatccatgcggaaagccctgtataaaacacatacattgtaataaacagacccgtcagaaatactgctgcccctcctggcgactgtatatttccgctcagtatccagacaccgaacgcaaagatgaacagaatggaaaacggcagtaataaccgctttattttttcattcttttcttttaattcctcattcttctgattttctctcatcagatcatgaatgttcatcttgcggaatttccggctgcaccggaacagtgccagcagataacatcctgcaaagcagcacacagtcataaggaaacaatatccattgaactccagatggggtcttagttccacctgtatgacactataaaggacaacgagcagcacctgctgaagcaacattccaaggcccagtcctatcacaaaggaacacacaccgagcagcagattttctttcatataaagcccggacacttcctttttattcattccgatcaacagatagataccgaattcacggcttcttttttccagcatgaaccgtaccatataattgatcagccatgcaacgatcagtacaataaagaatgtggcaataccgatcatcgctgccattatcgctgccatttcatacattttctgaagatccttcgaaaaaatgatactgttaaatgcaaacatcaatgataccacaaatgtcatcgtcagcacatacaccagataatctctggcggaacgcctgacattgcgtagtgcaagcttaccgaacatctgacagttcacctcctgtcagagataatacatccaggatcttattcagaaattcccgcctttcttccactcctcttaccagttcatggaatatctttccatctttcaggaaaagaatacggctgcagtagctggctgaaaacgcatcatgtgtaaccatgaggatcgtagagtgcatatcatggttcatcttgcggaatgtttcgagcagcatctgtgccgctctggaatccagcgcaccggtcggctcatctgcgaggatcagtttcggacgatgaatcatcgctctggcacaggcacaacgctgcttctggcccccggatacctgataggggaatttatcccggatttcttcgatatcaagcagcttcaatatgtgatcacatttctcttggatctctcttttcctcttgctgtgcagcgtcattgccagcacaatattctcttctatcgtaagtgtatctaacaagttgtaatcctgaaatatgaatcccagattgtctttccgaaattccgccagtgcctcatcactcagctccgtaatatccgtttctccgtagtatatatgccctgcagtcacacggtcaatcgtagacagcatattcaaaagtgttgtctttccggaacccgatgctcccatgattcccacaaattctcctttttggacgcaaaagcttaccctgtctaccgctttggtgatgttcgtatcacttccgtaatatttttccacatcacacacccggatctctccatccgggattctgcctcctgccaggattctgtctgtttttttctctattgttttgccatgctttcttattcttctcatccatatcatcctttccggtctttttgtaatactctttttcatctctactttacccgtccgggccagaaagatgtatcgatgtatctttcagttatcttacatttttgaaagataactgctgaccggaaatgtaaggatcatcttcgtgccttcaccacggacagattccgcctcgatggcaattccaagcttttcacacagccgtctgcacagataaagccccatccccgtagatttcttaccatttcttccattggaaccggtaaaacctttttcaaaaattctggacatctcttcttcccgtattccggttccgttatcttctacgatcagccggacaccatgaccgtacctttccgtgtaaatatgaatatacggatggacctttggattctcatttttatatttcacactgttcagcataagctggttcagtataaaaaggatccactttttatcggtatacgcaagatcagggcactccacttccccgcgcactccgttactaattagataatacttatttttcatcaaaatttcagaagccgccttcccaaggtctgtctcttcaatcatatagtctttgtataccttttccattctggcataatacagaaccatatctacgtcattttcaatccgttgattctcaagaccaatctgtctggtcacttcgtctttatgattctcacacacaagctggatactggtaatcggtgctttgatctcatgcacccagctttcgatataatcccgataatcattctgttcatcttcaagcatacggatccgttcgatcacagatttattcgatcgtctgatcaactcccggtagatccgatcttccagatatggtgaagctggcagcaattctccaagcagatatctctgatctacattttccagaatatgttctgccctgtcaaaatatttcttcctgcgataatatcctgtcacaatccatatcccaaggatgatccaccagaaaatgagaatcagtgcagctgcgtttctgttataccctgtaatatagaagaaccccatcagtaatatcatacacaggaggtgcagcagacatatcagaatcttatcttttatatattccgaaaatctcatatgcggtaccccattccccgttttgtctcaataaaatccttcactccgatgtcagccagttttcctctgagtcttgtaacattcacacttaatgtattgtcatctatgaagacttcattgtcccacaggtattcgatcatatccattctcggaacaatctcaccctttttctgatatagaagatgcaggatcttcaactcatttttcgtaagatctgtcttttttccttcatgctctatgcagcctcccacaacatttaggattacacctttatattccatgttcaacgcattaccccttgatttctctgcatttttatcggtagttctttttagtactacgcctattcttgccagcagaatcggtggattaaacggttttgtgatataatcatctgcccctttcaagattccggtcagttcatccatggaatccgtccggctggtcagaaatatgattggaatatctgaatgttctttcaacttcgtacagatgtcaaagccgctttcccccggaagattccaatccaggagtaccagatccggtgccggtatcatgctgcatatctgctctgccgtatctttaaattcttcgattatctctgcttcataaaaagcattttccaggagctgttttaattcctttcggatacccggatcatcttctacaataacaatcttcatgtcgttctcctcatgatgttccttttataattatactgataaatacagaacagattgtagaaaatacgcttttacattttccacaatctgttcattatagcatataacatacgttgaatatgtttgtattatttcacaagaagtgatgttccagtcatctcagccggctgttccatacccatcagttcgatcagtgtaggtgcaatatctgccaggcatccgtcttctttcaacttgtatgcaggatctgcgtttacaaggatgaatggtacaggattggttgtatgtgctgtaaatggctcttttgtctcttcatcgatcatgtactctgcattaccgtgatctgcacagatgaacatctgtccgtcagcttcttttaatgcttcgtaagcctttcctacacactcgtcaactgcttcaatggcttttacagcagcctcgatcacaccagtatgacctaccatgtcagggttggcaaagttaattacgataacatcatacttatcagacttgattgctgcaacgagcttgtcacatacttcatatgcactcatctctggcttcaaatcataagtagcaacctttggagattttacaagaattctatcttctccttcatttggttcctctacgccgccattgaagaagaatgttacgtgagcatacttctctgtctcagcgatacgtgcctgtttcttgccgttcttggcaaggaactcaccaaatgtattactgatttcttctttcacaaatgcgacctgtttattttcgattgtagcatcgtattctgtaaagcatacaaatgttgtcttgattctgtctcctctgtcaaatccgtcaaagctgtcgtcacagaatgttcttgtgagctctcttgctctgtccgggcggaagttgaagaatactacggaatcattttctttgatcgttgcaaccggtgcgccgtcctttgttactacaaatggtacaacgaactcatccgttacatctgcatcataagaagcctggattccttctgttgcagaagcagctgtctcaccttcgcctgctgaaagtgccttgtaagccttttctacacgatcccagcggttatcacggtccattgcataataacgtccagaaacacttgcaacctctcctacgccgatttctttcatcttagcttctaactgctctacatactcttttccggaagccggtggtgtatcacgaccgtcaaggaaacaatgtacgtatactttctcaagtccctgtctcttagccagttccagaaggccgaagatatgtccgatgtggctgtgaacgccaccgtcagataccagccccatcaggtgcagtgcagaatcattcttcttggcattctcacatgcagccagaagtgctttattctcgaagaatacaccatcttcgattgcctttgtgatctttgtcagttcctgataaatgatacgtccggcacccatattcatatggccaacttccgagttacccatctgtccgtccggaagtcctactgcaagtccgctggcatttccttttacacatggatattctgacatcagtttatccataacaggtgtttttgccatagcaattgcattaccttctgtcttttcattcagtccataaccgtctaagatcataagtactgttggtttcttactcatttttaatatcacctttcgtcttaaatatcacttttacagcataaaaccgcaggaagcagtcaaacgaaagcctcctgcggctgattttctaaatcttatttgtagtttacgatctttccgaaatcagctttcagagatgctccacctacaagtccgccgtcgatatcagcctgagcgaataactctgctgcatttccagcgtttacagatccgccgtactggatacggatagcttctgctgtagcttcatcatatacttcagcgatgcatgcacgaataccagcgcaaacttcttcagcctgctctgtagtagctgtcttacctgttccgatagcccagattggctcgtaagcgatcactgctgtcttagcctgatcagctgttacattctggaatccaactttaacctgctgacggatgaagtccattgttacaccctgttctctctgctccagagtctctccacagcacatgattggtgtaataccatgctcgaaagctttcaacattttcttatttactgtctcgtttgtctctgcaaagtattctcttctttcagagtgtccaagaacaacgtattttactcctgcatctgtaagcatagccggagagatttctcctgtatatgctccactttcttcaaaatacatattctcagcaccaacctggatattggttccctttacagcctctgctacagggataatgtcgattgcaggtacgcagaatactacgtctacatcttcattagctactaatggttttaattcttcaactaaagctactgcttcacttggagttttgttcattttccagtttccggctacgattttctttcttgccatctttccaaatctccttattctatttatcgttagctgctgctacacctgggagttcttttccttcaaggaattcaagagaagctccaccacctgttgaaatgtgtgtcatcttatctccgtatcccagctggttaactgctgctgcagaatctcctccgccgatgattgttacagcgtctgtgtctgcaagtgcttttgcaaccgtttctgttccttttgcaaatttaggcatctcgaagcatcccattggtccgttccatacaactgtcttagcatcttttactgcatcgctgaagatcttagctgtctctggtccgatgtcgagtccttcccatccttccgggatctctccagcttttactacctgagtatttgcatcattagagaaatcatctccgacaacgttatctacaggaagaaggagttttacacctttggcttttgctttttcgatcatgtcaagtgcatactggcagtaatcttcttccagaagggattttccgactgttccgccctgtgcttttgcgaatgtatatgccattcctccaccgatgatcagagtatctactttgtcaagaaggttttcaattacagaaatcttgcttgaaacttttgctccgccaaggattgctacgaatggtctttccggattgttgactgcatttccaaggaaatcaatttctttctgcataaggtatccaacaactgctgtatctacgtattttgtaactcctacgttagagcagtgtgcacggtgtgctgttccgaatgcatcgttaacaaatacgtcgcaaagagaagcgagatctttactgaatgcatcttcattctttgtctcttctgctctgtaacgtgtgttttcaaggaggataacatctccatctttcatctcagctactgctgctttcgcatttggtccaacaacttccggatcagctgcaaattttacttcctgtccaaggagttctgaaaggcgaactgctacaggagcaagagataattctggaaccggctgtcccttcggctttccaagatgagagcaaaggataacctttccgccatcagcgattaattttttgattgtaggaagtgctgcaacaagacgattctcgtctgtaatctttccatcgataagtggaacgttgaagtcacatcttacaagtactttttttccttttacgttaatgtcgtctacagattttttattaagcatagtactgcctcctggttatatattttataactgcaaaaagggcccggcccaataagaccggaccctttgtgagtcttaattcatgctctaaattatgctaattcagagaagtatttgattgttcttaccatctggcttgtgtatgagttctcattgtcataccaagaaacaacctgaacctctgtagttccattttccagtggaagtaccattgtctgagtagcatcgaataatgagccatatctcattccaacgatatcgctagatacgatttcatctgtgttgtatccgaaggactctgtagaagctgctttcatagctgcgttgatttcatcaactgttacatgtccttttacaactgctgtaaggattgttgtagatcctgtaggtgttggtacacgctgagcagatccgattaactttccgttcagttctgggataacaagtccgattgcttttgcagcacctgtgctgttaggtacgatgttaactgcagctgcacgagatcttctgaggtcaccttttctctgtggtccgtcaagagtcatctgatctcctgtgtaagcgtgaattgtgcacatgataccagactcgattggtgcaagatcgttaagagcttttgccattggagccaggcagtttgttgtacaagaagctgcagaaattactgtatcttctggtttcagtgtttcgtggtttacgttatatacgatagttggcaggtcgtttccagctggtgcggaaataacaacttttcttgctcctgctttgatatgagcagatgctttttctttagatgtatagaatcctgtacactccagaactacgtctacaccaatctctccccaaggaagttcttcagcgttagctttagcatagattttgatttcttttccatcaacgatgatagaatcatctgttgcttttacagtatcagctaaagcgtattttccctgtgaagaatcatattttaacaggtgtgcaagcatcttaggagatgttaagtcgttgattgctacaacttcatatccttctgctccgaacatctgtctgaatgcaagacgtccaatacgtccaaatccattaatcgctacttttactgccatgattaattcctcctaaagtttgttttttaactactaatgcagtcacaattgcgaaatcttttttcaaacttttcaagcttacgaaagacccctcaactgctaataattgtactttatctgatacaaaatttcaagaggttttcctatttttatataagttgcttaaaaacaggcttttgtttcgaaaattctgtataatatttaaagccacaggcttttaaaagctcttctacctttccaaaatcatacgcaatatgctccggtttgtgcgcatctgcaccaattgtaacaatctctccgccgagttcccggtaacgtctcaggacatccggatgcgggtgcgcaaacggaagtccgtattttaatcccgctgcatttacttccagcccttttcctttttctatcagctgtttcagtatctcgtcaatcacatctgtatattctgcacaggaatatgttttttccctcattttcccgtatctcacaatataatccagatgaccaagactctgaaagcagtccatcatcttcacattctcaagtgttgtctccatcatcaaacgataagcttcctgatctgtccggtctgcgaaaagcttttccgctgcagggtctgtatagagctgatttccattggtgtcttttttaaacggaacattatgaaccgatccgattatgaaatcaaacggatatttctttgtcagtttctcataatactctttcagatatgtcctgagtcccaattctatcccgatccggatattcagttttttttcatattcttcctgaagtttctgcatctctgtgaaataagcatccacatcaaagataccttcctcaccccattccagatcatctttgtcaaaatgatctgtaaagcaaatggttttcaggcctttacggactgcttcctccgccatatcgcgcggacaggcctgtgaatctgtcgaaaaacatgtatgcatatgcatgtctgcctgtatcatagtttattcctctttatcgttatctgtttcatcgaaaatctatttatccgcaatgatcgttccaccgccaagcacgtattcaccatcatacaacacaaccgcctgccccggcgtaattgctctctggggttcttcaaatgtgcagagaatctcgtcttctttcgtcttttcaaccgtacaccatgcgcctttgtgattatagcggatctttgcccagactcttttcggctctgtcaaatcttctaccgtcataaaattcacctggtccgcacgcacataacgtgacatagattcttcattcgatcccactacgacttcgtttgtctccggacggatctccagcacaaacaccggatgaccgagggataatcccaaccctttccgctgtcccaccgtataataaataattcctttatgttttccgacaaccgttccgtcggaaagtataaaattaccgggtctgatctgtgcatccgaattttcttttatataagaagcataatctccgtccgatacaaaacagatatcctgactgtccggtttatgagcgaccagaagaccgatctcatctgccatcgcacggatttggtccttggtatattctccgacaggcatcagtgtcctggaaagctgttcctgtgtaaggttgtaaagtgcatatgtctgatcttttgccgcagttgccgaattgcggatcgcatatcttccgttcggaagtttctctactctggcgtaatgcccggtcgcaatgtattccgcaccgatatcaaggctcctcttcagaagagactcccattttacatagcggttgcaggcaatgcacgggtttggtgttcttccatgcagatagtcatcgataaaataatcgatcacattttctttaaattctttcttaaaattcatgacataatacgggatttcaagtgctgccgccactcttcttgcatcatccaccgcgctcagaccacaacagccgccatgttcttccatcgcggcttcttcttcatcctgccagatctgcatcgtaactcctattacatcatatccctgattttttaaaagccaggctgccacggaggagtcaacccctccggacatcccgactacaacttttttcttttccatataaagttctccggcttagtattcttcctcttctgcctcttcaccttcgtgaatatcagacttcggtttctcgagtccttcaatcttaatatcatgcttctctgcgtagtcccataaagctgcgtggattgcttcctccgcaagcagtgagcagtgtacttttaccggcggaagtccgtcaagcgcttccataactgctttatttgtaacttccattgcttcctggatcgtctttccttttaccatctctgttgccatactgctggttgcaacagctgcgccacatccgaatgttttaaattttacatcacggatgatctggttttcatcgatatcaaggtaaattctcatgatatctccgcattttgcatttcctaccgttccgacaccgctggcattttcaatttctcctacatttcttggatgttcaaaatgatccattactttttctgaatacatatctcaattactccttttatatcttttatctgattttttattcctgtctctgttatttctgttttttgataaagtcttcatacagaggagacatttctcttaaatgtgcaacaatttctttcagattgtctacaacataatcaatgtcttctttctcaatctcttcgttcaatgtcagacgcagagatccgtgcgcaatttcatgtggcagaccaatcgcaagcaatacatgggacggatccagtgatccggatgtacatgcagatccgctggatgcacagattcctttcatatcaagtttgatcagaagcgattctccttctacaaactggaagctgaagttggcattgttcggaaggcggtctgttctgtgtccgttcagacggcagtatgggatttcattcagaactctgtcaatcagataatctctgacttctctttctttcgctgttctttcttcaatattcgctgctgcacgttttgctgcagttccgattcctacgattcccggaacattctctgtacctgcacggcgttttctctcctgtgctccgccatgaataaatgaacggatctttactcctgtacggatgtacatgattccgattcccttcggtccgttgaacttgtgtccgctggcacttaacatatcaatatgacattcatctacattaattggaagctgtccgaaagcctgtaccgcatctgtatggaacaggattccatgctcatgagcgatttctccgatctctttgattggctggatcgtaccgatctcattatttgcaaacataacagagatcaggatggttgtcggacggattgctgcttttaaatcatccagttttactttaccatcttcatctacatccagatatgtgatctcgaatcctcttttttcaagatattcagctgtatgaagaatcgcatggtgctctatctttgttgtgataatgtgatttcctttgtttgcataagcttccgctgtacatttcaatgcccagttatcagattcggatccgccacctgtgaaatagatctcattcgtctttgcaccgatcatttcagcgatcgtatctctctgctggttgatcacttctttatttgcagctgcaaagctgtaaacactggatggatttccgaatttttctgtaaaatacggaagcatagcttctacaacttctggtgctgtctttgttgttgctgcattgtcaagatataataatttactcattttatctcctccatttttttgtatattctgtaatatttcttttatcagatttctttccggccaattactgactgcattttggattctcacactcgccatccggattgatgcttttgctctctctgatcagttcatccagcatgatctggttcactgtgtcattgatactgtcgttgatcttctgccacacgtactttgtcacgcatccgtctgatgccatgcatccttctcccgttgtggtatcaaaggccgcacatttaaccggctccagacttccctccagtgcccttaagatatctccgacagagatttccgatggtttcttctccaatacataaccgccagaggctccacgaatgcttttcaccagccccgcctttttcagaagtgctacaagctgttccagatatcgttctgaaattccctgtcttacggccacactgccgatcgacaccggttctttctcactgtatctggcaagatctatcatggcacgcagtccatattttcctttcgtggaaagtttcatcttatcacctcttttaattcccagcattttactaggatttttacttctgtagaatatcactgctttttggttctgtcaagcactattccggaataacttataaagatacaatcctgtcacaaaaaaggagcctttcatgtccagaaagcaagcacttatacgcggaaccgcagttctcacggtcacgagtctgtctacccggtttatgggatttttctaccgcatgtttctgagtcataccttcggggaagaaaatgtagggctgtatcagcttgtctttcctgtctatgcacttggtatctctctatcctgcgcagggatggagctcgccctgtcccgatgcgttgccagggaagccgcggccggcagaatacagaaagcacgggaattgttaaaaacgagtctgatttttacttttttcatttcctgtatgatctctcttttcatccggcagaatgcagataccattgcgctgacttttctccgcgattccagatgcagcagtcttttgttcttattatcttacacatttccatttgcatccattcacagctgcatctgtggatactcgctggggctgaagcagacaaagattccggctgtatcccagcttctggagcaagcattccgcattttgtccgtcattgtcatctgtatgtactgttccggacaggggcagaacatctcgatcgcattcgctgtagccggcctcacattcggagagattgccgcttctttttacagcctgcactccatccggcagtcctggaagcagatttcagaaaaaagcagaagtgtttttcttccccctgctgcattccgtcggcatttacagagacttctggaacacgctcttccacttactgcaagccgcgtattcttaaatatcctgcaaagtgtggaagctgtctctatccctgtctgcctccaatattacggaatgccggctgcacaatccctgcagacctatggtgttcttaccgggatggcacttccgtgtattttatttccatccgcagttaccaatgccgtttcttctatgcttctgccgacggtagccgggcttcaggaaatgaaagaccggcagcaacttcgttccttaattttaaaaatcacctgttcctgcattttgcttggatgtttttgttgtggtgttcttctgatactcgggaaatggattggaatttttctgttcaaaagtccgcttgccggaaattttattctgacactcgcatggatctgtccgtttctgtatacgaacactgtacttctcagcatgatcaacggactgggaaagaccacctgttcttttctattcaaccttttcagcctctgcatacggatcaccggtgtctttcttttcatccccgccgccggaatcagcggatatctgaacggtctgctgatcagccagatattcctgtttctttgctgcattctccggttatctgtatacgccggcaaatattaactgattttccgcacaaaaaaaccgatacatgatataaaacatatttttccatgtatcggttcttttattctacatttttgtatatttacagtgtcttcaaaaacaagcctgtaagtaccggatttacataacactctgtaatgatccccagcatcaggaacaggccaagccggatacttcttcccgcatcccatctcaccattggatattccagcatatagcggaataacacgatccctgccattgcataaaagattccctgtggtgcgagtgcggtaacgatgagtacgatccctttgcttcctaattttatgattgccatacagattaccataccaaaacagaatccaagccataccactgtcagcataactgccgttttcctgtagcgcgttcctgctgcagccaaaagcagcacaaacggagttcctctgctttttaccagataccacaaatacgcttcatatacgatgtctgcccggttatattgttccagaaaatactggttcagtattccgatatccagcacatactgtttcatccagagatttgcactgcatatccccagcagaaaacctgtcattcctgccaaaagcacatatttttgttctccttgtatcctcacacagcattctcctttttttcgtccggatacttcattatatgtactattcccgtggatatgcttttatcgcagtttatctgttctatgcgttctgtccatgcagatacttcgactcatacgcaaggattgctgccatcgtcttggaatcctgaatcttcccttcaaagatcatctccttgagttcttccagtttgtaagctttcacatctacaaattcatcttcatccagatgctgttcccccggaatcagattccttgcaacaaagacttcaattctttcatcacagaacgcaaccgttgtacggattgtaaggagccattccagatcatcggaactgtacccggtctcttccttcagttcccgagatgcacatacaatcccttcttcatccggatcatccagcttgcccgccggaatctccaatgtatctctttccaacgcattccgatactgttttaccatcagtatcttaccatcatccataaccggaataactgctgccgctccgtcatgatggataaaatcccagtcttccgtatttccattggaaaacttcatatggtctttatatactttcaaaacagtcccctggtatgccagttctcttcccatacgctttacgtcttcactcatatcttttcctcccgattctgctatttgttttgataacaaaaaaaccggctgacacatagatcaaccggtttttgtcattcatttatcttctacttggcatagtctgtaacacgtgactcacggattacattgactttaatctgtcctggatattctaattcaaattcaatctgtttcgcaatatctctagccagcaataccatatctgcatcagatacttgttctggaactaccataacacgaatctctctacctgcttgaattgcaaaagatttatcaacacccttgaactggttggtgatatcttctaattgttttaacctgtttgtgtatgtttctaatgtttctcttcttgcgcccggccttgctgccgaaatcgtgtctgcagcctgtaccacacacgcaatcagagtttccggttctacatctccgtgatgtgcttctactgcattgatcacagtagcagattctttgtattttctacaaagatccacaccaatctgaatatgagagccttctacgtcatgatcgatcgatttaccgatgtcatgaagaagtcctgcacgttttgcaagtctgacatctaatccgatctctcctgcaagaagtcctgacaactgagccacttcaacggaatgctttaaagcattctgtccgtaacttgttctgaacttcatacgtccgagaagtttgagcagttccggatgaattccgtgcactccaacttccagtgcggctgattcaccctcttcacgaatcatcgtgtcaacttctttctgcgctttttcaaccatctcctcaattcttgccggatgaatacgtccgtcaacaatcagcttctccagcgcgattcttgcaacttctcttcttatcggatcaaatccggaaagaaccactgcttccggcgtatcatcaataatgagttctacacccgtcagcgtttctaaagtacggatattacgtccttcacgtccgataattcttcctttcatttcatcacttggaagctgtacaaccgaaattgtagtttccgcaacatgatctgccgcacatctctggatagcagtaacaacatattcttttgccttcttgtctgcctcttcctttgcctgcgcttctaattccttgatcatctttgcagtgtcatgttttacatcttcttcaacagtttttaacaaatattcttttgcctgttcggaggtaagtcctgagattctttctagttcctgtacacgttgctgactcagctcttccactttcgcttcgcgctgcttcagttcttcttctttcgctgtaaatcctgcttctcgtctttcaatggcctctgattttttatcaagagcttcctctttggaaagtacacgcttctcgtaacgctgcaattccgatctgcgttccttcgtctctttttcaagttcgttcttatttctgatagactcttccttgatctccaaaagagactccttcttcttggtctccgctgtctttactgcatcatcaatgatctctctggcctttgcctctgcatttccgattttggattctgcattgttcttcaggttggagactgtcaaaaaatgactgagcacagcggccgcaacagccacaacgataagtacgattgctacaacaatcattgttcctatcggcacaggagcacctccttattaaattttcattgtacgattattacaacaaaacaattttatactttttacacaaatatgtcaagctttcactcacaaacttgtaacacattgcggacatcctgataactgaatcctttacgcatcagataacccatcattttctgtttttccttcacatcggctgtttccggattataacttctcttccgcatcagtgtctcgatcgcctgtctggaatctttctccccgtagtccgcttcttcaaatacctgttctacaatttctgccggaacccctttttgcaaaagtgccgcataaagttcttttttacttttccgatctttcctgctatcaataaaactccttgcatattccatatcattaatgtagccgaaggacttcacataccggattgccgcctccactgcatcttcctcatagccgccctgttttaacttggtcctaagctgtgattctgttcttcccatatcggaaagcagatgcattgcccgcagcttcgccctcttgataacgatcagacggaggctgtcatagatgtcatcttcgatcacagattcttccgctatatgataacgggacagttcgcccttatagagagtaaaggcaaactgtccgtctaaatacactttatatcttgtctttgacagcggttctatcttcgtaaccgtcatcatatattattcttccccttttgtgattccttcttctgcagcttcttcggtctcttccatgtcaccttccgctccaatatgatagtgtgcacggatgttctgctccagctcttccatgatctccggatgttcggaaagatatgtcttcgcattctctcttccctgaccgatcttgtcaccattgtatgcgaaccatgcgccgctcttgcttaccagatcacatttcactgcaagatccaggatatctccttctttggaaattcccttaccgaacataatatcgaattctgcctctttaaacggaggtgcaatcttattcttcacgatcttcacacgggttctgttaccaaccatctcaccgctctgcttcagtgtctcaattcttctgacatccatacgtacagacgaatagaacttcagcgcacgtccaccggttgtagtctccggattaccgaacattacgcccaccttctcacgcagctggttgataaatataactacgcagttagacttgctgattaccggtgtcagcttacgaagtgcctgggacatcagtcttgcctgcagtccgacatggctgtctcccatatctccttcgatctcctgcttcggaaccagtgcggcaacagaatcgactacgataatatccattgctcctgatcttaccattgtctctgtgatctccaacgcctgatctccactgtccggctgtgaaatataaagttcatcaatatctactccgatattcttcgcataaacaggatccagcgcatgctctgcatcgataaatcctgcaataccgcctctcttctgtacttctgcgatcatatgtaatgcaaccgtcgtcttaccgctggactccggtccatagatctcaacaatacgtcccttcggtactccgccaagtcccagtgcaagatccaggcttaatgaaccggtaggaatagtctctactgctacctgtgctgacggatctcccagacgcataactgttcctttaccaaaatctttctctaattttgcgatcgccgcatccaatgcgcgctttttatcttcatttgccatgtttattctcctttttcgttcatcgaacgagtgttcgtcttctggttaatatagtattatacttcatcccgaatgtcaatatttaattttcccctcgccatttttctcttgtatattctggaatactctacagaaatgtaaaagaatacaaccatctgtgattcagacatatttaacataccacacaaggctttccagcgtcaagaatttcgccgttactattttcatacatttttcccaggttcttttttcaaccgcacgctccgttacaaccacattttctgcaattttttcatcagcaagataatacgaaacggttcctgctttttctcctttttttaccggtgcttttttgcattttaccgtctttatttccatgcggatctcttcttccttgcgcagcaggattttttttgattcctcgctgttcttcactctcaacgagatcttttctgaggtctgatacggaatttccggatcaaatgcatccactaccagtaatttatccggtaccgtattcctgtacacttcccggtagtgataatgttccagtccatactccatcaacctcctggtatctttccatttatatcctttattatccggccatccgcatgccagaagtgccacgataaaggtacgctcatcccttcttaagcttcccacataacaatatcccgcctctgccgtaaatcccgtcttgccgctcagtgccccgtccatcatatccaggaatgcattatgattatgacacgaaaatgtacgcttcctgtctgtatcctggaactgatattccttcgtccgggtcacttcaagaaatgcttccttttccccggatgtcataatacagtactgcatgatctttgccaggtcttctgctgttgtagaatgtacgccgctttcatcttccgcatccagtccgtttggcgtaataaaatgggtgtccttacaaccgatctctgcagcttttgcattcatttcttttgcaaattcttctacacttccggcaatgccctctgccacagccactgcactgtcattatgcgattccagcatcagggaatacaacaggtctttgatgtagaactcttctcctttctgcatcccaagatgtaccttcggctgggatgcagcctgatccgatacttctatcgtctgatccggatgttcccgcaagtattccaacgcaaggatacacgtcatgatcttcgttgtacttgccatcggacggaccacatctgcatccttcccaaacaatacccggccgctgtccgcatccatcagcaccgccgatctggcataaagttctgccggttcatccccgaacacccgcttcgcattctgtgcagcaacatcgttctccgttccatccgtctgcttctgtgcctcttttttccccgattcggtcagaatctttccggcagtctccgtattctctgcccaccttttattccttgattccagactctgtatacggcatgccatgcccatgccggcaatcaatatcaccagcaataccaccgatacgattttatgcggccgccttttcatatttctccactccgggtatattccgttaagaaaatatatgcccgaaaaaacaaaaaaatcactccaccggctgtctgccgcgtgaaatgattttccatgttatttcctgccacatcttctatatatctaattttaactgtacttcttcttctgcttcttccttgaacgactctacctgttccggattcggacttggcagattatccagcgaatgaatactgaaccggcgcaggaattcttccgttgttccgaaaaggatcggtttccccggagcgtccagacgtcctctttcgcacaccagattatattccactaatttattcaccgcatggtctgatttcaccccgcggatcttttcgatctcaagctttgtgaccggctgcttatatgcaatgatcgacaatgtctccaaaaggacatcggtaagaacgtgttttttcggctgggatgccacacggatcagatattcatacatctctgtctttgtacacatctgatacgcaccgtccagttctataatgcggattcctctgtcttcggccgcatatttatccatcagcttatgtatcaccttacgggttgttgcttcatcctgttccaatgcccgggcaatcttcccgacctctacagaatcccccattgtaaaaagaatcgcttcaatgattccttccatctgttttatttttaactttgccatgttctcttccctatacttcttccactttcgatgtgatcataatctcatcaaacggctgatcctgttcgataaaaatcacgccttctttcatcaactgcaggattgcaagaaatgtgacgactacctgcaccttagaactttgcttttttaacagtgcacggaatccaaattttctatgagatctcgcatattccgtcacataatcaagcttgtccggaagtgttacttcttccttctcgatcttgccgaatttacttcgtaccgggtcaaccttactttcctgccgtttcatcacttctttgaaaatgcggttgagctgcaccagcgtcagatcgcccagcagtttatccagatctaccggcggaacatatcctttcacttcatccgggatcgatgccgtcttatacatgatccgatcaccgtccagctcccggtctttcaactcataggacatgaatttatacatcttgtattccagcaattgttctaccagttcctgtctcggatcctcttcttctccctcttcgttcacttctttgggaagaagcatcctgcatttgatatccagaagcgtcgctgccatcacaagaaattcgctcatgatattcagatcttctttctgcatggctttgatgtattccatatactggttcgtgatctcaacgatcggaatatcgtagatatctattttatttttttcaatcaaatgtaacagcaggtctaacggaccttcaaacacctgtaattttaccggaattcccatacacatcctccattgtcataacttaattattatacaggacatctggaaattactcaagtctttatcttttatttactatctctcatttacatctcttccgaagtgccagacaattcaagaacgatcagttccggccagttccacaatcttaccggcacagaatgtgttcccagtccgcggcttacgaccaccgtctgtgctccttccctgtatattcctccggaatattttggaaatagtgtaaaatccggtgaaatcaccccgccgatccccggaagctgcatcacacccccgtgataatgtccgctcaggatcaggtctgctccgtattccagatattcctgtatatatccgggatgatgtgcaagcaggatctgatattcctcgccgt

SEQ ID NO: 2821 - DNA, 12459 bp, Unknown
  gut microbiota DNA sequence
attataataaaataagtgtagatgttagagttaattactctctaacaactacacttttatggtactaaatggcaaatgcgtaaccgtagtggcctccaccgggttacacttccgggcatttcatttattaatatccgctgacagtcacgacttgaaggaaacaatagataaggattattgtgaatgtggaatgccgttagaaacaattagagagtcagaagcaccgttaaaggaacgaagcgaacgtgtttgaggcgaacgccgagtttgagcgtagttcctttgcttttaggtgattctgactctcttagtgtttcttatggtatggaacctgaacaagaagccttatctattgtttccttcaaggactgagaggccgtttcccagttaataaattaaattccttcttctctatgccttatcttccgatatcctttctgcaatcctttcaccagaagtgtcagatatcgcagtactgcctcggttgcaatcgagaatactacgaataacatgatacacttcgttgacattcccgtaattgcgaataatttcggcaggaagatgatacataagatacatcccaccaggcatcctccccagaccacaccgcggaagatattgaccggtttacagatattgaacaggatgataaatcctacgatcagaagtaacatcgttgctgctgtcgagatatctgtagtatttacatcaaatgacttaccgaatacgaccagtgcgccgaccatcagtacatcggtcaggcccgccggcaatgccttcaggaatacattgctcaggaagtgtccctggattctttctttattcggctggaatgccaggaagaatccaggtactccgatcgtgaacatactgatcagcgatatctgggatggttccatcggataggtgatcatcagcactacggagaataaggacaacaggaaggagaagatattcttcaccaggaacagactggctgaacgctggatgttattaaccacccgtcttccttccattactaccgacggcatacatgcaaagttggactccagtaataccacctgcgaagcctgtactgccgcgtcacttccggatgccatggctacactgcagtcggcatctttcaatgccagtacgtcgttgacaccgtctcctgtcattgctactgtcttgccctggtctttaagggcgtgtacgaatttacgtttctgatccggtgttacacgtccgaatactgtataattggcaaccgcatctgcaatctctgcatcactgtgaagagtcgctgcatcgacataacggtctgcatttgcaattccggcttcttttgccacttcagaaacggtcaggggattatctccggatataactttcacttctacaccctgttctgcaaagtaagcaaatgtctccggtgcttcttttcggattggattggcaagaaggacatatccaagcggcgttaccttgccggtcagtgtttttccgtccagttctccgtcatacgtaccgaataccagcacacggtttccttttcctgcatacccttcaatctcttctttatatttatcaaaatcatctctcagcacgaattccggtgctccaagtacatgcacttcctcttcgtatgtgacaccactgtatttggttgcggatgtaaatggagttacagactcagccttttttcctgttccttctttaaaatattcttttaacgcctccatagtgatgttatcactgctcattgctttcgcaaaatcaccaagcattttcggaagttccggcatttcatcttttttataattagatgtcggaaccacatcctttacactcatgtttgtctctgtgatcgttccggtcttatcaacgcaaagcacattaactcttgcaagggtctcaatactcttcatatcgtgaagtaaaaccttctgttttgccagacgcattgcactgactgccattgccacactcgcaagaaggtataacccttccggaatcataccgatcacagctgccaccatagaagtaatactgcttcggaatggatctccgttaaagaagaagctctgcacgaacagtataattccgattgggatcaatgcgataccgacaaattttaccagtttgtcaagtgaacggatcatttctgactgctcacccttctgcattgcttttgcttccagtgtcagtttggaaatgtaggaatccacacctactgcatccagtcttgcatgacattctcctgccacaataaaacttcccgacatcagatgatctcccggattcttggtaatctcatctgattctcctgtcaaaagagattcattgacctgcacacttccatgtaccacttctgcatcagcacagacctgatttcctgctttaaagattacaatatcatccagaaccagactctccgaattgacccgtgaagtctttccgtctctgaccactgttgcatgtggtgcatttagcatatttaatttttccagtgtctttttagaacggatttcctgtatgataccgatcagtgtattaaaaatgatgaccggaaggaatgtcaggttacggaacgagcccacaattatcagaagaattgccagaaccagaaagatcagattaaaatatgtaaatacattttctttaataatctcttccgttgtctgcgccggaggatcgactgatatgttgccccacccgtcacgcctgtgttcttctgcctgcgccgacgtcaggccttcctcataatccggctcgtatctggttgtcggtgtacgttctatttcataatcacaggcttcttcctgcagttttcgttttcgcctgtcgttttttttcatagagttcctccttatcagctgcattctactgttacattctgattttatctattatttgtatttagtatacaccagaatatgccaatattgtattaacactttatgaattctgtatgtatttttgctgaaaatgcagttcacatcttcatgtaaactgcatctgcttcctctatatactcacattttcatccgtacgaagcaacgcacttttcgcaagctgatcggcctcttcgttataatgatttcctgtatgcgccgcaactttatagaaagatatctttatctgctttgctgcttcctgcatatgtgccgcatacttgctggtaagcggtgtctttgcccgccacacaccagtcacccatttttctacaccttcgtaatcatagcggatctctactgccggatactcatgctctttcgcccattgcactgcattcatcgcgccgagcatttctcctgcaacgttccggatctttacgccttccggatcacagccgcttccggattttctgaattcttctccggccggtgtcaggatcacacagccaaatgcatatcttccgatgcttttttcaaagcttccgtccacataggcaatcaccatattttccggcacttcaacaattcctgctgcttctttttctttatccttagatacatttgcagtagttgacatttgcaagaatgccatcgcttcttctctgtctgtgaagcctctgaactctgctccggagtatccggacgtcgctttctgacactctgcccaggtctcaaataatcctgtcttatgtccttttcttactgcatatattttcttttttgccatatctcttatccctttctgagaatttctaagaatctatctccatactttttcagtttatgctctccgacacccgatacttccaacatctcatcccgtgtcgccggacgcattacacacataccggcaagcgtcttgtctgcaaataccatatacggcggtaccttttcttccgatgcgatctcacgtctgagttcccgtaagctttcgaataattctgcatctttttctgaaagttccgctgccactgcgccttttttgcgtctgttctttttctcttttgattcagatttcttttctgactcttctttcggaagcttcatgatcagcggttcttccgttttcataaatgctttcccttccggtgtcagacagatcaccggatattgttcgcccttttcttccacatattcacggaactgtaattcccttaatatctgtcgtaatctcggaaccgtccgctcacttaacactgcatattccggattcttatccagattcttgcccaggatcttctgactctttccgccgtgcacaatatcgatcaccgttgctgccccgtaattccagtccagtgcatccagacaccgcaggattgtattcgcctccaatgtgatatctacctcttcaaactgtgtctggcagttcagacagtttccgcaataagaactgcccttttctccaaaataattcaagatatattgtcttaagcattctgatgtaaaacagtaaaatgtcatctgtttcagacggtccagatcccgttcttttacgattttgcgcgtttcttcagccaactcactgttctcttctccattttcaataaacagacggttcgtccttacatccttcggctcataataaagaatgcattctgacggctccccgtctcttcctgcacgtccggcctcctgataatagctttccatatttttcggcatattataatgaatcacaaaacgtacatccggcttgtcgattcccattccgaatgcatttgtcgccaccatgatctgccgctttccgtatataaaattctcctgattttccttccgttcctcatccgatagtccggcatgatatctggtcacggaaaatccttcatttctcagatcaaagcttacctgttccacgctctttctcgtcaggcaatatataattccgctgtcaccggatgtatcgtatccttttcccttcagataactgaccagttccttatacttatccacaggcttcttaactgcaaagaaaagatttccacgatcgaacccagttgtttccacatatggattctgaagccttaagatatcaaggatgtcttctcttacttctgccgtcgctgtcgccgtatatgcaccgaccaccgggcggtatgacagacgatccagaaaatccaggatcttgagataacccggacggaaatcctgtccccactgcgatacgcagtgcgcctcatctaccgctacaaaagatatctgcacctgctcagagagtgcaaaatccagaaagctctcagtttccaaccgttccggtgccacgtatatgatcttgtatctcccctgttttgcaagctgcagtgctttgtaatactgtccggaagtcagagaactatttaagaaagctgcatggacacccatctggttcagcgttccaacctgatctttcatgagtgagatcagcggcgagattacgatcgtaattcctttcatcataagtgccggcacctgataacataccgactttcccgctccggtcggcatgattccaagcacatccctgccttccagcaccgattctatcacagggatctgtccctcccggaaatgatcatagccgtagtattgtttcagtatcttttctgcttttttgattgccttactcattctgccccgactccttacattctgtctttttttgtccgtttcttttctactcattacttttttgatccgcagactttcccacacccactatgttttactatcttatcacatttgtctctatctttcatcctatctttacaatcccctctttcatggagaaatccttttgactttccgattctttttcagtataattgtttcagtttttgaaataaaggaggacaaacacatggatttccgtcagatcaccatgatgcagaagataaaatcaggtatggatcgttttcgtgccaaccacccaaaatttccgatgtttttacgcgcagtatcacaggatgcgttggtggaaggaacgatcattgagatcaatgtgaccacaccggaaggaaaaaaatattgtaccaatgtcaagttgaaagccgatgacatggaacttttcgattcttttaaatctatgcagagatagtttccctgcatattttttattcagtgggaacatactaattctgtcataaatatataacaaggaaggtatttattatggaagaaatgttttgtttccagtgtcaacagaccgctcataattccggatgtgaagggcgtgccggtgtctgtgggaagaaaagtgacaccgctaattatcaggatgagcttactggtgcactgatcggcctgtcacgtgccgtgcgtaaaaagcttgccctgaatccggatgcttctttcgaacatgcggatgaacttatcttaaaagggttattcaccaccattaccaatgttaattttttcaatgatacgatcatcaaacttattcacgaagtaaatgttgaaaaggaccggatctatccggatatcatgaattatgatgtccgccatatctgggaagatcaggaagatatccggtctttaaagtctctgatccttttcgggctgcgcggtatggctgcttatgcctatcatgcttatgcgttggattatgtagacaaaaatgtccttgatttcttctatgaagggctcgaagccattgcttcggaaaagagcagtgacgaattacttgcactcgtattaaaaacgggcgagatcaattttcgctgcatggagcttctggatcatgcaaactccggcacttatggcaatccggtaccgacagaagttccactgaccatcgaaaaggggcctttcatcgttgtcagcggacatgatcttcatgatatggaactgttattaaagcagacggaaggaaaaggaatcaatatctacacccacagtgagatgcttccggcacatggatatccggaattaaagaaatattctcatttaaaaggaaactttggaactgcctggcagagtcagcagtcggaatttcacaacattccggcacctattttatttactaccaactgtctgatgccggtccgtcagagttactgcgaccgggtatttaccacctccatcgtgtcatatccggatctggtgcatatcggagaggacaaagatttcactccggttattgagaaagctctggaatgcaagggatatccggaagatcatccgatgaccggaatcaacggcgggtctacagtcacaaccggattcgcccacaatgctgttctttctaatgccgggcatatcgtggaacttataaaggccggcaagatccgccatatctttctggtcggcggatgcgacggtgccgctccgggacgcagctattatacggatttcgccaaagccgcacctatggacaccttgattctgactcttgcctgcggaaaataccggttgaatgatctggatcttggttccatcgacggtattccaaggatcttggacatggggcaatgtaatgatgcttatagcgctattaaagttgctcttgcacttgcggaagtctttgactgtaccgtaaacgacctcccgctcaccctggttctttcctggtatgaacagaaggccgtatgtatcctgcttacgttattatctctcggtgtgaaaaatatcctgcttggtccaacacttcctgcattcgtctctgaaaatgtatggaagatactggtggagaattataatattcagaagatcagtactgtggaagaggatatgaagaaaatccttggttaatgatcttcaagatttgcgaagaacaattcatagaaatcatcttcagcctcgatcatcggcgagttctcccctccgccattggtgcttcttttcattgcggcatggaattcttctcctgccgcaattaattccatttcgtataattcgtaaccaagattccggcaggtcttgcagaaggcagatagcgggtctgcttctgttctggttgcgaggagctgttgttttaacttttcgtcttttaatgctttgttttgtaattcgtctaatatacttactacgtctgccataatcctcaatcctttcctgctaaaaaagagagtaacacatttcctatgctactccctcgtctctaagactattatatgaatttcattttacttgcgcaagctttattttcataaatgcatttacttatatatgtttcccacagatatctgccagacagcatttctcacaatgcggcttcgtcctcgctgtacagacgtctcttccgtgatataccagcctgtggcagaaatcactgccttcttccggcgggataatcttccaaagttccatctcaactttcttcggttccttgattccatctaccagaccgatccggttacagagtctgatgcaatgcgtatccgtaacaatcgccggtttgccgaacacatcccccatgatcaggttcgcactctttcttccgactcccggaagtttcaacaatttattaaaatcatccggaacttttccaccatattcatcacggagtatacgcatacaggcactgatatctctcgccttactctttccaagtccacatggtcttacgatttcttcaatctcttccggtgttgcttctgccagtgcgttgacatccgggtactttgcatataagccttctactactacattgactctcgcatccgtgcactgtgctgccagacgtacactgaccagcagtttccacgcatcgtcataatccagcgtacagtccgcatccgggtattcttttttcaggcggtcgatgaccaccagtgccagttcttgtttatccatttttattactcctgttcatttccatccgaaagcttcaccgtaatataatcatgatggatttctttcagaaatttatcaaatacatccgctgtcttcatcttgatactggaagtgttcacacatggatggcatccgaattcttccagtttcaacaaatcctcatccaccagaagctgcactttattctccggatcaaagatcagtcccataacggtagctgatcccggcgttacattcagatatgtttccatgtcttctcccgatgcaaaggataatctcgtggtcgggatctgctgtgacagttcttttgtcttgagcgctttgtttcctggcatcaaaagcagataatatgacgttttcttccggttacataagaacagattcttacagatctccattcccagcgctttatcaatctcttcacaggcttccattgtcatgactgcttcgtgatccgctctgatgtaggggatatgcagactgtccagtatatcgtaaacttttatttctttttcttttcgtccggatgtatcttccgggcgtccattgtataactccattttatctctcatcctatattaatttcttgttccttcttttctcactattatacaattatcaatttagtactacaagtaatttccagtttatagattcgattgccacactgttttgaaatgcctgtaccctttattctcctctattccactttcagatatttctccatccacacttctgcaagctgcgtccagctctgtacttctttcagcgttttgcggattccctctttctgtttttccgtccatcttgccggctttttacgtccgataccgaacttcaccagaagttcctctcctttttcctttggaaatggagtctcgctggcctcgattgcctctgcaagcatctgcacctgttcctgtgtatatctttttccttcttcctgtcctatattctgctctaaccactcttcggttgccacagatagtccatggattccttctgaaaatacatgctgtgcaaatggtacaccagcctgtgcacaagcctgtgcaaagagataactgttctccaccggaactgtctgatctgttacggtctgccacaggaaacatggcggtgtatcttttgtcacatgattttccaacgacatatagtctagttcctgctctgacggctcttttccaaacagtgcgacaaatgaatctctgtgtgcatattttcctgaagtgatgaccggataagacagaatcgccgcatctgggcggttggatacgttctggtatgcttcttccggatcttccacatctttattatgtacacaaaggcttccacacagatgtgctcctgctgagaatccgcagactgcgattctgtctggtctgatatggaattcctctgcacgtgaacgaatcatgcggattgctcttgagatatcgtgtaacggctgcatcttcagcggtgcttcatctaactgattaatcgtatattccagaacgaatacattgtaccctgcaccatagaattccattgccggcaggtgcgcttcagatggggatacttcccggtatgcgccgcccggtgcgatgatcattgccggatgcttcttttcatcctcatgaatatagctgaacatcaccggtataaagccatgtgctgccggataatgatactcttcttttttccagatttcgattctttcatttatcataatttttatcttctccttcattccttaacaattacttatttctaccgttctttccccattatacttctctacgtcttcgaaaacaaataaggatatttccgcatttgtgcaaatataatcgtttccacccgttttcgtatctcatctgaatagccttctgcgttttcaagcaattctgtcacgtcttttttggtaaaacggaactttagattcattttatataaagattcggaaatatctaattgttcatcgaatgcattacatattgttttgggctgaaccttctccattatacagactttctccgaaaaaattatgaaacaacctctctaaagttataatctgccagtccttcatatcctgtataatcggctttgtaccagatcccatcattctcccattttaactgatttccttttgacgactgacgcctatttgtcctgatgttctgcccaaaaagttctatcattcatttacctctctatacgaatccaaaaatcatcctccgccatccgtccttctgtcttctctataatcataatcggatcgtaaaatggcagtcccagatctttcagtatcagtttcatcttatctctgctttccggattttcttgatttcctttgctgttgtatattctggtgttataaatagtctttctttcacaatctcaccttctggttttatgattcccgtctttttctttattaaatcacaacctctattatttgtgaacaaaaaacaattaaaataattgttttttcatctttccaaaccattattttaattgttttattgattttaataactcatctacagaatctgccactaacaacttttcttatatactttgatatactaacaaagacttcgcatcctacatcagatacgaagtctttctcttaattattttctttttttactagagccatccgggacactaaaaaacccactttacctgtccccctggcttaccgcgctgccaatttcagcatcttctccagtggaagtgctgccttctgacgcatctcttcatctagattgacctccggctgcatagtctcaagcgcttccttcacaccttccagacgcaccatcttcatattcggacagaactgtctgtgccctacggagtagaatttcttctccggatttttctgatgcaattcatagaatactcccatctctgtgcagatgataaatgtgttattttctgattttgtagcataatcgataatctgcgaagtacttccaataaaatcagataattccaaaatatctcctgtacattccggatgagtcagtacgagtgcttccggatgtgcttctttggctttctgaagttcttctttgtgaatactcttatgtacatggcagaatccatcattaaaaataaagtgcttctctggaagctggcttgccacgaaacgaccaaggttctcatccgggataaagaagatatctttattcggaagattcttcacgatcttcagtgcatttgacgatgttacacatacgtctgactctgctttgatctctgcggttgagttcacataacagactacagatacatccgggtattcatttctcacttccctgatcttatctacgtctaccatgtgtgccatcggacagtctgcatgaccgtctgccattacgactctcttctttggattcaggatcttcgcactttctcccatgaaagagactccacagaaaacaatcgtgctctccggaactttggttgcaatctctgcaagataataagagtctcctacatagtctgcaatctcctgcacttccccatctacataataatgtgccaggattacagcatctttttcctttttcagtttttggatttcatttttgatttcttcgttcatttccgactttcacctctaaataaagtattcgatggtctcttcttccgtaagtcttgtcttttcattaaataaaataacagcttcccgcccatcgtacggtccaagggaatacatgttaattaccatctattccggtcagcaacacataatgccact

SEQ ID NO: 2822 - DNA, 11436 bp, Unknown
  gut microbiota DNA sequence
aagaccatatgacttggcaattccttatgactgtcacactcttttattttcggcgggactccaccatgcgattctgtccattcatccagtgcttcatatacactggctacatcccatctatccaatggggtggaggaatatttttttaatgcctgtatcacttccacaacttcctccgtctgtggcagacattgtagtaattcaattgctttgggtatggcttttcttcttgtcataattcttgccataaaaaaacctcctttgaatgctcatcatctcattcaagaaggtttctatcagaaacaattccgaattgttttcaatatcttatctacactgctatttcaacataagatatcgaaatgtttatctgacagcactgatttttaatctaatgcctttatcagaaatcccttattttaaggctattccggtcgtttcctttatcttactctattggaactgcataagttgagaatttcacttcaaaactaagatcgaacttgtcaattgctttcagcagtccgatcgttccgatctggaacaggtcttccatttctgttccgcgccctgcaaagcgtcttacgatacaccagaccagtcccgtattttcctccacaatctgtgctcttgcttcgtcatccccttcgtgagatttctgaattaaagcgattgtgtggtccatatctttcgtccttttccaattgtctttttcattttcacaatagttccttttcccggttcggaactcacttcaacctgatccatgaatgctgtcataaaagaaaatcccattcctgaccggtcaagctccggcctggtggtaaataacggctccatcgcttttgtcacatcttcgattccttttccatggtcttccacttctatctccaatgtgtcttcacaggttgtacatcggaggaatatcttctccacccggcattcatagccatgaatcaccgcattcgtcacagcctccgacacagccgtttttacatctgcaacttcctcaactgtcggattcagtgatgtcataaatgctgcaacggcaactctggcaaatgattcattcgaggaataactgtcaaaaataatctgcatttcattggtattttccattttatttctcctcctcatatatctgcatgatttttgttacccctgacatagtcaggatcttacggatccgttcgctggtatgtaccgcacagacttctcctcccagcatatagattttacggtaacgtcccatgattactccgattcccgaactatcacagaatttcgtatctgcaaaatcaaagatcacataccggatatgattatgttcaatcagatgatcggattcctttcttatctcttccgcattgtgatgatccagttcccccggtaaaaatatagtcagataattctcctgtacctgatacttcatgttataactccccatttacatctttctattattttgcatagtgcataaaccaaaaaaggacatacacctcttacgtgtatatccttctctttttgtatttctgccatttctataccaggacaacgcatatcctagttattattcttcttactcttctgtgcattctgcgtatcaagtgcttcctgtgcatcggtcgcagcctgtgttccctcatgctcttctatgatcttctgataatacgcattcgccttatcctgctcaccctgtttttcataagactgcgcaagcaaaagcatggcctctccgtcctggtatccctcatccatctgtaccacctgctccagatttgttaccgccgtatcataatttgccacttgataattcttctgggatgttacatacaggctttcacagacttttggataaatcttctctgtcagactgtcatattcttcttttccggatgtgccaagtgtacctgcattaatcttcagcagttcttctgccagcgcagaattactcatatctccggttgaataatgcgatacaaccgtcatcagtgactcataacttgactttgtcacctccgcagtctgtttctgttcctctgcagctttggtatctgtacggtatgtttccagttcttttttcagtgcactgatctgtgacttctgcgtcgcaatctgatcactgaacttcaccgtctgcttgttcaccttgctctgtctggatgcagatactgcaggcataaccagaaaagccataaccgcaactccgacagctacaccaattgcaatatttatcattgtgtgcaatccgacattatccttaagaccggatgcgacaggctgaatgatcgtttcatttccgatattataagttaccgtctgtcttctttttttcttctttcctgtatctttatcatcgaccaggcgcacattccttgacttccgcacctgattcagttcatgcatataacgcatggtgatatcatctgtcttgtccagcttgtgtgcgatccggatattctttctcgcctcagaatactgttcatccataatgtaaagcagtgccagaagctgatatgctttcacatatgtcggatgcatctcaattgctttcttaagctggagtacagccagatcctcacagcgctgataacagtaatccagtgcctgattgtatcttttgatcgcctgattgatctgatccaactcgtcttttttctcttttatctttataatataataattggcaatgttctctttcggctggagattcttgcttaacacccattccgtcagtgcttctaccacatcacctcttccgtaatagacaagtcccagaagatttctcgatgcgatgttatctctgttatattgtaaactctttttcagcgatgtgattgctccggtcagatcccggatgttcgctcttttaagcccgtcattataccagtagttcgactgatacgccaattttgttgtataatccatatacttccctctatatttccgttactgttcatacagcgctgagactttccattccggaattcttccctgtgaactgtaaccgcttttctttgccgcagtttactgtggatcgtcctgcttcgtctgttcgatcacttctcttaaaagatctgtcatatctgtcagatcatcctggtaaatcgcatctcccagttcctctacttccagactaggctggaatttctttaattcttcttcaaaatcaagcatctatggcacctcctgccagtaacttttttatcatccctacaaggtataatgaaccaagacagtatatctctcctgactccccccgtttatccagtgccgttccgacggcatcttccaatcgttctttacaatacaccggtctgtctgtataccggcggaagatatctgcaagttcctcaaccggaacacctctctcgtcttcgatctgtgtgacgatatatgctttcacatccagattcccgcacaggcattctatcatctcatcgtacttcttatccgatactgcggaaaataataatatcatctcaccgcgctcagactcatccagtgcctttacgctttctacaaacgcctgcattgcacccggattatgcgcaccgtctaccgtgatatgtgctccgatccgttccatacgtccttcccagtgaagctgtgcaagtacctgtttccaccggtccatatgtatctcttctcccgcaagcagatattccgacgcttccagtgcaagttctgcattcatcgcctgatagcatccgcacatcggcacctgaaagataacatctttatcatacgcactccgtctggaaaatgcaatatatttccggtgaacttcccggatttcatacgcatgattcgtgacttctctacaatatacgcccagttcttctccctttgtccggattacttctgccgcttctttattacttccgtcaaagaataccggaacttttggcttaatgattccggctttttcaacggcgatcttcctgatcgtatcaccaagaatcgccgtatgatccagactgatagacgtaatgatggacagtgccggcttctcaaccgcatttgttgcatccagtcttccgcccagtccggtctccaggataatatattctacatctgtttctgcaaatgcagtcatccccattccgaataaaaattcaaaataagacggatgttcgattccatcttccaccatccggcggactgtttttaaaaccttgcggaatacttcaagaaatgtcttattatctatctgtacattatccatccgtatcctttcatttacagatacaagatgaggggatgtaaagaaccctgttctcttcccctctgccataagtatggcctgtaagtatgcacatacagacccttttccattggttccggcaacgtggacgattttcctgtccactgccggatttcctaatctttttaaaaataattttgtgtgctccagcgtatgtttttttgtaaatttcggaatttcttcgatatatgcggctgcctcttcatatgtgaacacttctggttcttttttatttaacatcatattcctgatccacccaagatttgttcttatcggttgctgtaccttcctgttttacaagctgtccgttctgataaatatatttatcggacatccggaagattgtatcactggaaccaacctgtccgacctgtattacatctccgtcttgcaattctgtctctgatagattaatacgtgtattattcaggaaactgctcttctgcttttctccattcacatatacgcggctgtattttgtaaagttctcgccgtacagactatatccgctgctgagctgcggaacaatactgctcaatgacacatcacggattcccattaccatatgcccttccgagatcggaggatgattgttataaacgtactgctttccatacaggatatcatactgcaaaagttccaggtctgaaagataattcttcgttccttttctctgctgatggtaattgaacactgtaccggaatgaatatccagtctgttcaggatctctgacatcagctggtaagcaggaatattcttgtcctgtttctgaagtccgacattgtcccagatcacataatttgtattatataaataacggctctttaagtcttctgctttcagtcccatggttggaagatgatccccataaaatacaactacagacggttcctttcttgcttccactgccttgatcagatcaccaacaaactgatccatctcatagacctgattcacataatattcccatttattttttagtgcttcatcttcaattccttcaaccttgatctttggattttcgatcaactgcgtctccggatagtttccatgtccctgaacactgacagtgaatacaaagtcttcctgatctgatgtatccatggcttccatgatatgctgtgtcaggatctcatccttcgcccagccgttctctgtcgtctgaaggacattcatgaactccttactggtaaatgtatcaaatcccatattgttaaagacattggcacggctatagaagttacccgtattatcatgcaatgcatgtgtcccgtatccaagtgcggcaagtgcggttgcagcactctctgtcggatgtttcttcgagtatgtcttatatggatattctcccggtccgaagtaacggagattcattcctgtcagtacttcaaactctgtatttgccgtaccggctcccactgacggtaccttgaaatatccggatgaataattctggtataaattatgcaggtttggacacgcatcttcagatgtggtaaagaactctgcatttgccacatcaaaatatgactccagctgtactacaataatattcggaagttcatcggaagaacggcttgttgtgctcttattcagctctccgtttttattgatctttgccatttttttctttgtgtacccgtttggctcactgattccggtattgaacagactcgccgaaaaacaatatggaagaccgtaatcttcataggcaaatgcaatatttccaaaatacgtagatactactcttttgtctattgctgcattcgtgacaaatgtgtaaagtatgcagcacacaacaattcccaacagcgatgctacgtggtgtatctttcctgtatactgtccgccgcgtctccacatcgagaccagccaaaccacaagcgcagctgctccgatagcgatcacaacgacttcaaagccattacaatagttattgatcagcgcgattccgtctcctgcgatcttaagatcctgtgcattaaacggtgtaaccctctttagcagaatatatccgttggcaattccgaggataatccacaatgcgctgataatgatacggacaaatatccttcgcttgaacagatatacaatagaaaaggttacgaagatcataaacgcattgtacaaaaataccaacggtgttcctgtcatatagttccaggcagcggcgagcgaatgtctggaaattgcttctattgtaaagttaatgatgcacgcaagcagtgcatgaaatatcaaagagaatcggttcatgaatgcatagaccggctgcatcttctttgcaaatgcactgttacgtcttgcttccagtattctctcgcgtcgttcatgtctgcctttccagtatgcaatgacatcctctttcttcaaatttcttattttgcggatttttcccttgatatccggtttctttaactgaaattttttcatataatcccctttgatatctaatccgcagctatcctgttactgataactgcggaaatatatggttgtctataggttttaatatttataactttcttctcttaagactgttttgcttttaatccttccagcctttcttttacctgagccatcatctgctgataagtttccagtttttccctttcttcctgaacctttgcagccggtgctttacttacaaatttttcgttgttcagcattccgtttgaacgtgcgatctcttttgtcagtctttcctcttcttttgtcagacgttcgatctcctgttcaaagtcgatcagctcttccagtggaagatataccgttgcatccggaactacaatagatactgcgtcttccgcaatgccttctgtcgtcttctgaagtaccagtttgttcaatgctgccatattctgagctgcattacttaacattgcaagtcctgatccgagctgttcatcttcacatacaacataagcagttgcttttcttgaatttggaacattcatctctgcacgtacgttacggataccgcggatgatctctttgtagtgatcaacaatgttctctgcaattgggaagttccagtctttttcatataccggccagtcagacatcatcagtgactcttcttccggtaccaatttgctgtatatttcttctgtaacgaacggcatatatggatgaagcagtttcaatgattttttcaatacttcttttaatgtccataatgcatcgtttgccccctgtggatcttcctctgcatgatagatacggtattttgcaatctcaatgtaccagtcacagaactcatcccacatgaagtcgtatatcttggaaagtgcgataccaagttcgaacttgtccatattttctgttacatcttttacaaggttgttgcacttggacatgatccatctgtcagccggacggacagtaaagtcagccggttttttcagttctttatcgcccagattcatcataataaatctggaagcattccatactttatttgcaaagttacggcttgcttctacacgttcattatagaaacgcatatcattaccaggtgcattacctgtcattaatgtcatacgaagtgcatctgcaccatactgatcgatgatctccaacggatcgataccatttccaagggatttactcatcttgcgtccctgtgagtcgcggaccagaccatgaataaatactgtatggaacggtgcttttccagtatgtgcatatcctgagaataccatacggattacccagaagaagataatatcatagcctgttaccagaacatctgtcggatagaagtaatccagatcctctgtcttatccggccatccgagtgttgagaatggccacagtgctgaactgaaccatgtatccagtgtatcttcatcctgtgtaaaatgtgtgcatccgcatttcgggcatttctccggtgcgccgtgtccaactactacttcaccacactcgtcgcagtaataagccggaattctgtgtccccaccagatctgacgggaaatacaccagtcacggatattctcaagccagtgcaggtagatcttattgaaacgttccggaacgaatcttaagtcgccgttcttgatcgcttcaatcgctggttttgcaaggtcttccatcttaacgaaccactgctgcttgatcattggctctacggttgtgtggcagcggtcatgtgttcctacattatgtgaatgtggaaccacttttaccaggtatccctgctcttccagatcagctaccatcgcttttcttgcttcgtagcggtccattccggcatattttccgccgtactgttcgttgatcgttgcatcatcgttcatgatattgatttctggcaggttgtgacgttttccaacttcgaagtcgttcgggtcatgtgccggtgtgatcttaaccgcacctgttccgaactctttgtctacatagtaatcggcaacgattgggatttctctgtctgtcagaggcagtttacacatctttcctacgatgtctttgtatctttcatcatccggatgaactgcgatcgcagtatctccaagcaatgtctccggacgtgtcgttgcgatctccagatagtcatctgttccaacgattggatacttgatatgccagaagaatccgtcctgctcctcatgttcaacttctgcatcagaaagagaagtcttacataccggacaccagttgatgattctggaacctttgtaaatatatccttcgttatataatttgatgaatacttcttctaccgccttggaacatccttcgtccattgtaaaacgctctctgtcccagtcgcaggatacacctaattttttaagctgtccctcgatcgttccggcatattcttctttccactgccatgttctttccaggaatttctctcttcctaattctttcttgtcaattccttcttcttttaactggtttgtaaccttaacttctgtcgagatagctgcatggtctgttcccggaatccagagtgcattgtatccctgcattctcttataacggatcagaatatcctgcagtgtattatcaagggcatgtcccatgtgaagcttacctgtaatgttcggtggcggcattactgtggtaaatggtttcttacttctgtcaacttcggcgtggaaatatttgttatcacaccatttttcatataactttgcttcaatcgctttgggattgtaagtcttttccaggttttcgctcatagtttcctcctcatttcacacttttttcacatttttttattacatgaaaaaaccctttacattacgtaaagggcgattgtagtcgcggtaccaccttcattatacaggaaaactcttccccatatatctcatcttattctttaacgggaacgactccgggatgaactactaccgtcttatcatatgtctcaggttcactcatccggctccgaagctaccttcctacgtctcgtattccttaagtgtctctcagccgatggatcactctctctggtatggacgaacttacgtgtactcctcttcatcaatgcctttacgtataaactactgaatatgatagccatcgaatccccatttgtcaaggattttagggatttttcagaaactcttaaggagttacaccagaccgaaacatttcataatgaaaagccatcccgttaacgtaaatgcactgcacatcgtcgtcagcataactacacttgatgacacgacaccttcatgtcccatattcttagccatgacataactgctgaccgtggttgctgaaccaagcatgactaagattgcgatcagtttctctctcctgaatccgattactaccgcaagcggcatgaacactgcgacaaatcccactaatttgataaatgcggcgatcacggtcggtttgatcttgccaaacgctttcttaatatcaaaggttgctcccattgccatcagtcccatcggtgttgctacgccgccgatactgctgaccgccttatgtaagatcacaggcatcggaagtttcagcgctgaccataacagacctgctgcaataccgatgatgatcggattcgtaatgataccggtcaatgttttcttgagcagtgctttatccataccattttgtcccggtttgaaaaacgacagcacaaccaccgccataatattataaagcggtacacttcctatgatcataagtggtgcctgtccggaattaccatagatattctgaataaatgcgattcccagaagcgccgcactgctccggtaagccgcctggataaattctccctggatgcttctgtctttcaacaggcaagagattccaattgcgatcgttatactgatcaatgtaataataaaacagaaaattacgaatttcgtatcccacgcttccttgatatccacgaccgccagatcgccgaataataataccggcagtggtatccggaagacgaatttgttcatcttattagcaaactcttcgtccatccacccgatcttattgaaaaacagtcctaataccatcattaagaaaatagggactgttgcattcaaactaaacaccagattgtccattatactatatcctctcttgctttgatatcagaaaatatctgactccttattccagatattttctgatttcaaaatatgcttcatagagctgctcatacgatgttctgcagtttgccggactggtggatggtaacccgattgccataatcccagtcttcggataacagaacttcttatataattgaaacgctttcgttcccgtcgtaaagattgctttgatatcagcacattcaagtatcctgctcatatcattcggctgtggattgcggatactgctgtcatctgctcctttgatatcacatcccgccaacacatcccatactgcaataccatttcttaatgcaaatgtaatcttatcttctcttgtctccggatacgcttctccacaaacatccgatacaactttccagaatctgtttcttggatggccgtagtagaagccgacttcacgggatttcggagacggcatggttccgagcatcaggattttggaatgttcattgtagattggttcgaaattgtggatgatatgttgtgtttccatgtttgaatcagctcctattcgtgaactacccattgtctaaagccaatgggcttcctgcttcgcagacctcgtaacctactatctccacagg

SEQ ID NO: 2823 - DNA, 3361 bp, Unknown
  gut microbiota DNA sequence
cgaacttgtaaattatcacttcggaaaatattgttgttcagaaaagaatatgtgaataaaatgtatggtttaatgtcagaagaaacatttgataatataatgagagaattcaaagaagagagtgataagtaataaaaggtgaaaaaagataatggttattaagttgctgaatgctttgtgaaggagagtatactctttcttgtatccatccactcccatgcagtataataaatacaagacaatattggaacaagtatcacaccctcaggaggcaaccgtgaacgcaagaaacgaaaccacaaaatcaaccacaacactagactactacaacaaaaacgcaaaaaaattcatcaccggcaccatatccgtagacttcggcaccatacagaatcacttcctggacaaactgcatccgggagcagaaatcctggactacggctgcggttccggccgcgacacaaaatatttcctggagcaaggctgcaaagtcactgccatagacggttcacaggaactatgcaaacttgcaagcgaatatacaggcattccggtaaaacacatgctgttccgggacctggatgaaaaagaagcctacgacggaatctgggcatgctcatcaatccttcatgttccggcaaatgaactgcaagacattataaagaagatgacaaatgctcttcgagcccacggaatcatttacacatccttcaagtacgggacattcgagggcgaacgaaacggcagatattttacggatatgacagaagagacatttgcaaaattgattcaggacatggatgaattagagatagaagaacaatggattacatcagatgtacgtccggggcggggagaagaaaaatggctcaatctaattttgaggaaagaatagatacatatgagatcgaatctacgaatgtaatgaccggggacagagaccggagccggtatctatattatcaactgaaaatgagtatggcaaaggcgaagcagattgatatcatcgtctcatttctgatggagtcaggtgtgcggatgctcttaaatgatatgaagcgggcgctggaccggggcgtgaagatccgtatcctgacgggaaattatctggggatcacacagccgtcggctttatatctaatcaagagcgagctcggtgaccgtgtggatctgcgcctgtataatgaaacatcacgctcatttcatccaaaatcttatatctttcattatgaatcttcgaatgaaatatacatcggatcatcgaacatttccaaaagtgcgttaacttcaggaatcgaatggaattacagattcagtgatacactggacaaaaagaattatgagttgttctatgctacatttgaagatctgtttctgaaccattcgatcattatagatgatgaagaattaaaacgatattccaaggcgtggaagaagccggcggtgtcgagggatctggcgaaatatgacgctgcagaagagaatgaggacaagaatgctgaaaatgtccgaatgatgtaccgcccgcggggagcgcagatagaggcgttgtatgcgttacaggaaagccgcatggaaggggcggcgaaaggacttgtatatgcagccaccggaatcggaaagacataccttgctgcatttgattcggcaaaatatgaacgggtgttgttcgttgcacacagagaagaaatccttaagcaggcggcgttttctttcaaaaatgtgcggaactcggaggattatggattctttgacggaaaagaaaaggatagggataaatccgtcattttcgcatcggtagcgacactcggaagaacggaatatttgaatgagacatattttccggcagattattttgactatgtgatcattgatgaattccatcatgcggttacagatcaataccggagaatcgtagattattttcagccgcaatttttactgggattaacagcaacaccggaaagaatggacggaaaaaatatctacgaactctgtgattataacgtgccatatcagatttcattaaaagaagcgatcaacaaaggaatgcttgtaccatttcactattacggcgtgtatgatgagacggattattccggactgcggattgtgaagggtcgctatgatgagcaggagctgaatcaggcttatatcggaaatgagagaagatatgacctgatttacaaatattatcgaaaatatcgttctgcgcgtgcaatcggattctgctgttccagacagcatgcagaagatatggcaaaagaattctgccagagaggaatcgcatccgcagcagtatacagcggtgaaaatggagcatatgccgaggagcgtaacgaagctatccgcaaattaaagaacggagagatacgggtgatcttctctgtggatatgttcaatgaaggtgtggatatcgcttcactggatatggtaatgttcctgcgtccgacggaatccccggtcgtattcctgcagcagttgggacgaggtcttcgaatatataaaggaaaagaatatctgaacgtattggatttcatcgggaattatgagaaagcggggaaagcaccgctgttgttaagcggagagcagtcatttagcaagaaaggatcctgcgagtatcaggatctggaatatccggatgactgcatcgttgattttgacatgcgtctgatcgatctgttcaaggaaatggataagaagaaattaacgctgaaaatgcagatccggcaggaatattatcgtgtgaaagaattactggacggaaagcggccgagcagaatggacttattcacttatatggatgatgagatttaccggatttgtgtcagcggcagtcatgcgaaagaaaatccattccagcattatcttgatttcctgcatgaacttggggaactgtcagaggatgagcaggagttatatgcgggaatcggtcgagaattcattcagaccatcgaaactacggagatgcagaaagcgtataagatgccgatcctttacagcttttataatcacggaaatatccggcttgcggttacggatgaagaggtattggagagttggaaggaattctttgataccgggacgaactggaaggatttcccgaatgtgaatacttatgaggattataagaaagtgacggataagcagcatctgagtaaggcgaagaggatgccgattcgatatctgaaggcgtcaggggagggattctttgtggagaaggatggatatgcgctggcgttgagggatgagattggagacgttgttgggaacgtggcttttgcggagcagatgggggatgtactggggtatcggagtttggagtattatcggcggaggtatgagaaggagtagatgtgagaag

SEQ ID NO: 2824 - DNA, 25567 bp, Unknown
  gut microbiota DNA sequence
attctctgctcttaacgctgtgtttgtcattttcattttcctcctgaatttttaatatttaggtataaaaagacactccatttctggaatgccccataaaaaatagggacacccgcttttaacaagtatccctataatctatcaaatatctgatagtccactattcactttcatattcaggattttttgtgttccccgtaccgaggtctaaggcaaccacaacggtgactctctgcacaagcaacttttccttgtgattttcaccgattttgttgaaactgaaaaactctacaaagtgcgtaaattcaaggatttctagatatctttcctttgtagtcccaccacagtctccacatgcaccgtatgtggaaactgatccaccggcgtcacatccttaagttcatatccattcgcccttaagaacttcacatccctcgcaagcgttgcactgtcgcagcttacatacacgactttctccggctgcatatccacgatcgtctgaagcagggattcctcacagccttttctcggcggatcgactacgatcacatcagcatgcgccacctctccgttatgtgtcttttcatattctttataatattccggcagaacttcttctgccttgcctacatagaattccgcattcgtaatatcattgatcttcgcattattccttgcatcgtcaatggcctgcggtacgatctctacaccgtatacctgctttgctttcttcgcaaggaacagggaaatggttccgattccgcagtacagatcccacactgtctcattgcctgtaagacctgcatagtccagtgccagtccgtataacttctctgtctggaccggattcacctggtaaaatgacagaggggaaatctgatacttgatctcaccgatataatctgtgatgaactcctgcccccacagaaggcggatcgtatcgcccatgatcacattcgtcttcgccgtattcgagctgagtgtgatgcttgtcatgcccggaatctgtcggagacgtccgaccagatcatggcagtgcggaatggtctttccattgataaccaaacacaccatgatctcatccgttttaaatccgtaacggagcagcacatggcgcaccagtcccttatgtttcacttcatcgtatgccggaatttcaaatttttccataaaatccaggatacagttcaagatctcttcattcacttccacaccaagtacacagtctgtattcccaataatgctgtgtgttctgccggcatagaatccggcggtcactctgccgtctttgtctgtcccaatcggaaactgtgccttattacggtagcggaacggctgcattccttcctcgtccatgccgacaaccggatgcatgatctgatccagaagttcacccggaacttctccgatccgctccagattgccgcgtaccttagattctttaaatgcaagctgtgccgggtacttcatctcctgtatctgacatccaccgcattttctcgccatcggacagaccactttctctacgcggtcttccgacggagtcaggacattcatcaggcgggcatagccgtaattcttcttggctttcatgacctttgcctctacaacatcccctataatggtatctttgatgaacagtgtatacccgtccaccttgccgatgccttctcctccgactccgatatcttcaattttaacctttactaattcattcttctgcatcattaaataactgtctttctgatatttgattcaaacaggcggttatatcccagccagtcattaccttttttatctttgaataactctgtcagggtctgcatcttcgcatctgcattgtcagcaagattcagagccatcgcctcggcaagtgccggtttcttcggggaaccgtattccagttctccatgatgtgcaacaatacagtgttttaattcgttcgcaagtttctccggaaactccgggatattgcggactgcatctccgatcatctccacaccgatcacgatatgtcccagaagctgtccttcgtctgtgtaatcattttccgggaaagatgacaattccttcgtctttccgatatcgtgacagattgccgccgtgaaaagcagatccttattcaggatcggatatgcccctgccatgtaatcgcagaacttcacaacactcagtgtatgttccagaagtcctccggcaaacccgtgatgtaccgtcttcgcggccgaatgtcccttgaaattacggataaatgtctcgtcttttataaaataataatccagtacttgtctcagatactggttgtctactttcttaatgtatccaagcagttcctcatacatgccatctgtacttttctctgttgtcggcatataatcggccgcgatgtattcgccttcctgcacctttctgatctgcttgatattcatctgcagattattgttatagctgatgatctcaccatatacctcaatgaaatccaactcgtcatagtctgcgatcccaccggaattcggatcccacacttttccgtccagtgttccggtcttatcctgaaggatcagattatcatacggtcttccgtttctggtctccgccgaacgctttcctttacacaaatatacatttctgatcgtttccccttcgtgaagggtattgatatatctcatcttatttcctctttctatattctatatctttattttacaactgtcccggcaccaaaacatccagtccggcagactactccttacttccgactgtcacgtcaaaggaaatgtccacataaccaccggatccctgtctctgtcctttgagtctgatcttactgccgcttttctggtcccgcagtacactctggtaggctgatagtgatgttatcttcttccctgctgcctccgtaatgatatctccactctggatccctgctgccattgccggtgaatccgtctctacagtccggacatacacgccttcgggaattccctgcgcttcgatctctgccgtcacatccagtccacggatgccgatatatggcaccgcctgaccgttggataacagttcaatctctgatttcaatcctgagattccataaccggtcaccagttctttgctgctgtttccggatatgccctggtcaataattccaaccacttcgcccgacaggttgatgatcacacctgtcccgtcctctgccgcaccaatgtctgtacaaagaagcggataacttccgtcatcaccgtccagttcatttctgctgctcgcaatcgttccgaatccaaccgctcccgcataaccgaacggttttccgagaaccaccgcagcatctcctttctgtaccgaaccggaactgccaagagttgcaatactgatctgctgccatgttgactgcgcgatgctgcttttggctacagcatagatcgcaaatccaagactttcatccttcttcttcacagaagcctgcttcgttgtcccatccgcgaatctgatatggatctcttttgtatctcttaatatagaagtctttccgtatatcagaagttcctgtccattatccgcaatgatcagtccggacacactgttcttattatcataagattcttccgtccagtcctgctctcccgagataccgatgacctcaactaccgattttgcggcttcggatgctactgaattcattgctttctgaagttctctgtaactgtcaatgccaagcgtctgtactgtactgtcattgccggtatctgcagcggtttcatccgacttttcttcctctttttcttccggtattacaacttcctgtgaatctccgggaaacttttcatcaagccatggcctgagcgtagaaaaactaatgcaggcacacacaccgaacgccactccaagtcctgcgatccgaagcagatctttacggtactttttcccgcggctgttctcatctttgattgtttcctgcataaataaatactctgatttttcagttttatttccaggttcgccctgttcatttttcagatgtttctgctcatccatcagctcttccgtctcctttacaatcctttttatagtataccgtatggaatgggaatgttcaatattatccttttctttatagcgcaaataaggtagaatagttactgaccagaattactgtacatacagtaacatagaatagatccaggtgaaaaacatgaataaaaaaacattaacgaaattagaatatcataaaattattgacatcttaatagaacaggcaacctctttcggcggcaaagaacgctgcaagagattgaaacccatgacctctcttccggatatcaatactgcacaggaacagactgccgccgcatttacccgtatcatcaggaaggggcgcccttctttcggaagctgcaacccagtcggggaatctttaaagcgtctggaagtcggtgcagctcttggaagcggggaactcctgcgcatctgtaagcttttggaaaatgcagggcagatcaaagcctacggccgtcatgagactgtagacgatgcggaagattgtctggatatatttttccagcagattgagccgctgacactgatcagcaccgagatacgcagatgtatcattgacgaagatgagatcagcgatgatgccagcagcactctgaagcagatccgccgctccatgaaccagatcaacgataaagtacattctaccttatcttctctggtcaatggttcactccgcacctatctgcaggattcgatcatcacaatgcgcggggaccgctactgtatcccggtcaaagccgaataccgaagccaggtatccggtctgatccacgatcagtctgccacgggctctaccctgttcatcgaaccaatgtctgttgtaaaactgaacaatgacctgaaagaactttacggcaaagagcaggaagagatacagataatccttgcacgcttaagtgccgatgtcgcagaatatacagagtccatccgcaccgactataaaatcatgacggaactggacttcattttcgcaagagggaaccttgcaattcttatgaacgcaagtaagcctgtcttcaatacaaaaggaaaaatccatatccgcgaaggacgtcatcctctgttagataagaagaaagtcgttccgatcaccgtcactctcggtgacactttcgaccttctgatcgtaaccggaccaaacaccggcggtaagactgtttccttaaaaacggtcggattatttaccctgatgggacaggcgggacttcatattcctgcactggaccgttcggagcttgctctttttgaaaatgtatatgccgatatcggggatgaacaaagtattgagcagagcctcagtaccttctcctctcacatgacgaacatcgtctcattcttaaaacatgtagatgaacattctctggtgctgttcgatgagctgaacgcaggaaccgaccctactgaaggtgccgctctcgcgatcgccatcttaagctatctccatcagcgaggtatccgcaccatggcaaccactcactacagtgagctgaaagtcttcgccctttccacaccaggtgttgagaatgcctgttgtgaatttgatgtcgagacgctcagtccgacttaccgtcttctgatcggtatcccgggaaagagtaatgcgtttgccatcgcaggaaagcttggccttcctgattacatcatcgatgatgccagaacacacctgaccgaacaggatgaatccttcgaagacttgttaaccgatctcgagacaagtaagcgtactatccggaaagaacaggaagaaatcgagcactacaaacgtgagctggaacgtctcgaagaagagacccggcagaaacgtgacaaattagaagaacagcgcgaccgcatcatccgtgaagccaatgaaaaagcgcatgagattctggccgatgccaaggaaaccgccgatgagacgatgcgtaacttccacaagttcggcaaggcaaatatttccgttgccgagatggaaaaagaacgtgaacgtctccgtaagaaaatgaatgccacacagaattccatgaagacggatgcgaaaaaaccgaaaaagacttacaaagccagtgatttcaagttgggtgaatctgtcaaagtactcagcatgaacctgaccggatctgtcacttcacttccggatgccaaagggaatgtcaccgtgcagatgggaatcttgcgctccacagtcaacatttctgatctggagatcatcgacgaagcgccggcatattcatttgccggaagaactcgtcagaccggcaaaggtaaagttaaaatgggcaaatcccttgcgatcagtccggagatcaatcttcttggaaaaacggtcgatgaggcggtggccgaactggataagtatctggatgatgcatcgcttgcacatctcagttccgtaagaatcgttcacggaaaaggtaccggggccttaagagccggcatccacaaatatctgaagcggcaaaaacatgtcaaatcattccgtcttggggctttcggcgagggtgacgcaggcgtaaccattgccgaactgaaataaaacaaaaaaatacatctgcatatgggaggcgtatacatctatgaataaacagaaaatcctgatcgtcgatgacgatgaaaatattgccgaactggtctctttatatctggccaaagaatgctttgataccatgatggtccacgacggcgaacgggcactgattgcctttgatacttacaaaccgaatctggtccttttagatcttatgctgcctggtatcgatggatatcaggtctgtcgtgagatccgcaccagatccaacaccccaatcatcatgctctcagccaaaggcgaagtattcgacaaggtacttggtcttgaactcggcgcagatgattatattatgaaaccattcgatgccaaagagcttgttgcccgcgtaaaagctgttttacgccgctatcaggttggttcaaaacctgagacccctcaggcagataagggaaaatgtgtcgaatatcctggaattgagatcaatctgactaattattctgtcattgttgacggacataccgttgagatgccgccgaaggaactggaacttctttatttccttgcgtcttctccaaatcaggtcttcaccagagaacagctgctggatcagatctggggttacgaatacatcggcgatacccgtaccgtagatgtgcatatcaagcgtcttcgcgagaagatcaaagatcataacggctggagtctcagcaccgtatggggaatcggttataaatttgaagtaaaataacagcgggtagatatcatgaaaagtacattatatttaaaattcatatttatctatatcatattcggattcttaagcctttttacagccgcaacgctgacagagaatctggtccgtacaccgatctttaaccgtgtaagtaacagcatgtaccgggaagctacgatggttgccaccagctatcttcccggttatttttccggtgaattgcaggaatccgatacacagatgatcttatccgggattgagacccagctggatgccgcagtctggtttgtttccagagacggtaacatgatcgcctccgctcattccagtgagtacccatccgctccggatacgatcaaggattttgatcctgccgaatccggaagtgaccgttcacagaccggtgattatcacggatatttcgacaatgatgtcatcactgtgactgttccggtgacttacgggtattttccaaaaggttatctgatgatccatcagtacactaccgtcgttgatactatgacggatatattgatgcgtggtgtatatatcacattcatcgtgatcttcctgctctcgttcattatcctgctggcattccatttccttgtctaccgcccgcttcacaagatcaccgaagctgcaacacagtatgcttccggcaatctggagtatgagattccggtcacgaccgaagacgagatgggttatctgtctgcatcactgaactatatgtcttcacagcttcgtgatatggaagattaccagaagaaatttgtggcaaatgtatcccacgattttcgttctccacttacttctatcaaagggtatatagaagctatgacagacggaactatcccgcctgaactacatgagaagtacctgaagattatcttatttgaaacggaacgtctgacagacctgacacatgatctgctgacattaaatgaattcgacactaatcacctgcttctcaaccgggaagtattcgatatccacgagatgatcaaacacgtggcagcatccttcgagggagtctgcacccagaaaaagatctctattgaactgatcttcgcaacaaagcatctaaatgtaaatgccgacaaacgtaaaatccagcaagtcttatacaacctgctggacaatgccattaaattcagcgatccggattctattattaccatcgaaacaacagaccgcggtgaaaaagtatatacagcagtcaaagataatgggatcggaattccaagagcggcactcggaaaaatctgggaacgtttttacaaaagtgatctctcccgcgggaaggataagaaaggcaccggtcttggacttgcgatcgtgaaagaagcggtgcaggcacatggtgagaacatcactgtagtgagtacggaaggagtaggaacagagttttcattttcacttccgaaagctgcaggctaatgtaacagggaattatcccttatcttccaaaaaagaaagtcacttctgctcatattcacagaaatgactttcttttttattttgtatagagtatcttctgcacttcatccgtcttcagattctcttttgtcacccaggtatatccggtattcactatagcttcatttcccatatcaagagaagctcttgccgcagccaccacggttgcgtatcccatgccgaatggattctgcacgatcaatccatcaaccgtaccgtctttcagatcctggatctcatcatcattggcatcaaaaccgatcacttttacttttttctccattttatttcttttcagtccatcaactgccagtttcacagaatcaccgtttgccgcaaagcagccggtgatattcggatggttggcaaggatgtaatcgactacctggtcttctgtaatactgtctgcagccactatatcttctccggtaagctgtccatccggaagttcactgtcttttggacggtaagttccggcattgatctcgtcagatactgtcttctgcatattgctcaattcatccatgtgatatacatttaccacagaaatattcggatggtttgctgtcagttcatccgtcaccgctttttctctctgaagagcagcctgtgatttcgaatcctgaatgaacagaactgcttccccgctgtctcccatctcttctgccagtctctgtgctgcttctgttcctgcagctacattgtccgtcgatacatccgcagccactccctgataatcagacccggaatcaaaagtgacaaccgggatctcgctgtctgttgcgagatcaaactgtacctggcaagcctgcagatctacaattgagattccgaccgcaaccggatatctgtccaattcttcatccagaaggttcacctgatcatccacattatctgctttatccggtgcattatacgttacttttatcttgtcttttcctgtatatccaagacttgcattcagatcctctgcagcctgtgtcacgcctttctttacttcgtcccaatactgcgtaccattcgcctttcctataatagaaatgtagtctccctttttcagcttcagtccgtttgtattattataagccgccggactgatcagatctaatttgccctgatattccttctcttctgtcttggttgtattcttctctgcttcaatcttcttctcttcatccgttgctttcggtgtctgctgacatccgcatacaagcagtgccgtaccaagcagcatagcaatgattcgatttcttttcattttcctctctcctatatccggtatcatgtctacctgtattatattctactcctattttcacttctatttttcttatacttcatcagcattctatactatacaccaaaacggtgaaaatttgttgaattttttattgaaatttttcttaattttaaccgggatttacccaaaattcaaaagaacgtctcttttcaccaccgaatatgctttttcacaacagcatcagctaacgcaagttagttatgactaaacttttatgtatttccaaaaaaacatgtaatttacttgtttatttcagctttttgtattatgatatggacagagacaacgaattggtttatgtctagaatttaaactcaaaggagggtataatactatggcacacgtaattggtgatgaatgtgtaagctgtggatcttgcgaagctgaatgtccagtaggagctatttctcagggagcagagcattatgaaattgatgctgacgcttgtgtagattgtggagcatgtgcagctcagtgtccagtaggagctatttctgaaggctaatcattcgaaataagaagcatatacaaagaacctgccaacagcaggttcttttgcatattcaggcaaactcatgcgcagtatttatgtactgcgcatttttcaacatttttgtttccctcgacggattctgacgaaatcggtgctttcccctgtgctatgatacatttacccataagggacaagtattataatataagggggtatctaatgtgggaaatcataccaatgctttgaatactttagaacaaatcaaacgcgagaccaaagatgatgccagactatatgcatgtatcagggatctctacgaacagggtgtctccctttccgatctcaaagccctgatcccggatatcagacggaccagggaacagcttcagttaaaacgcatgctgcagaataacaacgaagtgcttctcaacatgttcagccaggagatgacatttcttctggatgcaaaagaacgccaggaagagctggaattcaaaaaactggaccagctgatccgccagcagcaatccttccggaaagcttcggccgatgccggtccagtaaaaaaactaaaacgaatcttcctgtctgcttaggttcgcaaactttgtgtactcacctaaccaggccagattaacggtccctaccggaccgtttctttgttttgcgataatgatttctgcctgttttttgaactctgaatctttgttatagtattcatccctgtagataaacattaccacatccgcatcctgctcaatggctccggattcacggagatcagaaagcatcggccgcttgtccggccggctttctaccgcacggcttaactgtgacagcgatacaaccggtacattcagctctctggcaagtccctttaactgacgggaaatgtctgagacttcctgctgtctggattcggaactcttccctacacttccggtcattaactgtaagtagtcgatgatgatgatatccagtccgtgctccagcttatatttcctgcactttgatcttaattccgagatggagatacccggtgtatcatcaatgatcagtttcgactgaccgatcacacctgctccttcaatcaacttctcccagtcggaatctttcatattaccggttctgagtgactgtgcatctacctgtgattccagtgagaacagtcggtttaccagctgttcctttgacatctcaagactgaagatagcaaccgctttattcttcttgaacgccatatactgtgcgatgttcaggacaaatgccgtcttacccatggacggacgcgccgcgatcaggatgaaatccgacggctggaagccggacagtttataatccagatcgatgaatccggtcgggattcctgtaacggttcccttactcttagatgccttttcaatcctatccagcgcattcaagaccacctgcttgattggaacatattcgccggtcgttcgtctctgtaataactggaacatggatttctcggtctgctccatgatagactccagaggttcttttccggcatagcacatattttcaatctcttcattcaatttgatcatcttacgcatcacagatttgtctgccacgatctgtgcataatatttcacattcgcagaagtcggcactgctgtcaccaggtctctgacaaattccagactggcaatctctgccggtacatctttttccttcagtcgttcctgcaaagtaatcagatcgactggttttccttcattgaacagttcgatcatcgaatcaaagatcactccatatgacgcctgataaaaatcatcaccactgatgatttctcctgcagtggtgatggcatctttatccataagcatggcgccgacaacagactgttctgcttcgatgctgtgtggcatgactcgtttgatgagtgcttcttccacgcctgaattcctcctatgcttcttcttttacaacaactttcagctcagccgttaccttcggatgcagcttaaccggaaccgtatgtgttcccagtgttctgatcgcttcttttaactgaactttcttcttatcaattgtaagatccatctgttttttgacttcttctgcaatctcttttgaagatacagagccgaacgctctgccgccttcgcccatcttgattgcaacttcaatctttcctgcttcgatctttctgccaagttcctgagcatcctcatactgctgctgagcgatcttgtcatcgttcgctttctttaatttcaggtcatttaaattctttccgttagcttctacacctttatttttctttaagatgaagtttcttgcgtatccgtcgctgacgtttacgatctctccctttttaccaagtgactttacgtcttctgtcaaaattactttcattacaagtctcctccttctatcatttcgtcaatcacctgttttaagcaggctaccgcttcatccatatcagtatggttaaactgtgcaccggaagcgttcatatgaccgcctccgcccagacgttccatgatgatctgtacgttaacttcatcgatcgaacgtgcgctgacgtatattcttccattatattctgttaatacaaatgatgccttgatcgcactgatgtccaataattcatttgccgcctgtgccccgatgatcgtcgggctttcaatgtgaagatccacaccccttgcaatggcaaatttgttacggtacacttctgcactgctgatgatctccgcttttgccctgtaagattccatatcgtcacggaacaactttcttaccagcgtaatatctgcaccggaccttctcaggaatgctgccgcttcaaaagttcggactccggtactgttcacaaagttgttggtatcgatcatgatgccggcatacaggctgctcgcctcaatcttcgggatcttgatcccatctacaatatactgcaatacctctgataccatctcacaagccgatgaggcatatggctcaatataagataacagcgcattatcaatattgtcactgctctgtctgtgatgatccaataccacgatcgtcttcgttgtcttcagaaggtcctcacactctgtcatcatcggacggttcgtatctacaacgactaccattgaattctcgtctgccatattcatcgcctgtgacgatgtcaaaaacagatcatccgggtaagccggatcttgttcgaataattcatataaaggcctgagcgatgctgacacttcattgatcacaatataagcacgtttctccagtgccagtgccgcacgatagattcccattgccgcaccgaacgcatccacatctgtcagcttatgccccataacgaatatcttatctttgaccgtgataaattcacgcagtgcctcggcttttacacgcgcctttacacgggtattcttcgctgtctgttctcgctttccgccataataggtaacaccgtgacagtccttgatcacagcctggtcgccgcctcttgcaagtgcgagatcgatcgctacacgcgcatagttataactctgtgcataagaatcggaactcagtcccagaccgatactaagtgttgccggaatcccatttccgatatttacggactttacatcatccagcagggagaacttatcttcttccagctgtttaaaataagactttcggatgataatgaaatacttatcattctccagcttcttgacgattccgtcaacttttgcaatatactgattgatcttacggtctaccagagccatcagaagtgactgtctgacctcttccacactgtcgatcacttcatcgtagttatcaatgtataccaggcctgcaaccattctctgttcttcattttccctaatcgtacggttcagttctgtaacatcctgaagatataccgcaatgaaatattccttctcctttggcaattccataagctgttccgtatcgctgaatccctctaccgatactctgcgcagttctgcctggtattccttatcatcataatatacttccatcgtgaccttctgctgatcctcttttggaaatatactccggttcaattccggaatgtatttactgatgtaagcttctccttttggctttccgcccagaattgcttcgaattcgtcattcatccagactgctttcccatcatctaacaggattgcatagggaatcgacagttccctcagcagcgtattctggacaatgccatactgtgcagcaaattccacgagatccttcatgatgatattcttactgtaaaaatacagtccgcctaccatgatgatatatatcagcacgaatacggccatcaggattcccgctctgtgatccatcttatacacccacagatccattgcgatcaggagcaatgccatgattgccggccactgaatataaagcttcaactggcctttcagctgcacctttccattttcattctttttttccatgattctcgcctctgttcgtgagtcttactcactacttttgcactacaaaatgccgatggcatctcacactacactttacatacgtgatgattataccatttcttatcataaaaagaaagatgggaaatcttaacgttctgttaagtgttccccatctttctatgtttttatttcttaagttcctttttcatttatgcttcatatccgttaggattctgtgactgccatctccatgtgtctgcgcacatctcgtccagacctttttctgctttccatccaagaactttcgctgcttttgcaggatctgcataacacattgcgatatctcctgctcttctcggcttgatctcgtaaggaatctccttaccacatgcttttccaaatgcttttaccatatcaagtacggaatatcccacacctgttccaagattgatcacgtcaagtccaggattgctgaagatataatcaattgctttcacatgtccttttgcaaggtccactacatgaatataatcacggactcctgttccgtccggtgtatcataatcgtccccgaacacacccagtttttcaagctttcctactgccacctgtgaaatgtatggcatcagattattcggaattccctttggatcttctccgatacgtccgctttcatgcgctccgaccgggttgaaataacgaagcaggatgacattcatatccggatttgccttctgtacatctgtcatgatctgttccatcatagactttgtccatccataaggattcgtgcactgtcccttcggacactcctctgtgatcggcatctcttccggacttccgtatacagttgcagatgaactgaatacaatattcttaacaccggtctgtttcataacatccatcagtgtcagagttcctgttatattattacggtagtactctaatggcttctgtacggattctccgactgctttcagtgctgcacaatggataaccgcatctacgccttctttttccagcattgccttcaatgcagcttcatccattacatccccttcataaaatgtaatcgtctttccggtaagctcttctaccctttttaaagattctttagatgaattacaaagattgtcatatacaaccacttcatatccttcattcaaaagttccagtgccgtatgacttccgatataaccggctcctccggtaattaatattttcttggccacaatagtacctcctagttgttactatactttttcacgatttcgttcatagtataccacttttgttccatatcttcaacaagcttgaactgggtacggcatctgtcaagattatgaccttctctgtgtatcctgaaatatttatctccctgcagataatctgtaaggaaacgcataccacattcaaatgtcatcgtctttgcgcccatcggcatcagctcgatctccttagctgtcagctttccgtcacatccttttaaaaatcctttcgtatacaattcaaataattccatactgcaggatactttcgtaaggtctgtctcatcctcaagtgccgtacttgcaccgaaacggatggaatccccgaaatcattcatcgcaagccctggcataactgtgtccagatcgatcacacagattcctttcccggtcttatcgtccagcataacattattcaattttgtatcattgtgtgtaacacgaagtggaagctcatgcctgtccagcatttctgcaaaacaattagcaatctcttctctttcgagaacgaaccggatctctttctctacagaagctgctcttcccataacatcttcttccactgctttcttaaacagcgcaaaccggtttctcgtatcatggaacttttctatcgtctcatgcagtgtctccgccggatagtcagacagcagactctggaaattcccgaatgccaccgcactttcataaaactgctccggcttctctaccagatcataggtacttgcatcggtaataaatttataggatctccagtaatctcccgtagaatctatgtaatatggtttcccatcaaccgccgggatcacattcaatgtctcacgttccggatctccaccattttctataatcttctttttcagaaatgatgtcactcctgtgatattctccatgacttctaccggttttggaaatgccgtagaattcattctctgaagaatgactttgattcttcccatctcggcaatctcgaataccagaagaaatgtatcattgatgtgtccgcttccgtatggacagtcctttactaatgttccttcatatttaaaatgtgcaatcgcttcatctctttgttcccgtgttacaggattcatttattttccctcccaaagatgctgcgggtacagtccttcgtctttcattctctgaatggctgcaaccacaaccggtttatcttctttataagttactccataccatttatctgcggatttcagtaccgatactgttgctttgtcttccgcaagaagattacttactacagttggcaggaaatactcgcatttcataggattctcctgcagtcctttgtcaagaaatgccgggaatcctgctttgatctcttctaagatactctttgtaaatccccacatgttcatagataccgttgtatcatccggtacctgtacccatgtattaccgtcgtcttctgtgtatgcaacgccgccgttgtacttttcgattctggtacgttctgttacggataccagttctccattctcattcgtctcacatacacctctggatacatatccgttgtccgttaccgtattggcaagatgatatccgaccattgtatatctgtacttatcatcatctgcatgtgtagacagataatcatagataagcttgaatgcttctactccataatagtcatctgcattgatcactgcgaacggtccgtcaatctcatccatacagctatatacagcatgtgctgttccccaaggttttacacgtccttccggtacttcatagccttccggaatgttgtcgatattctgataagcatatgctacgtccatgtatttttccatacgttttcccacatgctctttgaactcttcttcgatctcgtgtttgattatgaatacgaccttctcaaagccggctctctttgcatcatacatggaaaaatccatgataatatgtccgtcattgtctacaggatctaactgcttcagacctccgtatctgcttcccattcctgctgccatgatcactaatactggtttattcattataattacctccatgtctttaggatctttcgtttctagattcattgtagtataactgtttccagaaatctttgtcctattattttcttaatttgcattatttatgtggtttaattgccattttattatgtactgtttttcatcttctggcaatcccctctacccaaatattagcgaccgctttaatttgcatgaaaagtataacgatacggcaatgaagctctgtcctgatacaattcatgattcaggatctcccagagatcctggatactgtcttctccttctcttacatcatcaaccataattccttcttcactgttcagcaatttatccgcttcttcaagccttcctgtcttcacaagccccagtgcataataatattgcacccgcccgatggatttcatatcttcatccataacagcatactgctgtaaaattgccctatatgcttcgcattgactcaaaattttaagtccttctttctgatatgacagacagtgtctcttaagttccattcctctttgtgcatacaatgccgcaagatttttatttccttcatgaatacttaaacatgccagtccatgcagcgcccatgcgttctcctgaagtttcaatgatgtctcatacatttcttttgcaattttatcatttccttttcggaattcaagaattccaagatgataatatgcataccagttttcataattcggtgctagtggtttcagcgtcgtctttttcagataagccagaaattcttctccactccagaatgcatccggttctgtctctgggtccggacaatgaagctctcctgtctcaaaaaaatgttcccacttttccatactttccgttttctttacaaatttcaaatgacccgttcttgcgtactctttgcgaaatgcaccataaccacttcccggagtaatcagttctgcctctgttaatgccatcttttttgttttcttcaattcttcttccagtttcccgatcagctgagttttttgcagatagtctgttatgtatctttttctttcttcaaatgatttatcatatatctctgcagtcagttcttctgaatatgccggtccgtaacattccatccattcccacgcagtgtgtggtgccatcggaatacatccatactgtgtctttccaagtcccgcctggatttctacatagcgccctgcatcttttgtcaaaaactcctgccaatgatcagatgctgcattacttccccatgaaaacaattttcttcctttcagtcttcctgtcgaaaactgtaaaagcccttttccgtttttatctacatttacaatatatttcggctcgttttccgggatattaaagaaataatcaatactccgtggaattttctgataatccgaaacatccacaccatccacttctggcaaagatactttacgacattcaacacctgttcctgcatatgcttctgatgcaggaactgttatatgtccctgttcatactccggaaccgccatattgctccaccaatacatcggaatcacttccgtactttcattcactattctcattctacatttcaaatatgaagaatcatcatccagccaaaaatccatctgccatgttacccctctgattctttcatactcatacattctcagtaccggttctccttcatcggtatgtgtctctgcaacatataatggttctgtcgtatacggctgatgtcctataatgccaagattccattccacgcctcccgaaaaccaggcatttcgtaccgccaggttactgaactgtaatacgtcattcgtataaagcagattcctgttttcatttttatcccaaagttcccataatcttccaccataatctggaagaaatactgccttgagctgattattttccaatactgccgtacgaatttgcttttctttcaattgccttttgtaattatttctctgacgatatggataagaatccgctactttcccatatccttcataaatttcatctgtttcatccaaatagaactttaacgaattctgcagaatccgttctccaagaagatctggtacacatgactcttctcccaaatctgctgcaagcatatttttccattcaaatcttaattctgacataatttttcctttcttcgcttcaaataaaatccacaggacttgccagtggcagtttctcccgtatgctttaatataaaaatgaagctgtcaaccatgactacctccttacatggtataacagcttcaccacctttctactacaaggttctctctatcccttgattcctcccgttactccacctataatcttctctgataagaagagatacagaataaaggtcggcaggaatacaataacaactgctgcaaacattcctgcccagttgcctgtatactgcatagactggagcattccgtacaatccaaccgctaccggccgtaatgtatcgttgtttgcaaagatcaatgacaggaaatattcattccaaatattgataaaattgaaaatcgtaactgtgacgattcccgactgagccatcgggaacataatcttccagaatgtcttcgttggagggcagccatcaattgcagcggcctcttcatatgttcgagacaggttcgagaagaatgtcagcagaaaaattgttgtatatggaatgttgattccaatatacagaaagatcaatgttactttgctggcaaatacactgttcaagattccaagattggcaacgatactaaacagcggaagcacgatcatggtgatcggaattcccattgccgatacaaaacttgtctgaatgattttatttcccagaaatgtgaatctcgccagtacatatgctgccggcgcacagatcaggatcagcaggaaacatgatatcagggaatataacattgagttcataaagaacgttgccacaccaccagatccccatgcctgtatataattttcaaaatgcagtcctgtagggaactttaatgcttttcctgcgaaaatgtcagttgttgttgaaagactcgctgcaagaatccatccaagcagcataaatgtaaagataacccacaagatgatcacgatatatccaggagccagtttcatttcttttttccagttaattttctgtcttacttttttttctttttccataactgctcctcctttctaaaattcaaggtcatcatctttgatcaatttgttacagattgagaatacgatcactacacatacgcacagaataataccgattgcagctccatatcctgcatttctctctgtcaccgcattacctgcgccaaatgtatgcatatacatatactgtaccggtacgattgttgccttatctgccgtaaccgttgagaataattgcgaccatacaaagaatgctgctgtacttactgtccacattgtaatatttgttttaaatacaccttttaaaagaggcactgtcatatagcggaactgctgcggtttattcgcaccgtcaattgttgccgcctcaaaaagatctgggctgattctttcgattccgctcatccagatcaacatatgatatccaatcattccgaagcagtatgcaaaaagcaatgcccagaacttgtgatcggaatccagccatggagttttcgcaagtttgtgtaatccaagcgaatccaaaacgccctttaaaagtccgaatttagaactgtatacatactgcagccacatggttgcaagcgctaccgcacttacgatattcggaagatagatgattgcacggaagaatttctttccgcgtattccacttgtcaggattactccgaataacagggacaccgataatacgatgattccacccaatgcccatattttcaaaatgttcatcattgctgttttaaagatcgctgtcgtaaacaacttctggtagttgcccaatccaacaaatgtccaccattccattgtatccgttactgactcgatcttatacatactcatcataatggttctgataatcggatacaggaatactatgaggaagatgattactgccggggcaagaaacccaacgatcatttttttattcttcttcacgtatatgcctccttttactaaaatatggtggccgcgtagtaaccgccctgccaccatattgatcactatctagtctcttttctttactgtctgattttattgtcctgctgcttctttcattgctttgatgaatcctgctgcgtccagtttgcctgaagcaagtttctgtgtgttttcctgaagcacaggtgtgatatcattgttgctttctacacctgctgcccagtcatagaaagttgttgttgcatcgaatgcttcttttactcctgagagttctgtcggccatgcatccgaatttgctttgtcagttgggatacaaagagcatcttctgtcatcttcttatcatactcacctgttgtaatgtactcgataagctggaatgctttatctgccatcttagaatccttgttaattgcaagtacctggtttgcaatgttgttagctgtattatcatcttttccgtctggaactgatggataattgaagtaaccccattcaagatcatctgctacagaatcttttgcttcatttggaagccatgatccacagataacgattgctgcatcaccaggagcgaattcctgattctgtcctgctggatatttgtttgttgcgatattttttgagaaataacctttcttagcgaaatcagcaaaactttctgctgctgctttaactttttcatcatcccatgttacagattcgccattgtattcttctcccgttaccagagattttactccatcctgtccgatatatcttgcaaaatgatatccgataaatgatgtcagataagcatcatctgctgtaattggtgttattcctgcttcttttaattttgcacaagctgcatctaattcttcccatgtagttggtacggattcgattcctgcttttgtaaataatgtcttattgtagaagaaaccaaagatagatggctgatatggaatgctgtgtaatgcatcatctccatcgtgtgtctgaccatatgcgttacgtgcaatcttgaacaatgtctcattgccgtgctcagattcataatccttagccatatcttccagatctaataagtattttccccaacttccgtttacacggttaacatcttcatcaaacaaatcaatctgctgttttgcgctcaaagccggctcaagtccctctctctgtccggtacgtcccttgaactgtacatcaaccttaacaccagtatctttttcatacttactgatagcttccttgataacctttgcctgtggttcatcctcactccacatagcccagtatacaagtttgtccccacctttgctgcttccactgtctgaacctgatttacttccgcatcctacaaccagtgaagctgccattgccacgcacagaagtgcgctcacaattttctttttcataacacgtttcctcctatttcgtatcgtttgttgttaaatctattctaatacaaatttgcacaaaaatctttgtcttatagaactctaaatttgcactatctgcattagttgtttgattttcgaacaaatttattgtatcatattgtgtagattttacaaaatattattttcgcagactcgtctttatttgtaaaatatactgtaaaacatatacgcaaaggagaataagcatggcatactacggagtggatttacataattctattactttaggacgaatcttcagtattcattattttgaatatatgagtgatttcagctttgaaggagaatctcacaacttctgggagtttgtctgtgtcgacaaaggcgaggttgatgtaaccagagaaaaaacgcatatgatattaaaaaaaggagatcttgtttttcacaagcccaatgaatttcataatgttaaagcgaccggcaatattgcacccaatctggttgttatttcttttgaatgccatgatgatgccatgtactttttcaatgacagaatcttgcggattgatgagatagagcgtaatctgcttgccaacgttataatagaggccagacgctgttttgactgcagactggatgatccttatctacagaatatgcctttaaaagattctaatacatttggatctcagcagatgatcagactctatctggaacattttctgatccacctgatccgccgctattccaatcctgtcgtgcttcagaaaaagctttcaaaagtagatgccccaaaagctacaaaaagtaaaagcgatgccgaagttttcaatcgtgttaccgactacctggaaagtcatctgaatacgcatgttaccatcgatcagatctgcaaagacaatctgattggacgttcacagctccagaagattttcaaagaacattgtgatcttggaatcattgaatatttttcaatgctgaagatcaatgctgcaaaagaattaatacgtaccaagcaattaaattttacccaggttgcagaacaccttgggtatacctccatccattatttttccagacaattcaaaaaagtagccgggatgacgccatctgagtatgcatcttcgattaaagctatggcggagggggaattcaaataatttttcttggggtttaatttattaactggggaagcggcctctcagtccttgaaggaaacaatagataaggcttcttgttcaggttccataccataagaaacactaagagagtcagaatcacctaaaagcaaaggaactacgctcaaactcggcattcgcctcaaacacgttcgcttcgttcctttaacggtgcttctgactctccaactgtttctaacggcattccacattcacaataattcttatctattgtttccttcaagtcgtgactggcaacggatgttaataaatgaaatgcccggaagtgtaacccggcggaggccactacggttacgcatttgccatttaagaaatgttatgttaatatacattcatcgacagctattctgtctgtcggataaattcaaaatatataagaatcgggtcttgtatatttcaaaatagcgatagctattcgtgagggaaatcagaagataattcacagaaaattttgaaacaaaggaaaaatgagaagcatatttgcacgattgatgttgcagaaaaaatatattttgcttatactaaaagtaaatatccgggattttttcgtgcaaagtgcggaaaggagtccggatgggaaaagaaaacagagaagtaaaaagtagtgtactgg

SEQ ID NO: 2825 - DNA, 591 bp, Unknown
  gut microbiota DNA sequence
gatatttacggattatttctataaattcactatattcccgtattatcggacaacgatccaacaattcatgtcctgcttctggattgatattaatcacccggactttcaattccagcataggatcattactcttcgtttcaaatgcatctgataactttaatatcttctctttttccataaaatccttgccattatacaatgtataaaattcaggtgtaggaaaatgaacctgtcctttcttatacctgtcttttatcggaattaactgttccaatactcttccgatatacataagttctctgagaggcatgttgttattcaatgtcgactgatgttctccaagaactaaaacctgatctcctgttttgaatgaaaaatcatttttaaaattcatatatacaacattttctactcgcagtttcttaatctctatattgttcggtaactgctcctcatgtaaggcattataaaaagaacgttcattttcttctgcagattcatcttcatacatcaaatctaccagtacactactttttacttctctgttttcttttcccatccggactcctttccgcactttgcacgaaaaaa

SEQ ID NO: 2826 - DNA, 47416 bp, Unknown
  gut microbiota DNA sequence
gtaaatactcacttcgttcgtgcttccttctttatttatgctcgttagaactgttttaagaatctgatatcattttcgtataacagtctcatatcatcgatctcgtacttcagaagtgcgatacgttccagtcctacaccgaatgcgaatcctgtatattcttccggatcaattccgcacatttccagtacgtgtggatgtaccataccacatccgaggatctcgatccatccggatcctttacagaaacggcatccttttccaccgcatttgaagcagcttacatccatctcggcacttggctctgtgaatgggaaatgatgtggtctgaattttgtctttgtgtcttctccgaataattcttttgcaaatacttccagtgttccctttaagtcagcaaatgaaatattcttgtcgatgatcagtccttcgatctgatggaaagaaggtgaatgtgttgcatctacttcgtctgaacggaatacacgtcccggtgacaggatacagattggaagctttccctgctccataatacgtgcctgtacaggagatgtctgtgtcctgagcacgatgtctttattaatatagaatgtgtcctgctcatcctttgccggatgtccgtccgggatgttcagtttacggaagttgtactcatcatactcgatctcaggtccttctacgacttcgtatcccatacctgtaaatacacgctctacttcttccagtgcaattgtattcggatgacggtgtccgacacaatttttcttagccggaagtgtaacatcgatcacttcttttttcagcttttctgcacggattgccttttccatcttttctttattttcttccagaacagcttcaattgccgcccttgtctcgtttaccatctgtccgaccttcggtctgtcctccggtgcaacgtctttcataccttttaatacagcggtaagttctccctttttaccaaggaactttacacgcacatcattcagtttttccggcatatcggcagcttcaattgccttcaatgcttcatctttgatgttctgcagtctttctttcatcattttcttcctttctccgcatatctttatatcagcgtatgctttttggtattaaaaaagccccgccccaaaagggacgagacatataacccgtggtaccaccctgattcccgtaaaaacttttacggacactcattattgcgtaacgtgcatcatacggcgttctctactgttatttcaagaacacagctcacgcgggaaattcatttaccatctgaacccaagggaactttcagcctgttgattccctctctctatcggaaaatggctcactacttacacggtcattgcctttatctcataatacctaattattgtatcatatggctcagagttgtcaagtcagaaattctacccctgctccatatcccgcaaaatcatatttacttctccacccagcagtaagatatacatacaaaaatacagccacaacatgatcaatacaatcgttgtcagactcccatacattgatgaaaatcctttaaaaatatccagatagaccgagaaaatccaggatacgatcatccatccgactgctgaaaatgcagctcccatcagctggatcctcaactgtacaatgtggttcggcaggaatttatagatcatcatcgtaaatacaaacagtaataccggcgtgatgattccgcgaatccgcatgatctgatccaccaagcgttccatcaccggatagtgttccgttacaaacagattcaacgtattaccgaacaccgataataccagtagaaaaatgatcacaattataaatgccactgtataaaaggttgcacgtattcgcaaaataatataattacgtgtctctttacagtcatagacacagttcaaacctgtcgtcagtgccagcacccctttcccggctgaccagagtgcaacgataatagtcagcgagatgattccgccggactgattataaacctgattaacgatcgatgtgatcagactgtctacggattttggaaacacctgaagaaccgctgtcataacatctgccttcgtaaccggtgtatactgtaccaatgtgatcagcagtaaaatgatcggaatcatactgagcataaagaaatacgctgcctgtgcagcataggcacctacatgatcttttccgacctgtccggttatttccattactttatcatatagaaacttaacttttttcattcttatctcccaaaatattcgtctctatattctacccgattttcatttatttgtctattagaaattattctgtttcttgttatgttttttcaaatactttttcattgattatacttatcattcaattgtcgttccgggatagaacatttgcagtatttgctgataattctttcctttttttgccatttcatttgctccgttctgactcatgccaataccgtgtccatatccaccgcccttaatcttgaaggtgtttcctttcttttctactttaaaaaaggcactcggaagaagtctgcttccctttacagctgtcccgtcctgtttctttatctcatatccgcttccccccagtgctctgcggatcttattttccgtatcaacaacaactgttcccagatctcctgatacttttatctgtaacgctgcaccgcccggtccgcttttcgtcacctccagtgactgcacagttcctatattcttttttgtattctctgcgatcattttggacaatctattctgatctatatctgcttcccaccggtaccatggaagatttctctcataatcacctgtctgatctttcacttctacagactgaagatatgcattttctgccttctctttcgctccccacgcagccatcgttgttgtctttccgcaggaagtcgaatagtaataggcggttataatatttccattatatttcaatacttttcctgccgtctcctgtacagcctctgttgcagcttgttgcgatgccgaattattatacacctggtaatccgtactgtcattcacatgagcctgatattccggatatgcataatccataatctgccggtatgcataacttcttgcgcatatcgcctgggccttcaatgcttccttctgatatgatgcgggcatctcactcggaaccactttacacagataattctccagcggaagttcatttaccatcacaaccccttctgatgtagcatacagatccaacgcacctgcataagacggattcccatagccccgcctgatactgcgaactgttatctctccgccatcaattgactgtatacggatctttccgttttgaaatcccgtatcttcttttgtgatcttaattttttcatttcctgcagtttcttccgggccatccttcttttcaattcttaagcctcccgctgcactgatttctacctctctatgtacgatctgctgatatccatctgtcatgatcaatacccggatatttttctgaggatccgcatctttttccggggtcttgtctttactttcactttcttcctctctgtctttcgatgatactgttttccacaattcttcccaccggctctgaatcgatattcccggataggactccttctttccggctgcatttttttctaacccggctttcagccctgtaatcagacacagaagcaataaaatccatgcaatgtagatgctataatgcctgttgttccgttttcgcactttattttcctttctttgactgtctttctcagatccgcttacctgaacctgatggcgatttcaaaaaaagacagccgttaaaacgactgtcttttatcttttgtatattccccaaaatgccggttcctgtattctgactcctagcacccgctaggtgggtatccgcatctgcttttctgccttccactgcaaaatcgatggcctgacatattacagagatgtaagactcccgtttaaagtattgtaggttcaaaactacaagagtatcgaacatttcaggtttccactgcacttattataacccatttacatggattttacaaccctttacaattctctgattttaatcagatagataagtgtctcttataactgtggtcctgctgaaactaaagctttaccagcttcatttccttcatatttagcaaagttcttgataaatcttgcagcaagatcttttgctttttcatcccactcagctgcatcggcatatgtgtcacgaggatcaaggattcctgtgtcaacaccggtaagttctgtaggtacttcgaagttgaagtatggaattgtctttgttggagcattcttgatgtctccattcaggatggcatcaatgattccacgtgtatccttgatagagatacgttttcctgttccgttccatcctgtgttaaccaggtatgcttttgcaccgctcttctccatcttcttaacaagttcctctgcatattttgtaggatgcagttccaggaatgcctgtccgaagcaagctgagaatgtaggtgtaggctctgtgattccacgctctgtacctgcaagttttgctgtaaatcctgacaggaagtagtactgtgtctgctctggtgtcagtacagataccggtggaagtactccgaatgcatcagctgacaggaagattacatttttagcagcaggtgctgaagatacaggacgcacgatattttcaatatgattgatcgggtaagatacacgtgtattctctgttacactcttatctgcgaaatcaatctttccattttcatcaagtgatacattctcaagaagtgcgttacgcttgattgcattgtagatatccggctcagactctttgtcaaggttaataaccttagcatagcatccgccttcaaagttaaatactccgttgtcatcccatccgtgctcgtcatcaccgatcagaagacgcttaggatctgtagaaagtgttgtctttcctgttcctgaaagtccgaagaagattgctgtattctctccgttcagatctgtattggctgagcagtgcatagaagccattcccttaagcggaaggaagtagttcatcatagagaacatacctttcttcatctctccgccgtaccatgtattcacgataacctgctctttgcttgtgatgttgaacattactgctgtctctgagttcagtcctaattctttgtaattttcaacttttgctttagaagcattgtatactacgaagtctggctcaaaattctcaagttcttcttctgaaggtttgatgaacatatttgttacaaaatgagcctgccatgcaacttctacgatgaaacggattgccatacgtgtatctttgtttgctccgcagaatgcatctacaacataaagttttttgttagaaagttctttgattgcaatatcttttactgcgttccaagcttcctgtgttgcaggatggttatcattcttatattcatcagatgtccaccatacagtatcttttgaattctcatcaactacgatgaacttatctttaggagaacgtccagtatagatacctgtcattacattgactgcaccaagttcactttcctgtcctttttcaaaaccttccagttccggttttgtctcttcctcaaataataattcataagaaggattgtgcacgatttccgtcgttcctgaaatgccatacttacttaaatcgattttagccatcttcatttaacctcttttcttttatttactgctgtatatttataaattctggtttttcatactcttccacaacagcatttgccttattattgcatttttccgcgcaaaagtcaacactttaacaatcttttcaaagcactattttgcaacttctatatctcaatccgttattttttctgcttttattcttttatatagtttaaaaatgcaagatttttatagaaaccttgcatttagtaatttttatcgattatgaattttatttatttttaatataaagttttatacttctaaaatattctttactgtgtctttcattttatctgcatcacattccagatcatgcaggatattagcattcagaatatctttgattgcctgtggcatctcacgtccggatgtttcttccaaaacactcagaaggctgaattcatcctgatcagcatacttcggatcgattgcgctcatcacactcttcacgaatttgtacggacttgcagtcgatgcgatcacacatttcttatcgtcgccactgttcttctgataacagccgcatacatacgacgctacacttgtatgcgtgtccataacatatcctgtcttattgtatacttttttaatattctctgcgcactcttcttctgttgcgtaccctgctgcgaaatcagcaagacgctccttcatatcttctgtgatcgtatattttccggcggattttaatgcttccatcatatccttcgtcttctgatcatcatccccgctgattctgtagatcagacgttccagattgctggagatcagaatatccatggatggggatgtagtgaggataaactcacggtttctgtcataatctcctgtctggaagaagtcaaacaataccttattgtcatttgaagcacataccagcttatcaatcggtactcccatctgttttgcataatatgcagccaggatatttccaaagttacctgtcggtactaccacattgatcttttcaccatcttcaatctcttcattttccagaagttttgcatatgcattgacgtaatataccacctgtggaaccagacgtccgatattgatagagttggctgatgaaaactgatagcctttctttgcgagttcttccgccagttctgtatcttcgaacatcgctttcacaccactctgtgcattatcgaaattgccatggatcgctactacgtttacattctctcctctctgtgtcaccatctggagttcctgtaccttgctgacaccattctttggatagaatacgatgatcctcgttccttccacatccgcaaagcctgcaagtgcggcctttcctgtatctccggatgttgcagtcagaatcacgatctcatttttaacgtcgttcttctttgccgaagttgtcatcagatgcggcaggattgataatgccatatctttgaatgcgattgttgcaccatggaacaattccatgtaataagtatcatctacttttacgagcggcgcaatttcttctgtgtcaaatttgctgtcatatgctttatcaatacagtttttcagttcctcttctgtaaaatctgtcaggaactgcttcattacgagatatgcgatctcctgatatgtctttcctttcagatctgacattgttacatccagctttggaagttccgatggtacaaaaagtccgccatccggagcaagtcctttcagaattgcctctgatgctgttactttcagattagaatttcttgtacttttgtaatataaacccatgccaacgctctccttattatgattactttctcttactgtttgtatattttaccagtccgcctgctgcgatcagtttctgcatgaactctggaaacggctgtcccttgaattctgttccttttgttctgtcatagatcttaccgctgtcaaaatcaatctctacttcatcacctgcttcaattgcttttgcagcctccggacactcaatgatcggaagtccgatgttgatcgcattgcgatagaaaattcttgcaaatgtctctgcaataacgcaactgacacctgctgtcttaagacataacggtgcatgttccctggaagaaccacatccaaagttcttgttggcaacaatgatatctccaggctgtaccttattgacgaattcaggatcgatatctgccattgcatggctcgcaagctcctgtgcatcataagaattcagatatcttgccgggatgattacgtctgtatctacgttatcgccgtatttaaaaacatgtcctaaagctttcattatttgtcacctactttctctggatttgcgatgtatcctgcgatcgcacttgctgctgctacttccggtgatgccagataaatcagagaatctacatgtcccattcttcctacaaagttacggtttgttgtagatacacatttttctcctgctgccataacgcccatatgtccacccatacaaggtccgcagcttggtgtattgactgcacatcctgcgtctacgaaaatttccagaagaccttctctgatacactgtttgtatatcttctgtgtagccggaacgaccataacacgtacatccggatgaaccgtatgtccctgaagaatggcagctgcttttctcatatcttccattcttccgtttgtacaggatccgatcacaacctgatcgattttgatcggttccattgcctcgatctcgtcaattgtcttcgcatttcccggaagatgtggaaatgcaacggttggacggacttctgaaagatcaatctctacaatactttcgtattccgcatcttcgtccgcttcatatacatgatagtctttctttgtatgttcttttaaatattcttctgtcttctcatctaccgggaagattccgttcttggctccggcttcgatcgccatatttgccattgtgaatctgtctgccatagaaagattcctgattccgtctccggtaaattccatagatttataaagtgcaccatctacaccgatcttgccgatgatatgaatgatgatatctttaccgcttacatatctgcccggcttccctgtcagtacgaacttgatcgcactcggaactttgaaccacagttctcccattgccatacctgttgcaatatccgtcgttccgacacctgtcgaaaatgcaccaagtgcaccatatgtgcaagtatgcgaatctgctccgatgatacattcaccagccgcaaccactcctgcttccggaagaattgcatgttctacaccggattttccctgttcaaaataccagctgagtccctgatctttggcaaactcacggattgcttttgagttctccgcagacttgatgtctttgttcggtgtaaaatggtccggaacaagaactactttatctttatcaaatactttatctgccatctgtctgaagattggtaatgccataggacctgtaatatcatttgccatgactacatctaattttgcttctattaactgaccggctgtcacgctgtcgagcccagcatgtgctgccaatatcttctgtgtcatcgtcattcccataacgaatctttacctccttgattctcataattttatactgtattttagcacagtaaaaaagggcatgcaagaaattataaattttaatgcataatttttcaaaaatacatcttctttttatttctgtttttttatattatgcaggtatggaatttcaatcggatcaattggtgttgccggattttcaatctttcctttcaaggttcttttccgttttttcagaagtgccccgcccttattatagaaccagaatgaatacgtcaggatcttatgcgccggtcccatcttgtctttggctgtctttccgtacaacacgcctccggcctcgattgccgctttactccgtatcagggcgatcagttccgtctcacaggtcactctttccggaagaatggtatagcctgtccctatgcagtccggtctgtgtgcgtcacttccgccgattcccggctttttgtatttctctgcaagcttccttgctccttcattcgattctgctgattcacatgcattaaacgcctcaatgaaatcaaaccttttgatcagttccggtgatttataaaaccttcccgtattagtaaaactcagatacttttccccgcatggatgtgccggtccgaggattcctccgtgtctgtgcacaaagtcaatcagaaccgacaccgggagtccctttacttccagaagacgcatctttacaccttccggcataatacaaatgatatgtcccgcatccagagtatcatactcgattcctttcaacacaacaaaatcttcatgtaccttgcctttcatatgatatttccaatgacgataaccatgatacgtatcgtgatctgtgatcagcatcccgtcaaatcctttttccttcagggttgtgatgtattcatccaagcttaccctgctgtctactgagccttcccgcacatggcaatgcatatccaatttcataagtaagcctccttaacttaactttattcttagcaacattatagcacatcccatataacaaaaatacccgttgcagatcttaattttctgcaacgggtatatattttttgctttagtcaatatcatccgcatgaagaactacgacatccgaatcgtctgtctcgaatatctcgacatcatcttcatccaggaatccgccttccggcacatccgtcattttgacatctacattttcctcatcatctgtatcttccggctccggcttatcatcgtctatgtcaaatatctctgtcaccgtctcttccggttctccctgatctccggcttccgtttcttcctccggagattcttccacatctccatcatcgagaagcattctggccttttctacttccgattccatcgaaacctgttctttgatctttttcgaaaatattttttccctctttccgatctttctcgactgcatcattgtctgaaccgtgatgccaattacagcgatcgctgcactcattacatatccgatccagccaatctttgtcatcccaagaagaaacggaagcgccattcctgcttccactcctcctacaataccggttacaaagatgaccagaaattccgcaaagatgactgtcagtattgcgatgaccagtgcaaccgctgcgcagattccaagtactataactgaccgcgcttccacaagggtaacaaatgtcccccatgatccaaagaaagtcataacaaatattccgaattttcgtagtactgcacacatgatacacaataccactccgcacacggcaattgtcgcaaccatctttgtcgtatcaagacctgccactgttccgatcactgctccgatcactgctccggttccaagtcccatcatcgccgaaagtactcttacaagcttcagaccaaacaatgaaataattacacccactacaacaatcgcaatcagcacacccattatttccggtgtcttccctgcaacaaatatactcgtgggcccatctgccgaattaaaaactgatgtaaagttctccatattcatacccgtttctcctttgccccttattacgctttaagaatagaaaagactgtgcctccgaagattcacagcctttggttcattatatccgcctctagaatgctactgctcctgtctctgttccattaataacatagtatactgcagattcttctggttttatgtataactccatcgtcttgatatctccgattttctttccagaagatgtccatgccttctttactcttgcgatcatatctttttcttctacctgttttccaaagtattctacaaacgcacttactttgatttctttttttgctgttgtttttctcgcagttgtcttctttgctgtcgtcttctttgtggtcgtcttctttgccgctgtctttgtctcagcttcagctttcttgacagattctgtctttacaactttgtcttcaacttttttctcggccttctttgcttccggcttagctgtttcttcttttgtagtcggttttactggctcggtctttggagctgctgtttttaccggctccctctctatcttcttcggctctgttgctgccactgcctttactgtctctgctttcttcgttgtctctgctttttctgatgtctttgtcactggtgcagttacttttgcagttacatcctttgtggttgctgttgttactttttttgtagccatttcatttcctcctaaatctctctaagcctcatcacctagttgtcaatattataacacattcttccaaaaatgcaattctatgccacagacagcattctacactccggtcagctccaggatcagacctgcgatcacagcaatcacatacaatactgctataatttttatattttccttcttatccggattcactttgaacaatactacaagcccgataccggctcccgtgcaaagtcccgcgatcacagaggaaaaagaaattgccccgctcagatacagctgtgtcagaatcacggacgccgcacaatttgggatcaggccgatcaaagccgcaattgccggctggaacacagtatctccaagcatcatagctgaaatcttgtcaattccaagtatgtcaatacacagatttaaaataaacgtaaatacaaacagatataaaaaaatctttcccgtatggcgaagtgcaggttttactattccagccgaatgattgtgacatccacagtcatgacagagttctccttcatgatgcggcactgcaatttcttttttaaagaaaatatctaccagatatcctgcaataattgctatgatcacttttgccagaagcagcacaccgatctttcctgcatgttccggatttcccattataataagtattgcctcatccgatgtggccagaaacactgcgatcaatgttccaaccgtaatgattccgcccgaatacagatttgctgccataaccgaaaatccacactgagggacacatcctacgattgctcctacaaccggtcctgccttatctactttcaccatgagtttttttgtaaaatcactggaataatgctccagtgcctctatcagcagaaatgcaagaaacaggaatggaagcatcttcacacaatcgattgccgcatccagtaatacatcaataaacatttccatatctaccgtctctcctttaatttttttcataacatttttattctagatgttatggtcgtatttttcaagcaaaatatgtagtcttactttgtatatttttctcatttatcctgtaattttcagtcttttttctgtataatacattatatatagactttttcacagaaaggatgtggccatatgagtacttttgaacgatccctgtatatttaaccgtaatatttttcataatatgcctaacatgcttatgaaaatacttccggattgcaaagagtatgaggatattgtaaaagtatgccatacagaaggcatgcatctgaaattatattcagatattcagaatacagaaacggtacttggatttgaatcataatgtttaagggcaataagaaatgagcgacatacgccgctcatttcttattacatctttcatttcattgtccgttatcttttatagattccttccagcacattaaccgttccttcgattccaagaaggcttgcattcagtaatatgtcatgagaactgatgcttccccattcctgtcctgtatgagtttcataataatattttcgttctctgtccatacgtttgatgcgatccagagctttcttctcagacacatcgtatctttccgctatacgtttgatgcggtcagcccggtcagcacagatgaaaacgttaatgcagtttggattgtccttcaggatatagtctgcacatctgcccacgatcacacatggcccacgttctgcaagttttttgatgatctccgtctgcagttcatacatctgctcagataacggctgcacatattcttccgaattaatataggaagaatatcccatcggtgtgatcagataactggatacgaaactgttaagagaagtctcatcaattgcctttgccgtctcttctctgatatccatcttctctgctgccattctgacaagattgttatcatagagtggaatatccagtcttgttgcaagaagattgccaatctcatgtccgccgcttccaaactgtctgcctattgttataatcttatgtgtcgtcataggtatccctccttcggatgaaaatatcacgatttctttgtccctattatacctgtttccgtcagaaaataccatacgtttcattcgattattctgtcaattttacactacctgtcgtctttcctctaccagaaatcctttttccctcagttcctgctcgatcagatccagcgtctcttcgctgtcagcactgaccttatgataatgataattagatgtgatattcttaagcggacttgacttgccactccggatatcttccataaatgcgccaacctttcttctggaatttaagaccagttccgcttccatttttccatagactctgtgatggatcattacattatccacacatcctcccagatcaacgatcgtattcagttcttcttccagttgttcatccgtatgctggactttaaatatccggcacactgtcttcggctgattcaatatatagccgcggtttgtagatatgatctcatatcctgctgcccggatcagtgcaatatcctgcacgatcacctgacggctgacattataaaaggaagcaagctttgttccggataccggggctttactttcctgaatctgtctgattatctgctctcttctttcagatccatgcatttcctgttgccacctcccatgttctttttctaaatgatctgcctgtccatgtattttctctatacacagtaactacattataataccgcatgaagatgctttaaggaaatgtctaaaattggagcagagtgtgtcaatgccccgctggaaatataatctacaccaagcgcagtcagtctgccgatattctcttttgttacattaccggaacactcagtctccgcgcgtccatcgatgatgcgaattgcctcctgcatctcctctgtggacatattatcgagcatgataatatctgcccccgcttctaccgcttcttttaccatatccagattctccacttctacttcaatcttgcgtacaaatggtgcatattctttagccatctgaatagcctttactacacttcccgctgctccgatatgattatcctttaacagaacaccgtcagacagattataacggtgattatatccgccgcctgctctgactgcatatttttcaaaaattctcatattcggagttgtctttctggtatctaaaagttttgtcttgctctctcccagaagtgaaaccaccgaacgtgtataacttgcaatcccgctcattctctgcagataattcagtgcaacccgctctccggaaagaaggacacggatatctccggttacttttcccattaacttcccgttctttacttcatcaccgtctttgcagaaaaattctactttcgtgtctttatctaacaattcgaaaactctctgaaatacctgtaaccctgcgatcactccatcctgcttgcagatcaggtctacttctcctgttacagcttcgtgcatgaccgcattggtggtcacgtcctcgcttgaaatatcttctcttaatgcctccatgatcagatgatctacctgtaatgtcattgttatattattcatgctgtgctcctttaccctgctttatatttatctctttcatatccgtgcattcacactctgcactcattataccatcttacactgcttttcgttcagacaaatttttcttagtttcttcctttttgatctttgttgctgcacgttttgcaaatacaagactttccaaaagggaattacttgccaggcggttcgcaccatgaacaccattgcagcttgtctctccaactgcatacaaatgctccatagacgtcctgctatccgaatcaacccagattccacccatgaaataatgctgtgccggtacgaccggaatgtattcctttgttacatcatagccttcttccagacagtgttcataaatgttcgggaaatgatttaaaatagtttctttcggtatatgttccatagaaagccatacataatcggttccatcctttttcatctcttctctaattgcttttgtcaccacgtccctcggcagcaactcatctacaaaacgctctttattcttattataaagaaccgcaccttctccacgtacagactctgagatcaggaaacgtcttcccggtttcttcgaatataatgtcgttggatgaatctgtacataatccagatgttccagacgaatattgtgtttctttgctatttcaatcgcatctcctgtcagatgtggaaaatttgtcgaatgctggtatgttccaccgattccgccgcttgcaaggattgtattctccgcatagatttcgtatgttccgttttcattctctgctttgactcccacacatttcccattttcgatgattacatccgtcatctctgtatattcatatatctttacattctcaagctttttcacctgcgcaagcagcttgctggtgatctcttttcccgtcacatcttcatgaaacaggattctcggtctggaatgtgcgccttctcttgtataggcaaattttccgtccttcttttcaaattccacaccgtatttcacaagatcattaataatatctctggaattacggatcataatatccacagattctttccgattctcataatgtcctgccttcatcgtgtcttcgaaataactgtcatagtctttttcatctcttaatacacagattcccccttgcgcaaggaaagaatcactactttccagatctgatttggtaattagtatgatttcctgttcttcaggtaaattcaaggcactgaaaagtccggcaaccccacttccgactattactacatctgcattcagtttcataatacaacatcctcttttctatactgctttccgtttacggacagtccctccatatatattcttctgaccgcttaaacttttcacattataccactgttatttacatgtgacaagacagttgttgtatttattctttacacatacaaatcggctgtaatttcatgccatctgctttttcctattctacattcttcaatgcttcatccatcggaacctttctgatcttacgatattcgagaaacgctaccaccccataagtaacaaatccgatcaggaacatttccacatatattttcggatcgatccacagtgtgatccagcctgtcatacttgacatcatcatcgtacggaagattacattcatcaccgccttttcaatcggaagacttataagcaattctattataaccacaaccattgtcgacataatatacagcctgctgatctctccgttcgtatagccaagtatctttgtcatagagatagactgtgcatttttctcaataatgatctttgacaacagatagatgacgatcatatagatcatgattgcaaatccattgaccagccccatcatatttcccatagatacgtccagctgtctcgaaaccttcgtcaatgcctccagatcaatcacggtgccgatgtatttctcctcaatatccctgatctttgtatttgcaaagtaccctgcataataatcatttccaagatcaaatgtcttgttcagcttatcacggctcataaatacactgacagctccgctataatcatagattccagctactttaaatgtatagcgtttccgctcgtatttttcttttaatgtgatcttatctcccggttccacctgatatttgtctgcatatgcagctgatacatagactcctttccccagatctgccttgatatatctgctgtctgattctactccgtacagcatcagttcttcactcttcgcctgtccgggaatcgtatttaatgtatatgcgctgaatttttctgccgttttattctctgtctttgtcccgttggaatactgcatgagtgccagtaaactttccagtttacttccgctcattgcctctgtcggaacctcaagtatatactggtattttgccagcatattttcctgaatttcttcctgataatgctccagtacggatggcagcaacaatccgaagaataataacagattggcaaataagattcctacaaacagcaccatataattactgatattctggaaaataactctcagacggaatcttcggaaaattccaagctttgtgctcaaatataccgctctcttctgttttcgggaagaaagatctcttcttataaacttaagtggtgacagccttaatttgtaatataaaataccatagttaatggtcagcataataataaccggcacaaccgtcgtcatccagaatgcttccgcattccagatcgttacatatgtcggaaggctgtaacttccatagtacataccggcacatacctgctttaataacgtatatccaagaatatttccaaccagcgcaccgatcagcgtgatcacaaccggaagcgacatataatgtatgatcagttcacgtcttgtatacccggatgcacgaagcgtaccgataactccggcttcttttcttatcgtattactgatcgtaattccaaagacaaatgcaagaattgccattacgatataaagcagcataaccatcatcgcacggtcacttcccatatcatccccggtaaaacagatcaactgattctgaaattgcggcacaaaactttccagcgtcacaacaccagtcatgtcttccatcagatcttctgccattttcttttctttcttctctgtttccggttttttatcataaacccaggcgtaattatactgcagtttcacctggtttaatacttcaaaatctttgtccgtaacgatcgccactccaaactttacagaatcaaacatcgtatcattattattctgaaataatgcactgtaatccgaaagagccacaagtcctgtaatccgaaatgccttctttccactctttacccagtctccgatttccaggctgttattctctgcatacatacggtccacggcaatctcaccggacttttccggcatccttcctttcatcagacataccttatctacatctttccggttcttaaaaaaccgcacagtgcttccgttcgtcagcttttgttctatataaaaattctcatatatttttacatccgatttttcgatgtcttctttctgtgttgtagtcagcttctttttcgtccggaaatacccatcttctatattatatttctgaaagctgtcatcgtatgcccggatcatacttccatccgccaccagaaatccggatacaaatgcaattgtgattgccatcatgataaagacaactaaatactttccaaattcacttttaagttcccgcagtaatctttttcttaaaggacttttcacttgtcatgtcccccttaccattccagatcgattgccggaatcttcacttcatttctgtaatttttccggatcattccatctctgagcttcactactctgtcggccatgtctttgatcgcatcattatgtgtaaccataataatcgtattgccatatctctgattgaccgtctcgatcagtttcagaatttcctttgatgtgtgataatccagagcaccggtcggctcatcacacaacagaatatccggattcttgacgattgcacgtccgattgcagttctctgctgctgtcctcctgataactgattcggcagttttctctgatgttcgtaaagtcccagcgtatgtaataattcatccacatctaatggctgctcacttaaatatgcccccacttcaatgttctcccgtaccgtcagattcggtatcaggttatacatctggaaaatatatcccagatgctttcttctatacagtgaaagtttcttctccgtcatatcctccagacgttcgccttcaatcgtaatactgccctcgtccgcaccatcaattcctccgatgatattcagtaatgttgatttaccagaccccgacggccccagtaagacacagaattcccctttttctatattcagatccagccctttcaacacatttacgcggctgtctcctgttccaaatgattttttgattcctcttatttccagaaacataattctccccccttcagttaccttcctgtaaccaatgttagtttaaactcatttatttgtcaacgaaatccttttttagaatgtcttcatccggaattttcgtcagatttttcctaatttatctttatatttttgcatatttggtattaaaaaaaggatgactctctacttatgtcatccttttcattctcaacttatctgaacctatcctgattctttttcttattacattttcttatatcgaaacaatcgctttgaactgatcacagtcaatcttaatatcaaattctcctcccagtgctttcgcataggtacttacgattgcaagtcccagtccgttaccctcactggttcttgccttgtcgcctcttgaaaaccgttcgatgatatcttctttttcaaaatccatctcatatccggatgtattcgtaatctccaataccattttctgatctgtacccgcttcctttttatatgtctttataaataccctggttcctttcgccgaatacttcagcgcattttccaccaaattctggcagatccggtaaaaatatgaattatcagaataaattgccgtatcttcttccgtaagctgagttacaaatttcagcccgctttcttttatccggtcatccatatctgcaaatatctgttccatcagacgattaagctcaaaagtttctttgtgaagttctacattcccactgctcgcttttgcaagcgaaaacaggctgttgatcatctcaccaagctttcctgctcttgtcgatatcacgtctacatagtccctcactacatcacttaattcttcttttttgatcagttccagatatccgacgatggaagtcagcggtgtcttcagatcatgcgatacatttgtgatcaagtctactcttaactggtcacttctcgataccttttccagactcttccgttcaatctccagcgcctgttccagacgcttctgaaagaagctctccgtctgctccatgatctgatccagttcatttctccagtatctctggatcacttcccggcagcagatatattctataaacacagttgctaccatcatatatccggctgcataattccatccccatccgctgctgtaactgataaagaaaagatatgccgctgctgccgacagttctaccgccagtatatttcggaatcttttttccgactgtttttctttcgccttccaggtctgataatagatactgtcttctgcatcctgcagataagtctctgcaatccctttctgactccagttccgatatctcagtttcatatacctgcgtacgagcaggcagattcccggctgcaccaggatattgccgatcaggcagattctccatacgccccatgtactgaaataatatctgttcactaataccacaaagaacaggaagcttccaattataaacagcaaagatccaaatacgcaatcataatattcttttataaactttttaattgctttcaccatatttttccattttgtatccaattccccacaccacctttacatatcttggcttcttcgcatcaatctccactttttccctgatatgacggatatgtaccattacagtattctctacagtataatctgctgtttcctgccatacattctcatagatctgctccgccggaaatacctgccctggatgcgtcatcaatagctccaggatcttatactccgttgccgtcagatgtacttcttctccctcaacaaagatcactctctgtttcttatcaagtaccagtccgccattcacaatctgatccggatctttctttttttccgcttccatgttactccatacacggtatctgcgtaaatgtgctttcactcttgcaatcaattctgccggattatatggcttttcgatataatcatctgccccaagcgtaagtcccgataccttatcactttcttctgtcttggccgacaggatgatcaccgggattctgcttttctcacgcagtttcatcagcgctgacagaccattgagtcttggcatcatcacatccagaaggatcaggtctacattctcccgctccatgatatccagtgcttccataccgtcataagctttcaaagtctcatagccttcatattttaacagttcactgatggaatagacgatttctttattatcatctactactaatattttttctgcctccatttctttcgtctctcccctctttttctttacagccatactataccgctcatgatttaaatatttcccgatacaattcttaaaaatttcttataattcatcctcactgtacagggacgaataaaatgcaattccaagtatcaccgctcctccgaccagttccctgactgtcgggatctctcttaagaacagaagtgcaaatacgatgccgtacaccgtctccattcctgaaataattcccgctgtctgtgctttcacacccttttgcgccgtcacatataaagaatatgcaattgccgtacacaaaaagccaatcgttacaactcctgcaaaatccaccggacgccagtccgctttcactaatcccagtgccggaagcagtgcaacagctgctgttccctgttcatatagacagattgtacgtcctttgtatctgttggcaaaataccggttcgacaatgtcatcactgcatatgtaaagctcgcaatcattccccagatgattccgaccgttactttattctccacggaaaactccggaattgtgatcaatactcccagcagaaggatcagtgcattcaaaatattcctgccacgaatcttctcatgaaataataacggctctaaaaacgtcagaaacagcgggaatgtagagaatgtaatcgttccaattgctacagacgatgtctggatggattgaaagaagcttgaccagtgaattgccattaccacacctgtcatgatcataagaccataatctttctttgaatcaagcgtcagcttatccttgcagaccagagatattgccagcaaaagcagtgaagaacagataactcttcccattgccacctgtactgccggtacctgtacatactgaccgatcactcccgaaaagctgaagcacataactgcaatatgcagcaggatcacattttttcttgtatttttactcaacgatttctcactcataatatcctcctgttaatctatttgtttcttctcttattttgttgcttccttgtttttcataattacgaactatgagaaacacgcttcgcgagtttctcaagttatcgcggcagtcaccaaggtctcgcgcaagcacggactttggctcgttgctcgcgtaaataaaaagaaaagccctagtttaccgattcttcagaaactatgactttcctctgtgttcttaagtatataagaaaacccgcccatgacacgttctccgtattacttaatattatagtggacctggcgggagttgaacccgcgtccgaaagcccatccattcgagcatctcccatcacagtcattatattaacattccctccatgcggcacctaatgacaggttcctcactttagtagcttcataagttcttccatctcctcaaagctttggaaacgaagtgctccgcctgtttgaagccggtgacccggacagcggatgatccggggccgactgcggcctaattaggctgcgtacgctaattctgtattgtctgcgtttatatttaagtggaacttttaacgtagtgtcccgctacggatggcttctccaacttccagacccccgtcgaaaccagtacaagccctaaatctaaatgctttcttctggtctgcagactgtctttacgtaaatttaattataatctcaagttgttttatttgtcaagcctcttatgtaatctaaaaaacaaactaaaaaacaaatataaaaatcatctaaaaagagacgtacatgaaattatatcatatacatctcttttcgctgcaaatcactataataccgtaaacattctccttactctacatccttcaatgcttcgtaatcttcctcaccggtacgaactttcacaactttctgtacattataaacaaaaatctttccatctccgacatgaccggtgtaaagtgttctcttcacagtgtcgattactttctctaccgatatacttccgacgataacttctaccttaacctttggaagtaccgttacatccatctcaactccacggtatttctcacctgcacctttctgaactccacatcccataacctgggtgacggtcatacctgttacaccaagatcattaagggctgtcttcagtttctcatatcttgaaagttttgcaatgatgactactttatgtatacctgttgacggatctacaggtgtggttactttgacagatgctgctcgctgtacatctgacgcttcatcataatcattttcaccaagctctgtattttcattgacactcatacttccttctgtgatatccatcaagctgaatcctgcatatgcagatgcaagaccatgctcttttgaatccagaccaacaatttcttcttcttctgataccctcagtccaacggttttatcaattattttgaatacaattgtcatagtcacaattgtccatgccataacacttacaacaccaagaagctgtaatccaagctgatggaaccctccaccgtagaacagacctttgagtgtacattccggtgctgtctttgttgcaaaaagaccaaccgcgattgttccccaaataccgtttaaacagtgaactgcaactgcaccgacaggatcgtccacatgagctacattatcacagaaccatactccaaatactaccagcagtcctgctacaacaccgataataacggatcctgctgcatctacaacatcacaaggtgctgtaattgctaccagacctgcaagcgaagcattcagacacatagaaacgtctggttttccatacttgacccatgtaaagatcatacatacaaccgttgctactgcaggtgcgatcgttgttgccataaaaattgaagcaagctgtgatccggttgttgctgccgcaccattgaatccataccatccaaaccagagaatgaagcatccaagtgcaccgattacaatattatgtccaggaaacgcatgtacttttgtgacttttccttctttatttcttgtgaatttaccaattctggcaccttccattgccgctccgataaaagcagttgtaccgcctaccatatgaatcgcacatgatccggcaaaatcatggaagcctagacttgcaagccatccgcctccccagatccagtgtgcttcgattggatatacaatagctgaaataacagctgaataaatacaataagataagaattttgttcgttctgccattgctccggatacgattgttgccgttgttgcacagaacactaagttaaatacaaaatgagaccagtcaaaatttgcataatctgtaaaaattccaagtgtcggagttccgataaatccaccaagtgcatcttcaccaagtaaaattccaaatccaagcgggataaatacacaagttccgatacagaaatccatcagattcttcataataatatttcctgcattcttcgctctggtaaatcctgtctctaccatcgcaaatcctgcctgcatgaaaaacaccaatgctgcacctatcagaaaccaaattccaaatacctgtgtgcctacagcatcctgtatggctgataatacttctttcgtcataatagttcctccttcatcttgtcaaaaagaaaaagcgcctcgaaatattattttcgaagcgcccttgctttatgtcccgtagtttaacgctcagaactttctttgtcaaggaattttctgatatttttctgttgttatatataatttcgttcaattatcacaaccagattttatttttctcatattttttccacaatttcacagtccaaggatttctccaagcacttcaatgataatctcattggtacaggactttacaaatcccatcatatgtaaggaaatctcatcctgtttctggctctctgtcagttccggattgctgtttgtctcattaatgagctgtaccaaatgcggagtcagctcctcataagtctccattgtagtctgtgtgaccagatctcttaattcttctttctttgtcggtaccattttgtcctctcctgtctgtattctatctgagtttcatcttgaaatcgcgttctgcttcacgcttctggtctttctttgcgatatcctgacgtttatcatataatttcttaccttttgccagaccgatctctacttttacaagacttcctttaaaatagactttcaaaggcacgatcgccattcctttttcttttgtcttaccgatcagtttgttgatctctgatttatgaagaagtaattttctgactctgagcggatctttattgaagatatttcctttttcataagggctgatatgcataccatatatgaatacctctccgttctcaatacggatgaaggattcttttatgctgcattttcccatacggagtgatttcacttctgtcccgtgcagagcaattcccgtttcgatcttatccagaataaaataatcatgatatgcctttttattatttgcaaccatcttgtcattactcttcgccatctccggcacctccctgatttacaatcttaaaatcaatcgtacgcatcagacggtctgcatccagcacccggactcttagtccttcgcctagtttatacactttccgtgtatgcatccccatcatctcatagcgttcttcattatattcataatgatcatccgtcatattcgttacatgaaccagaccttctatcgtattcggaagttccacatacatgccccattttgttattcctgatatcacaccttcaaattcttctcctatatgcgcctgcatatattctactttctttagtttgactgtctcacgttctgcttcatctgcacgacgctccatctcactggaacgctttgccacttccggaaggatagaccgataatgttccatcttatccgcattcattcttccccgcagattatctttgataatccggtgaatctgaagatccggatatctacggatcggagaagtaaaatgtgtataataattagctgccagtccaaaatgtccatcattctccaccgtatattttgcctgcttcatggaacgtaatgccagtcggctgatcattgcctcttccggagtatcttctacttttgtaagcaacttttgaatttcttttggtctaatttcatttactcctatatgcatagaatatccaaaattattgataaatgttgccagcgtacggatcttttcttcatccggtgtttcatgggagcggtataaaaatggaagttcctgccagtaaccgtcttctgccaccgtctcatttgccagaagcataaaatcttcaatgatcttcgtcgcaacatttctgtcatatggtctgatatcgaccggctttccgttctcatccagaatcatcttggtctccggaaaatcaaaatcaatcgagcctcgtttctttcttctggctcttaaaataccggaaagctcctgcatccgttcaaacatcggaaccagttccctgtattcttctgtttcagcttcatcatgatcagtcagaatctttttcacactggtataagacatcctgcggttcacatggattaccgtctcggcaatctcgtgggcaatcacttctcctgacggatctaccgtcataatacagctcaatgccaaccggtcctcacctgcatttaatgaacacattccgttcgaaagcgtatgtggaagcatcgggattacacggtctacgagataaacactggttcctctttctaaagcttctctgtcaagcgcactattctcctgcacataatttgttacatctgcaatatgcacacccagaatataattttcaccgtcttttaccagtgacacggcatcatccagatcctttgcatcttccccgtcgatcgtgaccatttgccagtcgcgcaagtcttttcttccattcatatccgcttcactgaccggctttgctacgcgttctgcctgtcttaacactttatccggaaattctaccggaagatcatacccctttacgattgacataatatccgtcccagggtcattcagatgtccgatgatctccacgatctttccttccggttttttcccattttctccataagaagtcagttccactacaactttatgtccgtccactgctcctcttgatttttcaaccggtacaaatatatcctgatccagtctctgattatccggaattacaaatccaaactttttgcccggcttcatacgatacagtccgaccactttcgaaagtccacgctccaggatcttcacaatctttccttcacggcttcttccctccggctcttttgtcagcacaatctcgacatggtctccgtcgaacgccccacagatatcatcttctccgataaatacatctgccgaaccatcttcatccagtacaacaaaaccgaatcccttaaggcttgcacggaatacaccggtcagacgctttgcatgtcctttacagtactttcctctcttggaaagataaatctttccttcctgttccagtgattccagtatctggcgcagctcatccctgtcttcttttgccacacgcagaagcatggccagttccttaaatttcatcggtgtatataaatcgtcgcagatcaggtcatagacgactttttttctcttatcaaatttcttactcatattcatatactctcctgcatcgttgaaaaagggacacccccatacaggagtgtccctttcatcttctaaaaatatgctctatcctatgcaaatacttttaaattcaacactgctgccagtacaataaacaaaatcgcaaggaattttgtagacttcaccagtgcaccttccatagaacgtcccttgttctgtccccagtaagtatcagcgataccactaatggcaccaagccctgctgacttaccttcctgcattaacacgactatggttaatgcgatacagtctattgcaaatattatcattaatacaatctttaaaatgtccactattcacacctcctgcggataaaccatatttattttatcacagggtttcttataaggcaagtgaatctttcaactcatccgtcttttgtacaaatgggttctgatactcagccacatctcccagtctttcctcaatcctcagcaattgattatatttttccacccgttctgaccggcatggagccccggtcttaatctgccctgcctctgccgctactgcaatatctgcaataaaggtatctgcagtctctcctgaccggtgtgagatcacagtcttatatcctgcattctgcgccatcttcactgcttcaaagctttctgtcaaagtcccgatctgatttaccttgatcagtatcgcattggctgcttttctccgtattcctttcgcaagccttcgggtattcgtcacgaacaggtcatcaccgactaactgtacccgctctccaagcctgtctgtcagagttttccatccttcccagtcatcttcatccaacggatcttcaatggatacaaccggatatttttctatcatttcttcatagtaatcaatcagttcttctgctgaacggacaatcttgtacccttttttcttcgcctcaccgtcgaaaacatatttcttaaaattcttatcatacaattccgatgcagctacatccagtgcgatcgcaacttcttttcccggctggtatcctgctttctctaccgcttttaccatcaggcgcaaaacctcatccgcattatgaagatccggtgcaaatccaccttcatctcccactgcggtactatattccagctgtttcaaaagctgtttcagttcatgatatacttctgcacacatctgaagtccattcttaaaatttcctgcacctacaggcatgatcataaattcctgaatatcgatcgtattatctgcatgtcttcccccgttcatgatattcatcatcggaaccggaagtttctttacattcgtaccgccaagatacgaatacagcggcagtccaagcgcccctgccgctgctcttgcagtcgcaagagacacgccaagcatggcattggctccgagattggacttgttctttgtcccgtcaagcctgatcatcgtctgatcgactgccgcctgatccaacacgttcatacctatcacttccggtgcaatccttgcattaacatgatctgctgcctgttgtacgccaagccctccgtaccgttcttctttatcccgtaattccagtgcttcatactttccggtcgatgcaccggatggcacacttgcccgaccgcagaattcatctcctgccagcacttccacttctatcgtcggatttcctcttgaatcaagtatttctcttgcgtatacatccgtaatgggtaaatacttatacattatttctatcctcctcttatgaaggatagtatgttccgatgcggaataaaccattcaacatttaatacagttctttataaatctctgccatctgctgccatgtcagttttacataactctgattcagaagtctctgctgtgtctcttctacagtcttagcaaaactctcgatctcttcttccctcattccatattcatgcaatggttttcttgcaatgatctgatccaaaagttttccaatctccacatataccaagtctgcatcgcactctaaaacattgcttaagaaactatttaattccttaattctgccatctggatctaattcctgatattttgcaaatactgctgtaaggaactggtaatttgcttctccgtgtgtaacatgatagacaccacttaacggataagacatggcatgtaccgctcctgttccggcattgccaaatgcaattccggcaaggttacttgccgtcaggaagtcatccagcagattcattcggaatgcttctccatgttttgcaattttacggaagccttccatgatcatttccattgccttcatactgaacatctgtgtatacaaagtagctttcggagacacataagattcaatcgcatggataaatgcatcgatcgcactcgttgcaaaaaatgaatatggaagtcctgccagcaattccggaatcaataccgcacggtctgcataaatctcgtcgacagcaagccccatcttggtatgcagctttgtaaattctgcgattgatacattcgagacctctgaccccgcaccacacgtagttggtactgcgatcaacgtttttgctctcttaagcggaacctttcttccaaagatttcttccgcactatactctcctgcgagtaccaggatcttagccatatcgataactgcgcctcctccgatcgcaataattctgtcacagtctgtcttacggaaatctgccagtaatgcatcgatcatctcgtccgtaggctcaccttttccatatttgcttttatattctacatgtgcctctaatccaagcgctgtaaaatatgcctcatatgtgcttttacttgcaagaataaagtctttctttcctatattatattcttctgcaaaatcttttgcgtgctcaaatttctgaacttccgtcttctgccaaaaaagtttcattttttcttgtcctccccgtcatttttctgaatattttgtctcttaataatatagcatcaatccgttgacttttccatatatgagcgttacaatcattgaagatataaaaatttaataattacaaaaggaaaactggggaattttcaaatgaaagaacatttaaaaaactttgcattactcactgtcagtacgttgatcatggctgtaggtatctactttttcaagttcgccaataactttacgtttggcggtatcaccggttttgcggtactcgtcgcaaaattcactccactttcggccagtgatttttccttcatcgcgaatatgctccttctgatcataggacttttcgttctcgggaaaaaattcgctgcacagacagcatatagcagtatcttactttctgttactctgtccggactggaacgtatttatccaatgagtcaccctctcaccaacgaacctatgctggaactgatctttgcgatcgtacttcctgccatcggttcggcaatcctcttcaatatcggcgcatccagcgggggaacggatgtcattgccatgatattgaagaaatacaccagtgttgacatcgggaagggattgcttgcttccgacatcttattcacaatagccggtttctttgtatttgatatcaaaaccggtctttattcactgcttggtcttacgctgcgttctacattgatcgacagcctgatcgaaagtctgaatcgttcgaagtattttcacgtggtatgcagcgagccggaaccaatctgtgaatttatcaaaaatgacctgaaacgaggtgcaacaatcgtactcgcacagggtgccttcacaggcgatgacaaatatatcatcctgactgtacttagtccaaatgaagcaatcaagcttcgtaatttcataaaagctcatacaactggtgcattcttactgatatccaataccagcgagattataggaaaagggttccactctgtgtagtgaaaccctttattttttctccgtattctcaatgtccaacagatccaggattgaatgtgacatcatatactgataaaattccattgcatctcccgccgaaatatttttgctttcccggataagccaatatttcagtccattcaccaatgatattgcatgaaattccagaaataccttttcgtcgacgtgcggcatattacttaagtgttttaacggatgatgctttaccagaatttcttccatattaaaaatctgtccatacagcatctcctcaaaagaattctgaccagtcacttcaaatactttttcgtaataagtcttatcttcttcaaatttccgaaacagcagctttaaggactccattccacgttcctgctccataagttctgagacttctttaaatacatcttcccacagaagccattccatcacttcatatttatcctgaaaataattataaaatgtcggacggatcactcctgctgcatccgtgatcatcttgatcgtcagtttttcaaatccttttttcgctaccagttctttaaatttttctcccaatagtgcttttgtcaattcactttttcgctccatctcatcaccttaatttatctcggatatcctgtaataaataattatagtcctgttatccggcaaaatctactgtcaatttgctccattttcacatataataatggagaattacatcaaaactggcaagtaaaaggagcgctcctccaatccagtatgcacgcctgttttctttcaatcctaatctgtatcccgcaaatataccgatcacagcttccagaaccgtcaccggaagtaacaccaatgactcctcgatcatagctgtatccaaaaaaccgagccccattccgacaaagaatgcatccacacttgtcaccatggccagaagcgttgttttcttccattcaatctcgtcttttctccgttccagtacattctttttctttatccctttgataatcatatagattccgattgcagcaaaaatcagtaccgtcagaccttcccatctgtcagccgctgtcttcgtcctggtaatggataataacggaagtaatgtgatcagattgcccagaacaagcgttcccaactggataccgccaaacaggatactcagcagaatcaggttcttccatctgatttttgaaaatccagcccccatatagaccgctgctacaaatacatcaatcgataatccaacggatacgatcaataattctatcactgacattgcatcaccttctttcttttctcctattttagcctatttagaattatttttgaagaaataaatgccggacaactgccggaatcctgctacatttttcttcatatgtataaaaaaacgggaaagctacgctcttacgtaaccttcccgctttctgcgacatatatagtatcaactttaggatgtgtctcttatattatatcccgattagtgatggaataaacggattccggtaaatgacatcaccatatcatatttattacatgttgcaattacattgtcatcacgtacggatccacccggctgtgcaatgtattttacaccactcttatgcgcacgctcgatattatccccaaatgggaagaatgcatctgagccaagtgcaacatcggtcagtttgtccagccattctctcttggcttctcttgtgaatacttccggtttttctttgaagattgccggccatgcatcgtctgcaagcacgtccatgtaatcgtctcccatatagagatcgatcgcattgtctctgtctgcacgtctgattccatctacgaatggaagattcataacctgcggtgactgtctgagccaccagttatctgctttgcctcctgcaagacgtgtacaatggattctggactgctgtcctgcaccgataccgattgcctgtccgtcttttacgaaacatacagagttggactgtgtatattttaatgtaatcatagagattgccagatcaatcttagcctgctctgtcagttttttgttctctgtcacgatatttgagaagaaatcatcgtcaatctttaattcatttcttccctgctcaaatgtaacaccgaatacctgcttgtgttcgatcggagccggtacataatccggatcgatctggattacattgtagtttccttttttctttgcttttaagatttccagcgcttccggttcatatccaggagcgattacaccatcggatacttcacgtttgatcagtttggcagtatccacgtcacatacatcagacagagaaataaaatctccgaaagaagacatacggtctgcgcctcttgctcttgcgtatgcagatgcaagcggagataattctccgagatcatctacccagtagatctttgcaagcgtatcactcagtggaagtccgactgcggcacctgcaggagatacatgcttgaatgatgtagctgccggaagtccggttgctttctttaactcacttacaagctgccatccgttaaatgcatccaggaaattgatatatcccggtcttccattcagaaccttgattggcagttcacttccgtcttccatatagattctggaaggtttctggttcggattacatccatatttcagttctaattcgttcatatctcttctccttatcaattcctcttactggttcttattgatgatctttgtctcatatgtacctgtcgcgatatcaatatagcgtacgaataatgatactttgttgtccgcattcaggctgttccataagcttccggcaaatgcatccatatcatccggaattgcgatcagtttcggttctccttcaaagcttggaagcggattgccgtcacatttgtatgtgtgaataaaatgtccctctcctgctgccggattctcatatgcaaatgtatagcgattgcagctttccggattaccgttgttgctctttaagattgacattgcgtagttaaaagttccgttttcaatatgcataacacctgaaattctaggtgtatagttcggtccatccggttcaaattcacggcttctgagtgactgttcaaatgtaagttgtttatccatgccctcgtagatagtatccgtctgatctccgttggttacgatcgtcttgtttccaagtacacgtaccggtgcatagatgatcaggcttggatctgtcagctttgatggatcaaatgcctgtgtgcggataccttccccttcttctacaaacacacggttacggctattctcacttcttcccataatgaagtaagcagttacagcttttgtcccatctgcactctttcctataataatgccacgtcccgggtaagaattgccctgcagttccttctcgattgataacatttccatgaatacatctccttttcgtttgtgtttttgaacgtttctatccttattatatataaaagcgtcttatttttccacccctttttataagtataattaaaaaatctcgtttttttataagtacaatttaagttttgaatcttttatcgttatttctaatacttttttccttttttgtcaaaaaaacgacaatatacgattaatgtcgcattcgcttgaatccggaaatcaaaagttttaagataaggtaactgcatagagaatataatgcagtaagatgaggaggtaacattatgaacgttgtagacacaatcaaaaacgccgcctttgcttccgctattcaggcagcacttaagtacatggataaagatcctgaaacaaatattccaaaagtcatgagcattgttgacaaggctgctccggaaggctggtatgcaggtcagcgtaatgcgatccgccagggaatcgccgaaaagggaaactggtatgaacttgccacaaaagtatgggcattggatccggaagtacgaaaaactttctttacaaactttatcgttaacgcttctttgaaaggttctgcccttcagaaggaaactgaggaaaaagaagactgtaatgttccttgggcgattttattagatccgacttcagcctgcaatctgcactgcaccggatgctgggccgctgaatacggacacaagctgaatctctctcttgaaacaatcgatgatatcataacacagggaaagaaacttggtacatatatgtatatctataccggcggagaacctatggtacgtaaaaaagatattatcacaatctgtgaacgtcatcctgactgcgaattcttatctttcacaaatggtacattgatcgatgaagaattctgtcaggaaatgttaagagttaagaatttcgttcctgcaatcagtcaggaaggattcgagacggccaatgacggacggcgtggtccgggtgtatttgaaaaagtaaaacatgccatgcagttattaaaggatcataatcttccattcggtatctctacctgctacacaagcgtaaactacaaagatatcacaagtgaagaattctatgacatgatcattgaagccggtgcattattcatctggttcttccattatatgcctgttggaaacgatgctgctccggaactcatgccgaatccggaacaaagaaaggctgtatacgaacgtatccgtgcgttcagaagttccaaaccaatctttagcctggacttccagaacgatgccgaatatatcggtggatgtatcgcaggcggccgctattacctgcatatcaatgcagcgggagatgtagatccttgtgtattcattcattattcaaatgcaaatattcacgaagtcagtcttctggatgctttaaagagtccgatcttccaggcatacagaaaaggacagccgttcaatgacaatatgctgcgcccttgcccaatgcttgagaatccggaatgcttaccgaagatggtaaaagagaccggtgcccactctaccgatccacagtcaccggaagatgtacagcatctctgcgataaatgcaaaccttatgccgaagcgtggaccaaaatggcagataagctttgggatgagaggctggatgcaaaaaagtaaattgggatttaatttattaacagggaagcggcctctcagtccttgaaaatccgctaatgacagctgattactgtaaccttccgttgccacaaccgttacgcatttgccatttaatttgtaaggcattcgacacccacggaataaaaagtagaaagccgttccagtgaatgtgaagaaggtgttggaaatagttaagcgtcaaaattatgcgttgggttttcgaaatttgcctgtttgagccgaatggcgagttgcaaatttcggaagcccgtttttagcataattttgacgctttagtatttcccaccgacggaacctgaacaggaacggcttcctactttttatgcaggtccgggtagtcatgccttcctgaattaaatcccaaatctccctcttatctcaaacccatgatccatcggtccgcttcctttccccagatccagcatggcggccagtgcaccgctgatatactctttcgcacgatgaatggattcttccagggagtatccttttgcaagattggaggcgattgcgctggataaagtacagcctgttccatgggtattcggattattgattctttttccgcggaaccatgtcgctttgccattctggtataagagatcattggcatcgttcagactgtgtccgcctttgcacaaaactgcacaatgatacatttcattaatcttctttgctgcttccaccatatctttttctgaccggatctccatctctgcaagaacttctgcttccgggatattcggcgtgatcacggatgccatcggtaacaactgtgtttttaaagtctcaatcgcattttcactgatcaatcgggatccgcttgttgccaccataaccggatcaactacaatattttccgcatggtattcttttagtttctttgatattgtttttattaacttttcagatgataccataccaatctttactgcatccggacggatatcagtgatgaccgcatctaactgattttccaggaattccggagatacttccatgatcccggtaacacctgtcgtattctgtgcagtcaatgctgtgatcgcactcattgcatagactccgtttgcctgcatggtcttaatgtctgcctgaattcccgcacctccgcttgaatcgcttccggcaattgtaagtgctgtcttttttttcatcaattccctccagtctctgcaatagcagtctgcttctctctgaatctcttcctgatcatctttacttgcttcatcatagattcctacaacctggaatcctgccttttttgcagtgcgaactgcatggataacatcctcgaataccaacgtctcttccggtctgcttccaagatattccgctgcctgcagataaatatccggcttcgtctttcctgcacctgcttcttcacaggtgaatatccgatcaaaatactttacaatttccagacgttcaaacgccatctctatttctttcttattattggaagatgcaatcgtcattggaatattactgttacgaagcttctccagaagttctaccgctccgctcttcagcggtgccgtttctttataataatcgctgataatatccaaaacgttctgttcgatttcatctgtttcctgtgacagatgataatgctcttttacatattgcgcaccttcctgaatgctcattgtaaataatatatttccaagatccggttctgcctctatgccgatgctgttcagataacgcacccctacatctttccatatccccatggaatccagcaaagttccgtctacatcgaatattgctccctttatcatgcttccaccatttcctctgttaattttttcagtttcttcgttgcgttttttatatctttttctgcaaatattgcactgatcacggcgattccgcagattccggttccagaaagctccgatacattttctttactgatccctccgatcgcaatcacaggaatatctactgcttcagtaattgctttcaatgtctcatgacttatatcagctgcatctgcttttgaatctgtatgaaagactgctccgaccccaaggtaatctgcccctctttcctgtgcgagcaatgcctgtccaaccgtttgtgcagatacaccaatgatcttgtccggtccaagttttgctcttacatctccggcttccatatcactctgtccgacatgtactccgtcagcatctatctccaatgcaatatcaacattgtcattgatcacaaatggcacatgatatctgtcgcagagttccttaattttttttgcttcttcgaggaaatgtgcttcatccagttctttttctctcagctgcacaaatgttgtaccaccttccagcgtcttctcaacctgactgtataacgtctcaccatttaaccagtggcggtccgtcacggcatacaggagtaaatcttctttctgcatctttttgcatgtatgtccttccggcttttttatctgatcattctcaatatttctatctgatctcatattttgctcctttctccaatgtttctttatccatattgtagattgcatcaataatacggttacggtaagtggcattaccatcacctttctgcatatatccccatccaatctctcctgccagtcccatcgtgcagacggctgccgctgccgcctccagcttctgctccggattcgctgccaggaatgctgtcatcattccggacaactgacatcccgttccggtaatctttcccatctccggtcgtccgttgcggattatataacagctggcaccatcacttaccagatcaattgcacctgtaatcgcaacaatacatcccgcttttttcgcaaatgctttcgcaaatgcaataccttcttccagattctcctctgttacggcatctgctacatctgcatccaccccttttgttgttccgcttccctgtgccagtgtttttacttctgagatatttccgcgtataacatcgaatcggactttctccatcagttctacggcggtattcgtccgcagtccacttgcacctgctccgaccggatctaataacgtcacatgtcccaattcattggcacgcgctccggctgcaaacattccttcaatcgttcttttgttcaaagtaccaatgttgatgttcagaccttggcagatagatgtaatctcctttacatcttctggttcatctgacataatcggacttccgccacaggctaacaatgcatttgcaacgtcatttaccgttacataattggtaatattatgtaccagcggcacactctttcttacattttcaatacagtttcctaacattattcttcctcctgttatccatatatttccgatttcttctatttaatacttacgcaatgtatcgtggctgtcatctgttgtattgtcaatattttttatcacaacataatacccgtcatttccgtttgtcctgacaagcacacggtctccgactttatgtccctgtattgcttttccgagcggcgattcgatactgatcagtccctgaagagaatttccgcggatactggtcacgagacgatatgtctctgtctcatcatcgtcttcgaagtatacttccactgtattattaattccaacttcatctaccttagatgtatcagacacaatcttcgcattcttaagcattcgttccagatagcggatacggctttcgttacggttcttatcctgttttgctgccttatattcaaagttctcgcttaaatccccctgtgctcttgcctcttttactgcttccagttctttcttacgaacaacaatcttacggtattctatttcttctttaattttcttaacatcgctttcagttaactgttcacccatgaaaatgcacttcccttcttatcttcatatattataatactctggtctgtacgctgcaaattctaaatcaacccataatgctccattgctttataaagcccgtcattctctaccgtatccgtgatatactcggcatacggctccagaaccggatcatgatgccccatgatcaccccgtgtcctgcagctttgatcatatcaaaatcattgctgctgtctccgaaggcatagatctcatcatcctgcagagccaattctttctttatgtacgcaattgcagttgccttagaatattctttctgtacacattcatacactccacccagacggtcgatatgtttgaaaacatcttctgtttctttaaaaaacctttcttcgtctgcaattttatctatataaatcagtatcttatcaaaatcataacctgtatcttccattgactgctctcttccaagtcccagaccagccatatatcttctactgctttccaccggctccagccttgagatacggttggagtaatagatatcctctgttccttccagaaagccttctaccttgcagtctttcatagactttataatcctgcgtcctctttcatatgggatagaatgatgaaatacgacccgttcctcatataccaaatgtgttccacatccacataaaaaaccatcgaacggaattctttttatcataggcggtacgctgcatatggtgcgcccggtattgataaatgtcttatgtccgttctcctgtgctttgcgtaatgccacaagtgcactttccggtatctcatgcgtaatctcacttaaaattgttccatcaatatcaaaaaataatgctgacataacttcctccatttttatacgaaaaaactgacatcgtttattataattaaacgtgccagccttttcaatagatatagcaatttcattttataatctgtatacaggaacccattcccgtatcatgatcttacattaattttctgaacagatctttcagatcctctacactggcatctttcggattaccaggtgcgcatgcatctgcgtgagcagattctgcaaggaacgaaaggtcttcttctttcaaagcttccagttttgtaggaattcctacgtctacggataatttacgtaccgcatctactgctgcttttctgtattcttctacagacatatcatctacgccttcaacgcccatcgcttttgcgatttctttatatttttctcccgtgcattccgcgttgtattccataacgattggaagcatcattgcacatgcaacaccatgtggtgtgtcatagacagctccaagtgtatgtgccatagaatgtgcgattccaagtcctacattagagaatcccattcctgcgatatactgtccaagagccattccttcgcgtccttctttttcatttgcaactgcgcttcttaaagattttgaaataagttcaatcgctttcaagtggaacatatctgtcatttcccatgctgcctttgttgtatatccttcaattgcatgtgtcagggcatccatacctgtcgaagcagtcagtccctttggcatagaagacatcatctccggatctacgactgcgataacaggcatgtcgtgcggatctacacagacgaattttctcttcttctcgacatcagtgataacatagttgattgttacctctgctgctgttcctgctgttgtaggcactgcaatgatcggaacacaagggttctttgtaggtgctgttccttccagacttcttacatcctcaaattccggatttgctatgataataccgattgctttggatgtatccatagaagatccaccgccgattgcgatgatataatcagctgcggcttttttaaaggcctcaactccatgctgtacattctgaatcgtcgggtttggtttgatatcagaatataattcatattccagtcctgcatcctcaagtacttttgtaactttcgttgttacattgaatttgatcagatcagggtctgagcataccaaagcttttttcaatcctcttattttaacttctgctgcaatctcattgattgctcctgctccgtgaaacgatgtctggtttaaattaattctgtttgccatgataactgacactccttctatacataatctttatttgtgatgcgaaacattttcttttcctcttttgtttcgtatcttgtttctttatgtcttaattttaacaatcattttctttgaatgtaagttacaaagtatatattttgtaacatttgcacgttacacttttgtatttttgtaactttatatcttttatgcacaatatctccaaatgtattgtgttattcaaatgacatttcgcagatacatattttgacatcaaaaaagaactccatcttacaggagttctaatttcttaaataatgtttccagttctgccggcatcgcttttaccagattttctgccattttttccggacgtttcttcatatcccccagtacccactgggttgtcatatacaccgagccctgacaatacatctccaactggaaatgcagattctcaggaattggctgttttgtttttgcctgaatctgattctcataaaacctcagaatcagctgaaaatcatgatctctcagacaattctgatcatcattacggaacgctgctttgaaaaataatttctcttcctctatatagtggaacttattgaccagtccttcataagctgtcttaccctctcccatgtgctggaacgattctaacaggatccggtcaaaataccagttaatgagatcgtatttatcctggaaatttcggtaaaatgtctgccgcgttgttccacattctgccacaatttcttttactgtaatcttttctaccggcatcttcttcatacagtttttcatggcttccgccagacgatatttcatcttatcgtgttttattccttccacttacatcatccccagtttattttttctgactctctagaatactttcgtcgtccatttgctcatgtcccagacttcatttaccacatcctgatagaattccggttcgtgacagatcaaaaggatgctccctctgtattcctgcaaggcttttttcagcgaatcctttgcatccacatccaggtggttggtcggctcatccaggagtaaaatatttgtatcccggttgatcagtttacaaagtctgactttcgcctgctctccaccacttaatactctgacctgactttcgatatgttttgtcgtcagtccgcattttgccagtgccgaacgtacttcatactgtgtaaacgacggaaattcctgccagatctcatcgatacaggtagtcttgttctcgcctttgacttcctgttcaaagtagccgatctccagattctctcccagttcacaacttccggataaggatgggatcaatcctaaaatgctttttaataatgtagtctttccgattccgttcgttccaaccagtgctatcttctgtccacgctccatactgaaatttaatggttttgataacggctcatcatatcccgttaccagatcatgtgtctcaaataacatctttccaggtgtacggccataacggaaatgaaattccggcttcggtttctctgccgccagttcgatcacatccatcttgtccagcttcttctgtctggacatcgccatatttctggtagacacacgtgccttattacgtgccacgaaatctttcagctcactgatctcctgctgctgtcttctgtaagcagcttccagctgcgctttcttcactgcatagacttcctggaagtgatcataatctcccacataacggttcagttcctgattctccatatgatagatgatattgaccacttcgtttaagaatggaatatcatgcgagatcagaataaatgcattctcataatccagaagatagcgcttcaaccatgcaatatgttcctcatccaggtagttggtcggctcatccagaagcaggatatccggcttttccaataacagttttgcaagaaggactttcgttctctgtcctccgctcaagtctgtaacatcacggtccagacccagatccagaagtccgagtgctcttgccacttcctctacctttgcatcgatcgtatagaaatcgtgcagcgtaagctcatcctgaatggttccgagttcgtccatcagacggttcatctcttcttcatctgccgttccaagcagatcacagatttcattcatacgctgttctttctgaagcagcggatcgaatgcagattttaacacatcacggatggtcattcccttttcgaggaccgcatgctgatccagatatcctgcatgtacattcttagaccattctacttttccttcatccggcacaagctttccggtcacaatattcataaaggtagattttccctctccgttggctcctacaagaccgatgtgttctccctttaaaagtcgaaaagaaacatctgagaatatggctctgtccccgaaaccatgtgtcagatgttcaacatttaatatactcataaatttctccctgattattcacttttttaatttgaaaagatgccagcaaactctctgctgacatctacattataacgtttcaaccagaaccttgcaatcataatatattccggtttgattcatacattctgtgttatatccacatgataatctatattatatctgcattatatcgctttacagaaaatactcctcttcatcccgccatacttttccttcgtcatcacctgttcatactgtaatttcaggaatgtattcacacttgccacattgtccggatgtgccgttccaagcagataatgatatccctgttctttcagaatctgttctgactcttccatcatctttctctgcaacccctgtccgcggtattcttttcttaccatggcaatctccatatgtaccgactgctttcgctgttcttcatcaaatttcagatcgtatccgagattctcatccccaagattcttcgtccgtgcgataaaaacacctgccagtctgccatcacacattgcctttaatccaaagccaccggtcatcatatagcttgttacttcctcatcgctatccaaactgaaccattccttattcggaagttcactatagatttcacggatcattcgaagaatatccggtatatcctgctctgttacaactgctatctcattcatatatcttctccgttcatttttgctgtttacagtatcatactgtaaatatgttcatctgtaaatagaatcattctcgcgttctttctctttttatgttataattttcttaaaaacttaaggaggttttactatgagccatatttcctatgcctttaatcattctgacatagaagcaaccgcttacgctcttaccgttctgcctcgtcttggacttgcagaatcagaagcccaggcagaaattaattatcaactctgttgttctgcggcgaaaaaattgattaatcacgccacagatattacacccgacgaatttcgtaccattattgcagcactccaggctgccaaactcatcattcttggtgatattgaagtcgatgcaaaaacatgcagcgaatgcaagagctatttctttacgatcaacaaattattatctacctttgaaaagcaattattacaggaataagatcaactgaactgcaaataaagctgccgatggcagctttatctgtatgctttgctatgcaaagaaaaaccccggaaacattgcatttccggggccgctgtgtacttcttttttgtatatctcgaatgattcgtataaattatcgcttgcataactccaaacgcctattttac

SEQ ID NO: 2827 - DNA, 590 bp, Unknown
  gut microbiota DNA sequence
aggagctgtgagaggacggcggatattcaccgcctcctactcgattttccaagaaatcaacagtgaaaataaatgataacaaatatcaatatcaaaaaaagaattgaagcagaaaaaaacatatggtacatttaatgagttagaagtataaaactgaaaataacataagctaactattgatagacaaagttaactatggatgtaaaggataagaatgaaaaaaaagattgtaatagccattttatgtgtggcagtgtcgatgggaaccatcggctgtggaaacagtacggcatctgccaagacaacacagacgcagacagataaaaaagaagattccaaaagtgaaaattccgaaaaatccagtgaagaaaagcagagccgcgatatatttgcgatggatacgtatatgacggtaacagcttatggagagcatgcatctgaagcagtagagaaagccgagacagagatcaaacgactggatggaatgttgtctaccggaaatgaaaacagtgaagtgtataaattaaatcaaaacggggaagctgttgtttcggatgacacggcgtacttgtatgaacgctctgaaaaaa

SEQ ID NO: 2828 - DNA, 466 bp, Unknown
  gut microbiota DNA sequence
gtcaggtaacggatcaatgaccgtatattattgtggaaatatcttaaaagatatggatatgatgacaccactttccatggcactgacacttccggttattattggaaactgtttcgtacctgcgattgttaagaaaataggacatcagaaaacgctaatccttagttcgattttgatgctggccggattcctgatcgtagcaattaaccctcacagcggaacatttgccatcgtcggaacggtcgtaagaggatttggaaatggagcaattttcgcttgtggattcgcattatcggcacaggttgttgactatggcgagtggaaattcaacgtacgttccgaaggacttgtaaacagttgtgtaagcttcggacagaaagtgggattaggacttggagcagccatagcaagctggatcattgcagctggcggatatgtaggaacagcaaaagtgcagacagcatcg

SEQ ID NO: 2829 - DNA, 15796 bp, Unknown
  gut microbiota DNA sequence
atcatctggcaaaagccataagtgatgtatcatggtatgagctgacaagacagttagagtataaggcaaaatggaatggcaggaaatacatcaaaatagatacattttatgctagtagtcaattatgttctgtttgtgggtatcagaatccagatacaaaagatttgtcagtgaggacatggatatgtccgaaatgcggagcagaacatgacagggatatcaatgctgcgaaaaatatactgacagaaggattaagacaaatagcataaagaaatatatagggcagggactgcccaaattaacgcctgtggagatagtaggttacgaggtcgatgaagcaggaagcccattggcttaagacaatgggtagttcactaaaggggaaattacatagggaaaaaacaaaaaatgtggaaaatgcaggagagggacaaaaaagtggggaaaaaaacgattgaaaaaaatgcgatcacggaaggcgttatctggaaacaactgttgatcttctttttcccaatcatgcttggaacgttgatccagcagttatatacaactgtggatacgatcattgtaggacgcttcgtgggaaaagcggcacttgccagtgtcggaggaccggcagccgtcttatcaacaattgttgttacattctttaatgggctggcgaacggggcagcagttattatcgcacaatattatggtgcaaaggacaggaagagtctgcatgtgggggtacatacggcatatctgttctctgtcgtgatcagtctgatcgtatcactgaccggtacagtattgacaccatggctgcttaaaatcatgaatacaccacaggatatgatggcagattccataacttatctcagaatttactttatgggaattctgtttacgctggtctacaatatgggatcggcaatcatgagggcggtcggagattccaaaagaccgcttctctatctgctgatctgctgtgtgatgaatatcatactggacattatcatggtggtaggaatgaagatgggaattgcgggagcagcactcgcaacggttatttcacaatgtgtcagtgcggttctggttacctggtcgctgaccagggcatatgatgctatgaaattaaagttccgggaactccggatggatgccggagtattgcggaaagaattgaaaatcggtgttccgggggcactccaggcatgtgcctacggtgtgacgaatgtagtgatccaggcatccgtcaacagttttggtacagataccgctgcaggatgggcagcttacggaaagcttgatatgatcttctggacagtatcgagtgcgcttggtgcggcagtgaccacattcgccggacagaactacggggcaggaaagatggacagggtatataaaagtatccgggtgaatgtagtaatctcttatatatttacaggagctattattatagtcctgtttgcattctgcgaaccgttataccatatgttcacgacagatccaaaggtcatcgggataggagtatatatgttacgtttcctgattccgagttatctgttgagtgtgctgcttgagaatctgtccggaggactgcgtggtctgggagatgtcctctggccgactatatttacattcggaggtctgttctttgtaaggcttccgtggatcataatccttacgaagatgcatcataaggtggagatcctgctgatcagttatccgatggcatggggggcaacattactttgtctgatcccgtactatttctggcggaagaaaagaagaatgagtacatatggatcccatcttcaaaaatcatagattatatgttaaaatatagacagtatgtttggagaaaaaagtagcaggaaaggacagaaagaatgaggtgtgcgatgacggataagaaggactgtatgacaatggagcaggcagaacagaagatggagtgcctgagagaagtgttctcaattgtacgtctggttgatggtgagatgctggagaagagagcagaacacagtccggatgcagatgcaatggagatgtgtcagtgctattcattctggaataaggcaaagccgtgtgagaattgcatatctatgaaatcgctgagagaaaagaaacaggcagcaaagctggaatttctggattcggatatttttcaggtattttcaagatatgtggagattgatggaaaaccgtatgtaatggagatgttgaagaagctggatgaagacacactgattgatgcggttggatatgggaagatggtccagaagctttctgtttataatgacaagctttacagggatgcgctgacaggggcttataatcggagatactatgaagatgagattaagcatgtaaagggaaaagcaggggttgcgattcttgatgtagatgattttaagttatataatgatatgcatggtcatcacgcaggggatatggcactgattacagtggtggaagtaatacggcaatatatcagaaagacagataaactgatcaggtacggaggggatgaatttctgcttatactgccggagattgacaatgagaactttgtgcagaagctgaataagattaagaaaaaaattgctgaaacgagtgtaccgggatataatcggattaagttatcggtcagcatcggaggtgtgtcagcgacagaagagacagtggaagaggctgtccagagagcggataaacagatgtaccttgctaaaatgtataaagatactgcaatggtagaggaaatggatcagaaaatagcggaggaggatcatgttgagcatacggatattctaagaccgctgattcttattgtagatgattctaagatcaacagagaacttctggtagaaatattgcaggacaagtaccagatcatagaagcggaaaacgggaacgaatgtgtggagaagctggagaaatatggaaatgatatagcattgatacttctggatattgtgatgccaaagatggatggatttgcagtactggaatatatgaatcaagaacagtggatagacgacattccggtaattgtaatatcaggagaggattcggaagaatatatctggagagcttacgaagccggtgccgtggattatatcaggcgtccgtttgatatgcggattgtatatcaacgggtatttaacatgatcaaattatatgcaaaacagcgcagactggtaaaaatcctgacagcgcagatagaagagagagaaaacctgtcacagatttccgacaagtcataatcgttgatgagacttgtgagaaaatctgcggcaggttttctttgttaataatttccgagtttattcagatatttgtcaatcgtattaagtcttttttcaattcctttggccttatggctgatgatttccagcaaagactctgttacgaactgcggaccgatcatagagttgaaaaatgtattactgtctaccgggactgtgagaagaatatcggcatattgtgcaagcagggaactcggcttatcggtgatcacgatgattgaagctccggcatcgcgtgccatctcggcggtcacttcgtcctgagaagaatatcttggaaaactaaataataccagacagtcggtctgcgagatattgcacatatgatcaatcgggctcatggaagttgtggttgtcatggttacatgcgggaccatctgttttaaatacaggaggaagaaatctgcaagacagatatttcctctcgttgcagcaatgtacttgtgcttactggaaacgataagatccgcagccttctcaaaggtctcaatagagttttggataaatatctcttcaaggttatgagcagcattcttaaaatgccggttgatgtaatcagaagagttgtctaattttgcctgctttgcaatacgctgggatgggatcgtgatactgctggaaatgctgagtactttgtcctggtaatcttttcgcagtgctttctgaaaatccataaagccgtcaaatccgatcgtacgactgaaacggattacggaagattcactcaccccgagctttaaagcaatctccgtagatgtcataaaacaggcttccgaagcattatccagaacatattccgcaatgatcctctgcgtcttggtaagatgtgcagaatggagtaattccttcatatctttcataatatagttcctccgaaagtgatattgataattagattaaagcatgaatctgggaaagttgcaagacggagagcatggaaaaagaaaaaaagcgtgtggaaataggaaaaagaagaaaaaacttatagacaatgatgatttttctcgttatttatatgtcacacaaatgaagcatactccaatctttttgaatgaaaatcgtaaaaaaagaagaaaactatgtgcatattgcacaaaaaacatgtgtgaaaataataacatatatagataaaatgcaaaaataattatgtacaaaagaaaaaaggtatggtattatcaaaccaacgaacgacgaaagagaggaaaagaaatgttacaaacaattgaaaacgtgaatgcagtcgttaacaatttcgtctggggggttccggcaatggtctgtatcatcggtgtagggcttgtgctttcagctcgtacaggatttatacagttccgaaaatttgggtatgcccttaagaattctatcggacgtatcttcacaaagtcagaagcgaaggaaggtagtatcactccattccaggcagtatgtacggcgcttgcggcaacggtaggaacgggaaatattgccggagttgctggtgcgattgcaatcggaggagcgggagcagtgttctggatgtgggtgtccgcattgcttggaatgtgtacgaagttctcagaagttacacttgcggttcattacagagagaagaatgcagagggagattatgttgggggcccgatgtattatatcaagaacggtcttggcaagaaatggtactggatggcttcggtctatgcgatccttggaagtttgacagtgcttggaacaggaaatgcaacacaggtaaataccattacgacatccatcgattcagcacttataagctacaatgtgatcgatgacgcacaggtaggtatggtgaatctggtgattggaattgtgatcgcagcactggtagcggttgttttacttggcggagtaaaacgtatcggtaccgtaacagagaagctggttccattcatggcagtattctatatcatccttgcaatcggagtagttgtactgaatgcagatagagttccacatgtatttgagatgatctttgtaggagcatttaatccgtcagcatttaccggcggtgtggttggaagcatgtttatgactatgagacgtggtgtttccagaggtatcttctcaaatgaggccggaatcggtaccggatcgatcgcacatgcatgtgcagatacagatgagcctgtaaaacagggtatgtttggaatctttgaagtatttgcagatacaatcgtgatctgtacactgacagcactggttatcctttgtggcggtgaaggaatccagtacggcgtggcagcaggtgcggagcttacaatctcaggattcgtaactacatatggcagctgggtgacgatctttactgcaattgcaatgtgctgtttcgcattctcaacgattcttggatggggactttacggagcaagatgtgtcgagtttgtatttacaacaaaggttgtgaaaccatttatgatcgtgtatgcgctggtcgcaattcttggtgcaacagtggatcttggtatcatctggggaattgcagatacctgtaatggtctgatgtctatccctaacttgatcgcattattcctgatgtcaggaacagtggcaaaactggtaaaagattactttgcaaaagaaaagaaaaagaattagaaagacaaaaaaataacttactagtgaaaaaaataacttttattgcattaacaacttgagtgtgctaatatgagttcagagataaatgaagaatattcttcaacaaaataatgaaaagaaaaataatcttcatttcaaaaacaaacggattaaaatttttaggaggtttttcaaaatgaaagtaggatgtgtaaaagagattaaaaacaacgagttccgtgtaggtatgacacctgacaatgttaagagttatgtgaacgcaggacacgatgtttatatcgaaaaaggtgccggagaaggttcaggattcttagatgccgaatatgtggaagctggggctaagatgattgatacagcaaaagaagtgtgggatactgtagagatgatgatcaaagtaaaagagccgcttccggaagaatatccattattccatgaaggactgatcctttatacatatcttcaccttgcagcagacaagccgcagacagatgctcttctcggagcaaaggtaaaaggtgttgcttatgagacactgatcgaaagaaacggaagtattccgctgcttgctccaatgagccagatcgcaggacgtctgagtattcaggaaggtgctaaatatctcgagaagagatttggaggagaaggagttctcttagcaggagttcctggaacaccaaaggctaacatcgtaatccttggaggcggatctgtaggaacaaacgcttgtaagatcgctgtaggaatgggcgctaatgtaacaatcatggacatcaaccttcagagacttgcttatctggacgatatcttcggagcacgtatccagacacttgtttctaatgatgcaaatatcgaaaaagctgtaaaagaagcagacctcgtaatcggatgtgttctgattccaggaaaatcagctcctaagatcttcaagaaaaaatatctcaaagagatgaaaccaggtgctgtatttgtagacgtagctgttgatcagggcggatgtggtgagacaacaaaagttacataccacgatgatccgatcttcattgaagatggtgttgttcactactgcgtaggaaatatgcctggagcagttccaagaacatctacaattgcactgacaaatgctacactgtcttatggactgcagattgcaggaaaaggacttgagcaggcatgcaaagataacgaagttatctattcagctgtaaatacatacgatggaaaattaacatgtaagaacgtagcagacagctttgactgctatgaatacacagatattagaactgtatgttaattgaattgctattataataagaagcaactaaaactaaatgattgattcctatgagtggggaaatgccggtatcttggggtgccggcattttccttttgagttttctgtattggacttaaggcatgcagtccctgagatgatagcattgtaagaaatgtaaatgcattaaagatcggagtaaaagtaaaaagatagagaacagtggttgtgcaaaatatataaaaaatacaagaattttcgaaaaacacttgaaaaaaatacacataatcctataatggaggtaggttaaggaaatattaagaaataaaagacattggaggtgttgtcatgattagttttattatttgcttagcgttacttataggagggtattttgtctatggtaaagtggttgagaacacttttgcaccagatgacagagagacaccggcggtccggatcaatgacggtgtggattatgtagtaatgccgcagtggaagttgttcctggtacagcttttgaatattgcaggtcttggaccgattttcggagctatgcagggtgctttatggggaccggttgtattcctgtggattacattcggtacgatctttgcaggaggagtacatgattatttttcaggtatgctttctgaaagaaatgacggagcatcgatttctgaagtgtgcggaatctatcttggaaatgtgatgaagaatgtcatgcgtgtattcagcgttgtgcttttggtcatggttggtaccgtatttgcagtaggaccggcaggattgatcgttacattactgggaaataaaggtgtgacaggagttttggctaatccggaagtatggctttggatcatccttgcatattactttgttgcaacatttatttcaatcgataagatcattggacgtatctatccattgtttggtatctgcctgatcgttatggcagtcggtgttatcgttggtattttcacgaatccgaattatacgattcctgagatctggacgcattttaccaacatgcatccggcgggaaagccgatctggagcttcatgttcattaccgtagcatgtggagctatttccggattccattctacacagtcaccactgatggcacgttgtatgaaatctgagaaacagggacatttcgtattctatggtgcgatggttgcagaaggtgtgatcgcactgatctgggcagcagcaggatgttctatttataaaatcacaggtggtctgagtacaggtctgaatgatattcttgcaaatggacagtcagcagctatctatgatgtatgtatcaagacgatgggcggtgtcggtgttgcacttgcaatgatcggagttatcgtatgcccgatcacttccggagataccgcattccgtagtgcacgtctggtactggcagactggttcaaagttgatcagaataagatgcagaaacgtctgatgttatgtgttccgcttctggcagtcggagcatttgtcggacatctggattatgcaatcgtatggagatacttcagctggacaaaccagacacttgcaatgattgttctgtggacagcaagtatgtatctgttccgcgagaagaagaattactggatcacagcggtaccggcaacattcatgagtgcagtttccatgacctatttcttctgtgcagaagagtgtctgggactttctacgaaggttgcttatccggtaggaattatcctggcagcagcattccttggaatctttatccgtgcgacaaagaaaccaatgaaagcatagttgtaagacagtgtaatttgaatacataaaaaggcagaatgaattgacggaaatgagatgatgaaaagatgaaaccacaaagactgggtaatgtatcgattccggatgaagaattggtaaaagacaaaaaagaatgtaagaagatcggaccttgtggcattggaaaaaaggcagtgtatcttagcagcttctatattgacagaaggtattacataccgatcagttctgtaaaaaggatcttcaaaagaatcgccatgagtaagggtggatttacaggaaaaggagtattcggtacattatcctatcttgtggtcgtatatgaggacggaaaagaaaagcaatgtaatttcaaacatgaagaagatgtggacagatttgttgcatacatagaagaaaaatatccggatattccggtacacagtcttgaggctgagagaaagctggcagagaaggaaagatggctggcagaaaagcaaagagaaagaaatgtatcggaagaaacaaaaagatgtctcgtgaagctggaacaggcagaacagtatctgaaaaagcaatcggatatctatatggacttgagtcagtcggcgaagaaaaagcgtacttatgacagaagtaatccggcgtataaatgggtagctcttgcaatcgtactgatgggcggtgcggcattcgtctatggtatctatgcattgacgacgcatgcgggatttggaatgtacttcctactgttcggtttggccgcaatcttcttatttgccggagcaaatgtacttccgacttcgaaaaataacaagaattatattgagaagcggctgacagaatcaatccgtcagatggaagagtatatcagagaatatccggatttcccggtaccggctcattatgcacatccgattgtgttaaagagaatgcaggagattatgaaagaggggcgtgcgagaaatatcccggaagcattgcaggtcttgaaaaaagatctgaaagcgttgaattccagcgtagtcgtcgagaaggaagagtatgatgaagtggtagcgatcaaaccgatgtttctggtgatggattataaataaaataatggtaaacggattttgaaatatggctggcatatatcatgaaagaatatatgccagccatattttatacgtcatgtgtttggaagaagctgccagtggcaggtctctagattctaagcttaaatacatatgccaaaaccaggaatagtattgcgatacattttacaccaatggacactccgacataccccggtaacaaatagcccctttgctttttccctgatattaaagaaatgatatcgattataaaaaagacgattagaacaattgcggcaccgaagatcagcagcatggcatcaccatgattatgtgtcagtgcagttacgactccaacatttgtaattgacatccaactgtagattatgtatatcatgcatattaagttaaaaataatatcaaagacaactttttcgtttcttgttccgttcttcattttaatgtcccctttctttaagagaatttggtaatagccggcattcttatcaattttttgtttcttctcttttgttgtctataatataaaccatcaagtaacttgaaggtcaatagttttagaaaaaataatttgtaactgcttctgtattgtggaaaaatcagaatgttggtataataagaacatatattcgaaataagaaaagaaaactttgtgaatgaatttgagagtaaaggaaggaggagaacaagcatggcggacaaaggacagagaagctatatcgcaatcgacttgaaatcgttttacgcatcggtagaatgtaaagaaagagaactggatccgatgacaaccaatctggtagtagcggacaaaagccgcacggaaaagactatctgtctggcagtgtctccttccttgaaatcctacgggataccgggccgtgccagactcttcgaggtcgtgcagaaggtaaaagaagtgaataaaagacggatctgcgtggcacccggaaagaagtttgcaggagcttccgtagataatgaagaaataaaactacatccggaattggaactggattatattacggcggttccgagaatggcattatatatgaaatgcagtacggagatttacaacatttatctgaaatacgttgcaccggaggatatccatgtctattccattgacgaggtattcatggatgtgaccgattacctgaatacttaccggatgacggcaagagagctggctggaaagattattcgggagatccagcaggagacgtcgattgcggcaacggccggaatcggaacgaatctgtacctgtgtaaagttgccatggatattgtggcgaagcatattgagccggatcagaatggggtgaggatcgcagaacttagagaaatttcttatagaaagcttttgtgggcgcatcagccgatcacggatttctggcgtgtgggcacggggtatgccaggaagcttgcggaagtcggattatttaccatgggagatgtggcaagatgttctcttggtaagccgggggaatattataatgaagatttgctgtaccggctatttggggtgaatgcagaacttctgattgatcatgcatggggatgggagccatgcacgatcgcagatgtgaaggcgtataagcccgaaaataacagtatgggtgcgggacaggtactgcattgtccatataatttcgagcagacgaagatcgtggtaaaggaaatgatcgaccagctggcattggatctggtagataaacgtctcgtaacggatcagatcgttctgacgattggatatgacatcaagaatctggaacaaggaacgaagaaaaatgtaggggagatcacgacagactggtatggcaggaagctgccgaaacatgcacacggaaccgctaatctgaagcagcatacttcttcatcgaggctgatgacacaggcaggtgtaaagctgtatcatgaaattgtgaatccggatcttctgatccgccggattacgatggcagcgaatcatgtgatcagtgagaaagaggtccaggaagaacagcagtatgaacagatgaatctttttacagattttggaattgcaaagaaggaaaaggaagagaagaatgagaagctggaacgggaaaagaagatgcagaaggcgatgctggatatcaagaaaaaatatgggaagaatgcaatcttaaaaggaatgaatctgcaggaggatggaactgcgatggaacggaaccggcagatcggaggacataaagcgtgagaaatgaaaatgtttcgaaagaaaatgttacacaggtttcggggaaattacagaaatcggtgatcgaagtgcagcaaaagtatggagatattctgaaccttccgcatcatgtatcggagacgcatcctccgatgccgatagcagaccgggcggctcagtttgcaccatttgcggcactgaccggctataaagaagcaatagaagagacagagcggctggcagagaaaaaaatcgagcgggaatgcgagtaaaggcaaaaaatggaagaaaaatatggtgaatctcttgaccttcaagcggcttgaaggaatataattatcttaacaaagagggagaaggatgtagatatccggaatgaaggaaggtgacagtatggaaaaaagtgaagaaagaaataaaatcatttctgagcttcagacagtaataaaagaacaggttgaattaaaagaaatcgaaataccgggaaccattacatttcaggttatgtctgtggatggtgggaacgtaccggtgggagccggtgaagtgcttctgcttcgttacagtgcgactcatctggaatacagtcacgagttggaagatgagaaccagaaatttcatatggcgcttcatatcatttattgtaaagagcataaaggtttgtttggaaaagtaaagtacaagacgataaaacaccgcaaagaaatcattacagaagcagactgggaaaatggaaagaaggtgtcactttatgaagattaaagatgtagaaaaacaggttggcatttccaaggcgaatataagattttatgaagaagaaggactgatccatccggcacgtaatcaggaaaataattaccgggagtattcaaaagcagatgtagaacaacttcaggaaatcaaaaagttgcgtctgatcggtattccggtacaggagatcaaagaaatctatgaagacagactgaccttgcaggaagctttatcccgcagactggacgagatcgaaaaagaagaacgtacattaaaggaaacgaaactgacctgccagaaagcattgaaaagtaagcttgacattacatcgatcgatcagcttgagattgaggaagaaaaagaagagtggcaggtacgtctggcaatccttttgaaagaggatattgtacagaaaaaattaagcagggatgagatgaacaatgagattgcatgcttttttattgcaggaacgattttaagtgtgatatctatatggctgcttccgaaggattatatcggaacacatctttatgtcgggctgatttcacttgcaactgtggtaggtctgctgatcataggaacatgtccggcgaatatgaaagtgcatctgacattgctgcttctgggggcagttgtacagcctgtcggactttttacaatcggaacagtgatgggaagaggatatattgtgtgtcgtgatacagcggtattgaagcagtatgtaatctacctgtatggcggggcatttattcttgcaattatattgtggatgggctcaaagctgaaccgctatatcctgaacaaactctggatcagtatgtttgccagcctgatcatggcagtagtgatagcgcagatgctgaatcagaagtatggacacttgatggcaaccggtgaacttatcgtgggatttttgtgtgctgttatttatcttgctgctgtatccggaacatggacactggcgaatgcagactggggaaaatataaccggtatcatgcagtgtatacgtcgaacaagatgatcaatgtattcgcaacgatattcaatgcagccggatactatagtggaaagaactggaggagatagcggatatgaattatattacatttgatgagatgattgaagtgaacggattgttggaggagaaagggctgaattttaaggttcacttgagagatgcctgtggaaaacagtcctgttggatcgaaccgttaggaaactgtgcatgcgagggacggtatgaggagatgtatcaggttgtggaggagtattttagaaggaaagggcagaagattacgtttgatgagacgaagttgaatttttttgctgtttaatactgtattgtggcttaccccggtccatgatactgaattcaatagcggaattgtaacctgtgtatggccgaaaagttgtggcggaagccttgactttccggctttttttgtacacttccggtatcacagcagttatggttccgctgttgaatcattacagcatgcgatacccacggaatgaccgcttcatgtaataaacagcaacaaaatttgtttgaaaatatattgaataatatttatttatatgttaatctatataaaagcatacttcaaaagaaatctaaggtatattgaatcatatactatctacattctaattgcatttcaggaatctatgttttttataccaatcaattgtaaaaagcaggagaggactgaacgtgtaagtaagatatcctcctgcacataggaggaattaaatatggcgagaagaaaaagtcagaagagacgtaacaaaaagtatcaggtaagcaaccgtcagttaaaggcaaaacggccatacaaagatacgatttttcgaatgttgtatcatgataaagaaaatctgctattattgtataatgcagtgaatggtcggaattatactaatgtagaagatttgcagattgtcacattagaaaatgcaatttatatgggaatgaaaaatgatctggcgtttattatggatatgaatttatatttgtatgagcaccagtcgacgtataactcgaatattccgcttagaaatttattctatattgcggatgaatatcaaagattagtagttcggaaatctttatattccacggtaatacaaaagataccgacaccaagatttattgtattttataatggaacgaaaaaggtagaagattataatgaattccgattatcttcagcttatgagaatccgacggatgatccggatctggaattaagggtgactatgttgaatgtaaatgatggtcataacctagaactgatggaacactgcagaacattaaaggaatatgccaaatatgttgcgagggtaagaaaatatgtgacgcagaatattcctctggaagaggcagttacgcgagcggtagatgaatgcataaaggaaggaattctggcagaatttttggtgaagaataaggcagaggtgatcaaagtgagcatctatgagtatgataaagaatttgaagagaaaaaattacggaaagcggagtatgaagctggtgtggaggctggagtagaatctggaattgagcttggagaacggagtcttttgaaaaagcagattaaaaagaagttgaaaaaaagaaagtctataggacaaattgcggatgaattggaggaagaggtaactgcaattcaacgaattatagaagaaatacaaaaagaagaataagtatatgattaggaaggctgttgcattgcaagagtcttcttttactattcaaagctttttaccttaaaattaaaaaagtaaaggattcgtcgattgacgtatttaacaaaa

SEQ ID NO: 2830 - DNA, 52159 bp, Unknown
  gut microbiota DNA sequence
gtcctccgttctctcatccatatattctttcagtgaagctctccagtccggcatctcgtatacattgatgatacgaaggataaaattatccaggaccgcatatgctggtcttgcagaagaaagatccgattcgctggtcactaccgggcgcagagtgatcctctttcctgcaagtttcaaaacttcctgcgcaaattcataacgattacatacaccctgacaggttgcatggtacgttccgtattcattcgttttgatcagataaagaataatacgtgccaggtcttttgcactggtcggagaaccaaactgatctgatgcaatcagaagttcatcctttgtatctgctgcatgaagtacgcggtttacaaaattattgccatttccatacacccagttactgcgcaggatgaaatgtttgtgtgtaaattcctttacataattctcccctgctctcttggaacgtccgtaaacggtcttcggatttgtgtcgtcgaactccgtatatggggtatgccggattccgtcaaatacatcatccgtggatatctgtaccatcttggcccctgtctttcttgccacaatacttaaatttcttgctcccagcgcattcacacggtatgcaagctccggttctttttcacagaaatctgtatctgtgactgccgcacagttgatgatcacatccggacggttgatcactccgaaattcagcacctcatcggtgtccgtaatgtctaattcttccttatctgtgttaaacacttccatttccaatggatccaacacttcattgatggccgatccgatctgtccggatgcaccaacaatccataattttaacatatctgcttcctcctcatctgtcgggaccggctgacgccagtctctctgctttccttttaatatagctagtatacacaaaaaaaccgtcagtttcaattcttaaccaacggtctcaaatctactcctctatggtatttttttccacacatcggtaatgtcagcgtttttactgacctcctgcaccacttttgtgctgcttatatgtagaatatctttcccttcattctgcataaatacaaacaccgcaaacagaatcatacaaataaatgtacggattcccaggcttccctgttctgcctcttcctcaccatacagttcactataagatgccctgtatctgggatgtattgccggtatcccggattcctgatagctgtaacgtgtctgttccagaagttctcttcttcgcttttccgcttcattcacatgcgctcacctctgaaacaatatatgagatatctgtttcactcatgtgcaaaacttactgcatacaggctctttttcatgttttctaagagtttctgcttaacgatctgccagttcttttacgatgtcttcccatgtcagacctttttctaccatcagaaccattgcatggtacaggaaatccgcgatctcatatttgacttcttccggattcggattctttgctgcgatcacaacttccgttgcttcttctccaatttttttcaggatcttatcaattcccttatcaaacagataattcgtgtaagacccctcctttggattctctttacggtctgcgatcgtgtcatataccgattcaaagatccgaaggggattcgtctcatcatagtcaattcctacaagcggctggaagaagcaggtcggattaccggtatggcatgctgctccgatctgatctacttttgcaagcaatgtatccagatcacagtcaatcgtcagggattttacatactggaaatgaccgctcgtctccccctttacccagagtttctgccggcttctgctaaaatacgtcatctttcctgtcttgatcgtctcatagaaagattcctcattcatatatgccagcatcaggatctcctgtgtcttataatgctggacgatgacaggaatcaggccctgatcattggtcttaaactgtgagaactccatcatactctcaaaagatgtcatcttaattccttcttccgtacacttatctttgaatgccacacaatcaatatctgtacggcttacatatcttcccgaaagcccccggacacccgggcatttcaaaattttaaataactctgactcttcttccgtatccgtaatgatcacacacggtacatctgttacattcataatggaattcagatccagtctgtgcataaagacaatttcactgctgtaatcctggatcagatgctgatgtttgaacaatgcatcaaaatcatttaatgataccgcaagcttctcttttccgaatctctttgccgcatcctccatcagtttgacactatccggcttagagaaattcagcattgcccgttttgcacctgtatacagaatcttcttaatatcttcctggcgtctgatattgccgcctgcgatcatcgggatcctgatcacacgattgatccgtttcatcaatgtgatcgtttcatcatgttcttcatccgaatctgagagatccagcacgatcagttcatctgcaccgtgatcactgtaatattttgcaagttcaattacgtctttggatacaacagtcggatcatcaatccatctgaccgctttcccgtcttttataaaaatgcaaggtattaatcttttataactcatgtctgtccgtctccttttagaggcttccctttgtggtccatgcctcttttatccttggctcttccattgtcgccatatcaagtgcttttccgaacgctttaaacagcgcctccgccttgtgatgatcgttgataccatccagaatcttcaggtggatattcatcattgcgctgtaagaaactgcgtaaaagaattcccttaccatctcagtatccatctcacccatcttatctgacacaaactctgcattataattcagatatggtcttccggagagatccaccgcacaaagtgcgagtgtcttatccattggaagcataaagtggccataacgtttgattccggctttatctcctattgcttccagaatagcctgtccaagtacgattcccgtatcttcgatggtatgatgactgtccacttccagatcccctttcgcatgtaccgtcagatcgaacaatccgtgtcttgcaaatccattcaacatatgatcaaaaaaaccgattcctgtatcaatctccgtctttccggttccatccaggttcagagttaccgtaatatccgtctcctttgtcgttcttgtcctggtgactgttctgttcatagctcctcgcctccttatttttctgctgtcttctactcttcgccctcaaaacggactttgatagaattggcatgtgccgtcagctgctctgcctcggcaaatgcttcaatatctttatgtatatcgcgtaatgcttcttccgaatatccgatgatacttgattttttaatgaaatcatccacagaaagcggtgagaaaaattttgctgtaccattggttggaagaacatggttcggtcctgcaaaataatctcccagtggttcacttgcgtattccccgataaagatggcaccggcattccttacttttgtcatcacatcatatggattctttgtctggatctccagatgttcggatgcgatctcatttgcaatatcaatcacatcatccatcgtatctgcgaccaggatataaccgtagttgtccagtgatttccggatgatctcacttctggaaagttcttttaagaaaccatccacttcatccgatactttccgggcaagttcttcagatgttgtgaccaggattgcagatgcaagttcatcatgctctgcctgtgaaagaagatctgctgccacaaatcttggatttgccgtctcatctgcaataacaagaatctcgcttggtccggcaattgcatcaatgcttacataaccataaactgcttttttcgccagagcaacatatatatttccaggtcctacgatcttatcgacttttggaatgctctctgtcccgtatgccagagcagcaatcgcctgtgccccgccgactttatagatgacatccgcgccggcttcatgtgctgcaaccagcgtgtttggtgtcacttttccatcttttccgggcggtgtgaccatcacgatctcatcaactccggctacctttgcaggtacaatgttcatcaatacagaagatggatatacagctttcccgcccggcacatatacaccgactctgtgaagtgatgtgactttctgtcccaggattgttccgtccggtttgctgtcgaaccagctgtactgtctctgtttttcatgatacgtacggatgttcagaagagctttgcggatgatctccaccagttttggatctacttctttatatgcctcttcgatctcctcttctgtaaccttaatattgtctgcagtgatatctgcatgatcaaatttcttcgtatatgcaaatactgcctgatccttttcttcttttacatgagcgaggatttcctgaactccctgttcatactgaccgtaattattcgggcttctcttcagaagatcctccagtaagttctcttttgcatcttttgtcaaacgctgtattctcatagccttaaccgccatcctctcattttattttctttctgtctgtacagtattatacctgctcccgcagtcttgtcagcaggtctttgatccttgcgctttccatacgcatactgaccgggttcacgatcatcctagcagacaacggacatacttcctccaacacttccagaccattttcacggagggttgaccctgtctctacaatatccacgatcacttcggacagtccgacgatcggtgcaagttcaatggaaccatttaacttaatgatctctacagtctgatgcttcgtgttatagaaataatcttttgcaatattcggatattttgttgctacccggatcagttcatgatgctgcagaagtggtgcggcatctttgtatccgcatacacacatcttacattttccatatccaagatccagtacttcatgtaccttacgtccttcttccaggattgtatcttttccaacgactccgatatccgctgcgccatattctacatatgtcggaacatccggtccttttgcaagaaagaaacggagtttcaattcttcattggtgaaaatcagcttcctggaatctttatctttcatctcttcacaggtaatcccgattttctcaaataattctaatgtctgttttgccagacgtcctttccccagggcaaatgtcaggtatctcataatgtctaactcctatctgtactattcacgatcttctgctctccggtaacgagattgaccatcgttacttctccggtctcctcgatatataccagacttccggcataataatcatttccgtaacggatataatcttccaatccactgttttcatccttcttcagaagttctgcattcttggcttttctacggaaatccttcgcaaggcggattgcttcaagctgtcttccttccgcatatatgatgatcgtattctttcttggatatacgatgcggatcttctgacgggtcagtgcactcaccagttcatcaattacaatcgcaaaaccgatagatggtgatttcttaccgaacttttcaatcagatggtcataacgtccaccctttacaactgcatccccggttccgtaagtataaccacggaacacgattcctgtatagtatccataggttcctgtcatgctcaggtcaaaagtgacaaatttttccactccgtaatagcgcaggatgtggtatatcttctccaggcgtctgattgccatcacacctttggagttcggcgcaaggttttccgctttttccaggatatcaattcctccgatcagttcattcaatgctgaaaatgcttctttggagcttctctttgcctgaatactgtccagaaattcttctacaccgaagtaattgcggttaccgatcagttctcttactctttcttccgcctcttcatccagacttgcgtcttcgatcagactctggaagaaatcaacattaccaacacagagctggaattctttcagcccgatcgtcaacatagattcaatcaccagggcaagcatctctgcatctgcctctatcgaatcatccccgacaaattctgctcccatctgcgtcgtctctcttaagcgtccctgataactggaatggttcacaaatgtattgcctgtataacacagacggatcggaagattttcatctttaaataaagttgccgatgctcttgcaatagacggggtaatatcgggtcttaagacaagtgtattgccatctttgtcaaaaaatttatacagatcgttggccggtgtcgttccaatctcctcgcggaacacatcaaaatattcaatcgtcggagtctggatatcatgatatccatataaatgaaatacttttttcaatctgctttccaacgcaagtttttttccgcattctacgttgtatatatcccgtactccttccggagtgtgtaattttttcttcatatgtcctccaggtagtaatatttttcttccagcgctttagtgtgctaccatgttaaaaaatcactttgcattatacgcagtttcatccgttttgtcaagttcatcacgaagttccagatcgagattcaaggcatccaggtatggaacataacatccatggaagaatttcataaaaaaccgttcgtccagttcatcaaaacggaagctttttcttcctccgttctgtgcacgcatccagaacctgtatagttcctcaaaacgcatataatataagatatttctagatgaataataaatcaggacaaatgcaaccccctgctgcttttcaaaattcttcataaattccacctgatgttcatgaatattctgaagcggaaatgtctctgccacacattccttcgcatcaaaacacaccggaatcccctgcactgcaccgatataatcgatcgtactgcgctgatcaaaataagccagcgtgatctgtctgtgttctttatccatacgtaccggcgtgatcggggtcgggatcttctgcatcagtgccagattcttttccagataccactcattggtacgattcaccatatcttctaatgtagaacctctaaggcctcttgagttccatgttcccatgccgtctcctttatcagtttccagaatgtctccggaacttttgcgtaaaatgtcttttcagaaagattctccagttcttttttcataccgggcattgtaagctgataggcatgcaatacctggtctttaatcttccattcttttttataacggtcattccatttcttagaaccgtatttataatctccgagaagcggatgtccggtgcctgccagatgtgcacgaatctgatgggtacgtccggtgatcagatgtactttcagaagcgtcatctcctgattccatgcgattggaagatattccgtctcgatcggcaggccattcgcctcttttgaagaagttccatttgaaaaactgacgcggttcgtcttctcatcttttacaagatatccactgatatgtgccggttccgtgatcctgccttttacgatacagagataatactttttcagcgtacgttctttgaataattctcccatttgctgcaggcctgcaagactctttcccgcaacgatcaacccgctggtattccggtcaagacggttgcagatggacgggcggaaagtctgaagattctcctttgtcagctgtccggattccagaagatatgctgtcacattctctaccactgatacatctgtctccttcgctttctgcgacaacatccccgacggcttgttaataaatattacattctgatcttcatagatcacatccagctttaccgtattctttatgttttcttctactgtctttcccgccgcctggaatttggcaattgtatcatccgccaggaacagtttcacactgtctccctttctcagatgttcatttccggtcgctttctttccgttcagcacaatattctttttacgcagcattttataaataaagcttccaggcgcttcgctcaaatatttgcgcaacagcttatccaggcgctgtcccgcctcattgtcatgaatgatcagttctttcatatactcttctaactcccgctaatcttctacatagaaatgtttaagatgatcttccggatctttttttctctccgtaaagattctttctgttctacttctgccatattattcatgccctccgcacgcgctaaaaatgcagtataatcatggaaaatcttcaccgtcatcttatcataatgattgtctttcaaaatgtctttgatatgacgggcaagtgctgtctcatcggtcttcggattgctggcatatccgcagacaatgtgtccggatactaccacagcatccagcggcatgatcttctgtgaactggtaatgatcatatcatatgccttcagtatcagaggtgctttttcctccagttcctgatattttgcttcttcgatactctcgtaaggtgccattgtgataaattcaaccagcatctttgctgccggaaggcatccgactaccgctacaacggtaagcagattcagtctggatccggtctgaatatatccggttacaaagattgcgatcacaattgcaaattctacgaccgctcccagaagatatttctgttttcttgcctttacatatcccggctgtcctttttctgttctcatattgtctgtcctttttgttttctatttataatttttctgtaatcgtctttttctatcatgaaaaaacattttcccaagctcatagacattccgtatatgcctttatctatccgcatggttgatcttcatcatcccccatacaagcaggcgatccggaaggatcttggaaaggattctggaacctttcattgctgctccatataccgaaacgcgtcttccacgcacactgtctgtaagtgcctgtgtcaccaccgcttccggttcggcacagagtgcttctttttcacttgccgcaagcgtaccggcccggtcaaagaattctgtacgtaccggtcccggacacactgccgttaccaggattccccgtttcttcaattctgctgccagtccctgtgaaaaacgcagtacatatgctttggaagccgcatatacacagaatcccggctgtgcacagaacgaagctgccgaagccagattgacaatccggctgcctttcgacagatatggcaggcagattcctgtcattctggtgagtgctgtacaattcagatcaaccatgccgcactgttctttcagatcaatgtcactgacgttaccgatctttccatatcctgccgcatttacaagcatccttacatctgcctgccggcgatccagttctctttgcagtttttcgaaaatatagtctctctgcatatccccgtcgaagatcctgaccgggatctttacctgttccttcagacttttcagacggtctgtccgtcttgccactacccataattcatccaggttcttatacagctgcgggatctgaagcgcaaattccctgcccattcccgacgatgctcctgtaacgatcgctattttcaactttaacacctctctacatccatccggctgccggtttttcatcatttcccctttatgctatttctcttgctgttatttcttcttatgcacattccggatcgatttctttttctgtctgcttctatccgttcctgtattctgtctgctgttctgtctgtcactttgcacagtatttcttctggaatgctcgtttttgtttttcctacggtcattctgtcccggttttccggaagacttctgattctgcgttttctgtcccggtactttctgctgtgatctgccttcgaattttctcgggcgtatcagacagtgtttatcaaatcctaccagatccatgcggtgtgccttcttcagtgcctccatgaccagatcataattcttcggatcccggtactggatcagagctctctgcattgccttttcatgcggattcttcggcacatagaccggctgcatcgttcttggatccacgcctgtataatacatacacgtcgagatcgttgacggtgtcggatagaaatcctgtacctgttccggcatatatccaagatcccggatatgctctgcaagttctaccgcatctttcattctggatcccggatgcgaagacatcagatacggcacaagatactgatctttgtggatcttctgattcatcttattgtactttttcacaaattcctgatatacactgttctctggttttcccatcagtgtaagaacatcatccgatacatgctccggtgcaacctttaactgtccgcttacatgataacggcagagttcctccagaaatgcatcacttttatccgcaacaacataatcgaaccggattcccgaacggatgaataccttcttcacttttggaatgtcacgcagttctttcagaagtttgatatagtctctgtgatctactttcagattcggacacggcttcgggaacaggcactggcggttcttacacacgccacgtgtaagctgtttttcgcaggatggctggcggaagttcgccgtcggacctcctacgtcgtggatatagcctttgaagtccttttcctgcgtaatcatcttcgcctcatctaacagcgactcgtggcttctcacctgcatgatccttccctgatggaaggtaagtgcacagaagctgcatccgccaaagcagccacggttgctgatcagactgaacttgacctctgagattgcaggtacgccaccgtccttctcataagaaggatggtaggtacgcatatacggcagtccgtagacatcgtccatttctccttccgaaagcggaagtgccggtggattctgtactacatacagatgagcattatatggctctaccagccttttcccggcaaatggatcggtattgcagtactgtgtataaaagcttcttgcatactccagcttatcctgcttcatatcttcgtatcccggaagaatctccgcatcatagacactgtccagactcttcgtcttataaaccgttccagcgataaatgtgatatcactgaccgcaataccactgtccagagcttctgcgatctcaatgatcgaatgttctcccattccataagatatcagatctgcaccggaatccagtaggatcgaacgttttaatttgtctgaccagtaatcataatgtgccagtcgtctgagacttgcctcgatccctccgaggatgatcggtgtcttcttatatacctgacggatcaggttactgtatacaaccgctgcgtaatccggacgctttcccatcacgcctcccggcgtataagcatccgttctgcgatgctttttcgacacggaataatgattcaccatcgaatccatatttcccgcagaaacaaggaatcccagtctcggttctccaaggatcgtaatgctgttcttatctttccagtccggctgcgcaataataccgactttaaatccatgtgcttccagaagtctcgtaatgatcgcatgtccgaaagacggatggtctacataagcatctccggaaatatagacaaaatccagctgttcccatccccgttcttccatatcctttttgcaaatcggtaaaaatttattttctgacattctctatctcctcttctgtcagcagccggtattctccgggcttcagattttcatccaggcacagggttcccatgcgttctcgcttcagataagtaacttctttacccactgcaaggaacatcctcttcacctgatggaactttccttcatggatcgtaaggcggatctcagattcttccgcgctcctcataatgtcaagttttgcaggtcttgtcatctcttcttcctctgcgccgatatcgattccttctgcgaaccgctttacatcctcttctgtaaccattccatctatttttgcataatagactttatccacatgctttttcggtgccagcagacgatgtgccagatctccgtcattcgtgatcagaagtaatccttccgtatctttgtccaatcgtccgaccgggaaaagatcctttcgtttcttctctttgatcagatcgatcaccgtagtatctctccggtcttcagttgccgataccacgccggccggtttattcagcatataatattcatacgatacataagatatgttccggccacagatcgtcacttcatcactggtctcatcaatctttgtatctgctgcttttaccactgttccgttaactgctgcttttccctgacggatctgtttttttacctcctggcgggttcccacacccatctctgccagatatttatccagacgcatcatcttaacacagcctccatcccggcagatatttgttcttcaatgtaccattggataccttcccccatccaagcgggaacccatccacacatacaagataccagccttttgcttttctctccgtcagatcgtccacatccagtgtctcccctttcaggtatcgtctgactcgttcatcttcacacgggagatcaatgatctgtgcatattcgtctttcttcagacacatagcaaatgcctggcttggttcaaaacggttcttcttcagttctccaagcagcagtccggttcttaagaaacggattcctctcacatccggaagtccctccggcatatagtaaatgcgctcaccatggatatccagtctggaaccgtccagtttccaggttacctgcttcataaactcttccaggtcggccggaatctttcccgctttcttttttgttttcagttcttttgcaggcagtggttcacccttttgcagaagggctacataatggccttctcctttcatcttatgtgggaaaatgcgaactgtctttgtcagttcttcgtctttttcctctgtcacttccggtattcccggacagaatccctcataactttccatcggaagcacatggaattcaggatattctttcttcagatgttcaatgatacgctcattttcacccgggtcaaatgtacacgtcgaatatagcataaggccacccggctttaacattcttgctgcctgcagaatgatattccgctgcagattgctgaagaattccggaccatgttcctcccatgcttttaccatctttttatctttccggaacattccctctccggaacacggtgcatcgatcaggatcttgtcaaaatattccgtaaaataattctccagacgtcccggttcctcactcaatacaaggacgttcccgattccgaacacctctatattcttaagcaggccctttgcccttgagctgctgatatcgttagcgatcagcactccctctccctgtaattttgctcctaattccgtcgcttttcctcccggagctgcacatacatccagaaccttgtctcccggttctaccggaaggcggttcgcaggtgtcatggcacttggctcctgaagataataaagaccggcaaaatagtacggatgctttgcaggagacactttgtccccgtcataatagaaaccattttcgatccatggaatttttttaatctcaaacggacatatcttttcaaattcttccacagatatcttacctgtatttacacgcatgccatagtatcttggttctttatagcaagcaatatagtcgtcgaactcttcttgcagaagtgcccgcatcttctcctcaaatgctgctggcagttccatatatttatcctccgtcatctttttcttgttctgactgtcttactgtcgtcattatgaatgttgttattatttcctgttatttgcagttcttaagtaccagtttcaggaattcccagcttctctgcgtagatgcaatatccaaacgttcattatatgaatgaatatccagaacatccggtccgcaagatacacaatccagatccggccgttttccaagaaagattccgcactccagtccgccatggataatgcatatctccggttcttttccgtagatttctttatatgcttctatcatgaccggacggagctctgactttggtttgtattgccatgcctgatatgcactggaaattgttcctgttcctccgaacgcttttgtcacagcatcgacttcttccaatacctgctgctttctgctgtccacggcgcttctgatcaggaaagcagcttccacaccgttttctttcatagatacaacaccaagatttaaggaagtttctgttgcgccggcaaccttacggctgtattcttttaatccatttggactcgccttcagataccctactactttttgcgtagtatcttttgagaacactactgtatctgtatttttttctgtttctgtttttactgtcagaccaggttcttctcccatgaattccgcattccatatatcctccatattccggatcatggccagtatctgttcggtatcttccggtgctgctacgagagatgcatgtgcttccattgcgatcacgttgtctttagagccgccgtaaatctcacttaagcggtaactcttttcttctgcaatgtgatacaacagacgtgccatcatcttatttgcattgccacgctgtctgtggatttcttctccggaatgtcctccaagaagtccctggatggtaatcttgatctcatcaccggatgccgtctctttttctaccggaatcagtccctgatagcggactccgcccgcacatccaaccgtcagggtcttctcttcttctgaatccagattgatgagttttttcccttttagtacagtcaggtcgatagcttccgcaccttccattccaagttcttcgtccacggtaaatactgcctcaattggcggatgtggaatctctctgctatccagcagtgcaagtgccattgcgacagcaactccgtcatctcccccaagagtggtatcttttgcctttaaaaatccatcttccacatacaattccaatccgtcattttcaaaatcatgtgtggattccgatgtcttttcacataccatatccatatgcccctgcaagattacaggttcgctttcctcatatccgggtgttcctggctgaaatatgattacattattcacttcgtcctgaatcactttcaagtctctttcttttgcaaatgcgaccagataatcactgatgcgctttgtatcgcggcttcctctcgggattgcacttatttcttcaaaaaagcgaaagacttctttcggttctaattcatttaatactgccattttcctacattcctcctatgttacactgatatctattatctaacagtcttcataaaaaatcaaccttatccatacaatgaattaacaaggttctccgggtgatcacatgtccagacatcctgcccttaccattccgatattgattctgttttttagcatgctgtcatttccgcagacagtctttaccggtgccagttacggacttgttctgtggttccggcatgtccttcccacattgcttccttatatgatattgatcaatgttctgatctgcacacctgcacttcactggatctgccgtatcacatccacttttttatgtccgcttctcggcacctcttattatggcacattcgcagtactcaccggattcttatgtggatatccgatgggtgcgaagaccacctctgatcttctgaatgtcaataaaatctcgcgttcggaagcctcttaccttttatctttctgcaacaatacaagccctgcttttatcttaagctatgtagtggcccaaaatatgaaggaacgtaatctttgcattccttttttcctgattcttacatttacaccgcttatgttgagttttatcttccgcctcttctaccgcctgccagaatcctcttattcctttccgcaggtaacacccggttctttctccaatccatctgaaagtatctctgacagctttcttgaccgttgtatcttgaatgcattcgaatccgtcacaaaagtcggaggatatatgatgatgttctctgtcctgatacaactgcttgcttcggttcttccaaacactatcttttcgcttcttctgtattccagtctggagatcagcaccggaatcagactgctcttttcatctgcgttatatacaactgagaagattatcctctgcgctttcctgacctctttcggcggatggtgttgcatcgcccaaacatattccatgatctccagcagccaattaccgattcttccctatataacagcaaaactggtcaccgcattggtaaccagtcttcttatctccgcttacatatatgctatttgattgtatcttaatccaatgtatcgtcttcctgaatatcataatcagaaatcggcatatcatccggatatgaatttccatcatccagataatcatcctgtccgtacgtatcctgctcataagtatcctgcggatattcttctgccggatattgatcctgcggatactcctgctgtacattctgttctgtctccggcggaacatcaagctctgctctgttgttacgtaccatgtcgtaacattcctgaagagaatttacaagactgtcatacttcgatgtatatgtatccagtgtgcgtccgatcgcactctccgcctgagaaaggagatcatctgtataatgaatggctccgacacggatctggtttgcatcgttcgttgcattgtccagtatctgctgtgcctgtgcagttgctgcggttacgatttcgtttgcctgtgcatatgcctgctgcataatctcatgctcacttaccagctcatttgtctgaatctgtgcttcctggatcatgccgtctgcttttgcctgtgcatcagccagaatcgcatccttgttcgcaatgatcttctggtaacgcttgatctcatccggtgttttcatacgaagctctcttaacagttcgtccatctgatctttatttacaattatttttgttgtcgacaacggctggaatttacagctgtcgatatactcttcaatttcctctatgatctgctcaatacggctgctcataatatttacactctccttctatgtttcattttctcccagactttctgctctatgtattccggcacaaattgggatatatctcctccgaaggccgctacttctttcactgtagtagagcttaaatatgaatactgcagattcgttgtcagaaaaactgtctcaacatccgacgcaagcttatgatttgtctgcgccatctgtaactcatattcaaaatcggtgattgcccgcagtccccttattacaatcttcgcatccagcttatgggcaaaatccaccagcagtccttcaaatggaataatcttaacatttgctatgtctttcgttacttcctctaacattttaacacgttcttctacggaaaacaacggggtttttgctttattattcaacactccgactatcagttcatccaccattccggcagatcttctgatgatatccagatgtccgtatgtaaccgggtcaaagcttcccggatagattccagttaacatatttctttccttcccgcaggttccaaaaatacatgcttgtttgttttatattctttttctttgatgatgtgatatccgagatcttccgcgtaatcaaattctgtctctttggaagcttctacaatgatgattccttcctctgacaaaagcgatgattccgcaagataagtcagcacgcttttttctaattcatgattatacggtggatccataaatatataatcgaactgcttttctccctctaatttatagagagctgtcatcacatccatctgcatggtcatcccttttctttcaaaatgtgtcttctgaaggttctctttgacacatgccatagcttttggatttttctctacaaatacagattccattgctcccctgctcagagcttcaatcccgattccgccgcttccggcaaacagatcaagaaagatgctgtcatataaatatggagcgatcatgttaaacaatgtctccttgatcctgtctgtcgtcggtctggtatccatgccttctaacgtctttaactgtgttcttcttgcacttccggcaatgactctcatattctatcccctctctttcctgtggtgttccaagctttctgtaacggttcatacaggcataaatctcctgtatacgcggtcttgcaagattgcccggtacaatgtttccttcacacattccggcaggtccccttttatccaacagcttctccgcctgttccacagcctgtccaagcgtcttctttccatcaaatatctcctcttccagaaagcgcacaatctgccccagcgtattcaactgttcactgtccacgagctgttccacataccgcagatcgatcgtctcatgaccgatcatgattgcatcacgccccattgttttcaattttactctgcctttctgtcgaatacccggatttctgcgtactttccggtcataggatggctcttttggcttttcttccgggaacttcaatgccggatagtctgtagctgctttctttgcaaattccgtaatttctttcggaacatacttatccatctgaacgatctgatccgcaatctggaaataggatccggaacttcccgctaccagcacggtcgatattccatattcccgataaagctccctcactcgctcaataaatggtgtgatcggctccatatcacggtggatcacctgctgcatcagttcatccctgaccataaagttcgttgcgcttgtatcttcatcaatcaggaacacctgtgttcccgcttccatgctttctatgacatttgccgcctgtgatgtacttccgctcgcatcttctgtatcgaacgcataagtatcttttccatttggcagatcattgataaacatggaaatatctgtatgccggatacttcttccgtcttccgcacggatcttcattgccgtatcatccgtgaccacatattctcttccgtctcccgcaacatgtggatatacaccactttctaatgctttcaaaagtgtagatttgccatggtagccgccacctacgatcaaggtaaccccctttcggatccccattccggtaagcatacctttatatggaagcttcatagtaattctcatagaatccggtgaagcaaacggtaccgcatccttcatcggtctctgggaaacccccgattctctcggaagtatagatccgtcagcaacaaatgcgaccagtccttcttttttcaactgttcacggatatattcctgatccacggaaagttctgctgcctgctttactgcattgcggtccatatttttataatataatgctttttccacacatgccgggagatattgataaagaattttaaccagctctcctgcctgtatcgtacgtcctcttgccggaaatccgacttcaaagcggacagtcacatcccctgtcttttcatctatctcacacgccgtacgttccagcacttcctgaccacatctcgtcacctgaataattccgctttttccggaaccatgtgcctgaaacgaatgccgttccagctgctttgcaaaatttcgcagcagataatctgccaccgccgtctttttatgtttgctgtcatatagttctttcggaatccgtactgctcttccggccacctgtatatgtaacctggacggtgctgcaaacggatctccctgtacatgatcaattcccagtatatatgttccaaactggtatacgcctcttgtatccttatatgccggatatcccctgtgatcaatgcgttccaatatctgttttaaatcttctgatgtcttcatatttttgtaactgctactattcctttttattttcttctctttcttttagaagtctgcttttgcattttttctgcactctacagatccacaatccttgctctgtgatgaatcgccggaagatatttctgaagcagatcttttgtcttgaatttcaaatggctggtattgatccccggattgcatccgaaccattctgcctctgcaacttccttatctatgatcacctgcacataatcatcttcatccgtcagaagtcccgcaacacttgcagatcccggtgttgtaccaagatgttccagcatcttctccggtggtgcgaatgacatatgggatacgcccagcttcttactgaaagaagacgtgtcaaacgctttatcggccggcatcaccagcaagaagaatgtcgtcttcttctgattacataggaacacattcttccgtatctccgttccgatcgccttgtctacttccgcacattcttccatagaagatgccggatcattgtctacctgttcatatgggatttttaatttttccaatgtatcgtagaatttacgctctaacggcattctctcgtctgccggtgcttttgtccttatttcactgatatacataacactaaacctccgtttctgatacttatacttgttaacattatatcgaatctgcacagcgattgcaatttttacattacaaatttatttcttataaatttctgtttttttcattttatgctatactataattgatgttgtcgggggatctctgcctctgacacctttatatctaaaaagtcacaaggagaaaaagtcatgaaatacgtattagcctcagcttctcccagacggcaggagctgcttacccaggcaggattttcttttgatgttatcccgtctgcagttaatgaaaagattacaaaagatattccatccgatgtcgtgatggaactggcacatcaaaaagctcttgatgtatacgaatcacggataaaagataatcctgcatatcagacagaagactgtatcgtgatcggtgccgacaccattgtatcttatcgcggtgagattctcggaaaaccggctgataacgaggaagcctttgatatgctttccatgctcgcggaccgcacacatcaagtctataccggagtcacattcgcaggacatatcagcgggaagcagatcctacatacattttacgaaaaaacggatgttacattttatccagtcacaaaagaggatcttcatacttatgttgacagcggtgattctcttgacaaagccggcgcttacggcatccagggcgcatttgccatccacgtaaaagggatcgaaggtgattataataatgtagtcggccttccgatcgcacgactctaccatgaacttgattccattttgccaaaggagaagatacattatgcattctagccggaataaacagaaatacgaaaaatccgcactccgtatctccatcacaggaagtacgattttcgtaatcctggagatcgttatggcggtcatcacaaggtcgcaggccgtccttctggacagtgtctatgacggcgtcgagattctgatggtattcgtatcactttcactggttccgctgatgtacaagccgtccagcgaaagccacccatttggttaccagcagattgaatccctctttgttgtcgtaaaaggtgcgatcatgattgcagttaccgtcgggctgatcattaacaacatccagatcatcttccacggcggccagcatgtcaacttttccatggttgcgtattttgaaatgagtgccaccttagtcagtattgctgtaatcttcctgcttcgcaggatgaacagtaaactgacttcaccgatcgtgatcatggagatccaggaatggcagatcgactctgttgcatcatttggtatgtgcatcgcattctttctgccgcagatcataaccggagaatggttccagcctttgattccttatctcgatccgatactggcgatcatcctgtccctttttatgcttccggttccgataaaaaccgtgatcacgggacttcgggacctgttcttactccctccggaggaagaaacggtccaggaaatcaaagatatcgtatctccgatccttgctacatacggggacacaaaattatattatgatatcctgcgtaccggacggaaattatggatcagcgtgtatatcaccatgaaccgtgatatgatttctatttccaaattcaaatctgtgcagaaagagattatccaggcgctttcaaaagaatatcaggatttttattttgaactgcttccggacattgaatacaacggggatacagaggttcccgaacccgttcccgatgaagaagaagcataatacgtaagaggctgccagcataattgccggcagcctctttttaaaggtagttttatgaatcaaaattgtggtattgtctgaattagtattttgcagctgcatcttcgatagacgctctcatgatcaacatcaactcatcaatctgtttctttgttacgataagtggcgggatcatacggtttacactgtctccgattgctgtgatcagtgccattctgtcaaggcatccgtgttttacctctacagcgatcggaatatcatattcgcatccaaccagcaatccacgtcctcttgcttctttcacatgcgggagttttgcaagttcctgtttcatgtattctcccatttcttttgcattttcacttaagttattatcaagaatttctgttacagatgcaagacctgctgcacatgttacacagtgtccgccatatgtagaaccatgtgttcctgccgtaaattcttttgctactttctctgttgcacagcatgctgctaatggcattccgcctccgactgcttttgccatggacactgcatctggtttcacgccatatcccatgtacgccatcggtgctccggtacgtccccatcctgtctgaacctcatcaaacaggagcaacatatctttttcatcacataatttacgaagtccttcaatgaattcctgtgttgcaggatgcacaccaccttcaccctgtacaggctcaatcatgattgcgatcgtattctctgttaccttagatttgaaatcttcaaggttattatattctgcataatcgaatcccggaagcattggtttgaatcccatctggatggcattgtccggctgtcctgttgcagacattgccccgtatgttcttccgtggaaaccatgttttgctgtaatgatgtgatatctttccggtccaaagttatccacaccgtattttcttgccatcttgatcatgcactcattggcttctgttccggagttctgataaaagatcttatccattccaatcgtatcacagatcttcttagccagtaatgcctgtggaattgtgtatgggtagttaaatgtatgcatgatatcatctaactgatccttgattgctgcaatgacttttggatttctgttaccacagctgttaacggcaactccaccgtagaaatcaagatatgcatttccctcttcatcatacagatacatgccctctgctctctctgcaatgaaatcatatctttcataagtctccaccatatacttattgaccatgtccttcaactcttgtgctgtaagtcccgtatcctttaatctcataataaaactcctcactttcattcattttcgaatttgttgaattatgatctcgttcgttttcctatccttttatcactctgtcattagaacgaaaaaaggcaccacacccaaacgggtatggcgcctttgcctttcaacgattcacagtatatacctgtgtttttgaaacgtcaatatgttttttgaaatttttttaaatatttttatcatgaacttttccgacatacacaggtataaaaaatagagtgtcatacgacactctatttctgcacatattagttatacttacgttttctagcagcttcagatttctttttgcgtcttacgcttggtttttcgtaatgttctcttttacgaatttcctgctgaataccagcctttgcacagtttcttttgaatctgcgtaaagcgctatctaacgattcgttttctttaacgattacatttgacatagtctcacacctaacctcccctccagtcctatattgtgcatcatacgactgttcgggtatttttattgcactacatatgattataacatatttttttctcacgtcaacaactttcttccactttggaaaaaattgcaaaatttcgcgaattgacagtaaaattttatgcaagctgtccttctaatgcttcttttgcagccttcagagcatcctctacacctgctggattcttaccgccggcctgcgccatattcggacgtccgccgccaccgccgccaactaatttggcaactgctttgatcaggttacctgcatgagctccctgtttcatagctccgtctgtagctgtagccatcaggcttactttaccatcattaacagaagcaagcaggatcacaccttcgcccagcttctcttttaactggtctccaagatcacgaaggccgttcatatctacaccttccaggcttgtagcaaggaatttcacaccttttacttcttctacctggttcattacatcacccatggcatcttttgcaagtttgctcttcaggctctctacttcgccctttaataccttattttcattcatcagatgagaaaccttctcttcgatgttttccggtgttgctttcagtaattttgcagtctcatgaagcttcttctcctgagcgctgtagtaatccagaagtcctttggatgtcagggcttcaatacggcgtactccggcagccacacctgtctcggacagaatcttaaatgccatgatgtttcctgtattctttacatgtgtaccaccacagaattcgacagagaaatcacccatacttacaacacgtacaatgtctccgtatttttctccgaacagggcagcagctcccgtcttcttagcctcttcgatcggcatatttttaattacaaccggaagattctcacggatcttctcatttacgatatcttcaaccttctgcagttcttctgctgtcatggcagagaagtgtgtaaagtcgaaacgcagtctctgtgcattattcagagaccctgcctgttctacatgatttccgagtaccatgcgaagagctttctgaagcagatgcgttgcactgtgattgttctcagcaagtgcacgattctctttgtcaactttcagcattaccttgtcaccgactttgaccataccttttgtaacctgtccgatatggccgaatttatcacctgcaagcttcacaacatcttccactacaaattcgccgtcttctgtacagatcacgcctttatcagcttcctgtccacccatcgtcgcatagaacggagtcttagcagtaataatcgttcctttatctccgtctgtcagtgcatctaccacttctgtctcacttgtcatagctgttacttcagattccacttccaactggtcatatccaacaaattcagaagataattctgcctccagttggtcgtatacacttgcatctttaccgctgtagttatgtgtaccaaatgttccttcagattttgcacgttgttctttctgtgcttcttcaaatcctttctcatcataagtcagacccttctcttccaggatctcacttgtcagatcgattggaaatccataagtatcataaagcttaaatgcgttctttccagagagaacattctcaccattcttcttcatctcttcttccatgtctgcaagaatagaaagtccctggtcaattgtcttgttgaactgagcttcttctttggcgattacgttaaagataaagtctttcttttcttccagttccggatatccgtctttcgatccgtcaatgacagtctgtgcaagttctacaaggaatgctcccttgattccaagaagtcttccatgacggcatgcacggcggagaagacgtctcaatacatatccacgtccgctgtttgatggaaggataccgtctgagatcataaatgttactgaacggatgtggtctgtcagtactcggattgaagtatctgtgttatcatctttctgatattccacacctgccatgttacatacatggtctcttaaagcctttaatgtatcgatgtcgaacatagaatctacatcctgcacgatacatgccagacgttccagtcccatacctgtatcaatgttcttctgctctaattctgtatagttgttatgtccgtcattgtcaaactgtgtaaatacgttgttccagatctccatgtaacggtcacattcacatccgactgtacatcctggctctccgcatccatatttttctccacggtcataatatacttctgaacacggtccgcaaggtcctgctccatgctcccagaagttatcttcctttccgaaacggaagattctctcctccggaattccaatctctttattccagatctcgaaggcctcatcgtcatcctggtaaatggatggatataatctatctggatccagtcccactacttctgtaaggaactcccatgtccagtgaattgcttcgtttttaaaatagtctccaaatgagaagttaccaagcatttcgaaaaatgtaccatgtctggctgtctttcctacgttctcgatatctcctgtacggatacatttctgacaggtggtaactcgtcttctcggtggtatctcctgtcctgtaaaatatggtttcaatggtgccataccagagttgatcagtaacagactcttatcgttatgaggcactaacgagaaactcttcattgccagatgtcccttgctttcaaaaaactcaagaaacattcttcttaattcgtttacgccatacttctgcataatttcctcctgctctacattcatgtatctaatcagtataaatatttttatcaatactaacttttaattataaagagagacaggcgttttgtcaatctttacgcctgtctctttttttgcttattttagttcgatttcaccgagttcttttggcggaagctgcttgctggatgcttttacaaattctttcactttcttctgtgcttttggcaccgggatgttcgttcccgcaccggctacacatccgcccggacagcccattccttcgatcagacatccgttcattcttccgatcttcgccatagaaagaatcttcttacaatccgcaagaccttctgcatgctcaatctttacttccacacccggatagtactcatttacacatttttcaattgcagatgccacgccgcctgcaaccgcatagccgcgtcccgcacctgttgcattgtggaaggaggactctgcctcatattcggaaaggtcgattcctttcgcatcaaacattccctgcagttcttcaaatgtcactacaaaatcaacatcacttcttacggttctgcgcatcgcttccagtttcttggccgcacatggtccgatgaatactactttagcattcggatgttctttcttgatcgtacgtgcagtagcgaccataggagtcagttcctgagacacttcatcgatcatatccgggaaatatttctttgccagcattgcccatgacggacagcaggatgtcaaaaggaacggtaattctcctgtcgcaaccttctctacataatgatgtgcctccgcaacagctccgatatctgcaccaagcgccacttcatacacctgtgaaaatccaagttcttccagtgctgcttttaagtttctcgcattgatattatctccgaactgtccggtaaatgccggtgcgatctcagcaataatctgctcgccttccgacaatgctcttgcgagctggaagatctgggatttgtctgaaattgctccaaacggacagcttaccatacacataccacaggatacgcatttgtccggattgacataggcgcgtcccattttatccgattcaattgcatttacaccgcatgcttttgcacacggacgctcttttttggaaattgcatcatatgggcagacactcttgcactttccacatttgatacatttttcctgatcaatatgggatttgccgtttaccatggaaatcgcacccttcggacagacttccatacaaggatgtgccagacatcctttgcacatgttgctgacctcatatcctttcgcttcgcatctcatgcatgcggatggaatcacctgcataagcggcggttcataatacttatctgatatgttacttgcttccacccccgctgtcagatgtaccggtttgtcttccggccggagtgaaagtcccattgcaagtcttacctgttctcgtacaactgctcttgcgcggtaaacactgtcacggtactgctctgtctcatcattcaccagtgcatatgggattgcttccatatcatcgcacagagtatctgcatctgctttgaagccaagtgctgcaacttcttcaaaaacttttcttctcaaccgtcttacggttgtgttaatgcctctcatcatagttggagttcctcctgtttttcctttgtcatttttataacagtctatagttctattatagacacttgagaaaatgttatcaactaattttgaaaatcaatttaaagcagaatcatattgtgttctttgcaggttttccgcatctgctccggccacaaacttgcctgtacttcaccgacatgtgcgcggtcgagaagcagcatgcacagtctggactgtccgataccacctccgatggtgtacggaagttcgccgtttaacagcattttgtgatatggaagattctttctctcttcgcagccggcttttacaagctgctcttccagcgctttttcatctacacggatacccatgctggagatctcaagtgcacagttcagtgtctcgaaccagaacaggatatctccgtttaactgccagtcatcgtagtccggtgcacgtccgtcgtgcggttcgccgcttgcgagtttgtcaccgatcttcatcaggaatacacagccgtgttcttttgtgatcaggttttctctttccttcggagtcttatccggatacatatcttccagttcctgggaagtgatgaaatagatgtcctccggaagtttctttactgcctgtggatatttgtaccatacttcatgttccatatgtttgataatcttgaagatattgcgtacggtagcttccagtgtctcaacggtacgttcttcttttttgatcactttttcccagtcccactgatccacgtagcaggaatgtaagttgtcaagttcttcatctctacggatcgcgttcatatttgtataaagtccctcacccggctggaatccatatttgtataatgccatacgtttccattttgcaagggaatgtacaacttctattgtctctcccggaacgcctgcgatatcaaactgtaccggtctttccacaccgttcaggtcatcgttcagaccactgcttttttctacgaataacggtgcagagattctctccagattcatctcttttccgaattccttctggaacgtgtcacgaatgtacttgattgcttcctgtgtctctcttacgcttaagcgagggtcataatgttctggtaatattaatcccattttttctgtctcctttttgtctgctgtatatttttatgaaattctttgctcactgattactcttcttcaaatactctctgtgcataatatacggactgcattgcatctttgccgtaaaaatctgccccgatcatatctgcataatcctgattcagcacagctccccctaccatgactttacattcaggtttacgttctctcaataacttgatggtctcttccatgcttacaaccgttgtcgtcataagcgcgcttagacctaccagccggatatcctgctccactgcagtatctacgatcacttccggtggtacatctttccccagatcgatcacatcaaaactgtaattctccagaaggacttttacaatgttcttaccaatatcatgaatatctccttttaccgttgcgagaatgaccttattcttcgcctggacttccccgccttcctgtgcgagtacatccttgatcactgcaaatgcgatctttgccgcatcggcactcatcagaagctgcggcaggaagacagttcccttttcaaatccttttcctaccgtatccagtgctgggatcagatgttcattgatgatctccagcggtgcctgttcctttaacagttctcctgttgcatgatgtgcttcttctttcagacctttttcgatggcctcttttaaagtcagttctgccttggctgccggtgcaggtgttcctgctttctgactgccatatacacggatatactcctcgcagttcttatcgtaattcatcagcgcacagaatgaataatacgagcgcatcatatcctcagaagaaggattaatgatccccgcacttaatccattctgcatggccatcgtatagaaatttgaattaactgccggacggtacggaagaccgaacgaaatgttcgatacaccaagaaccgtacagacaccataaatctccctgacttttttgagtgcttccagcgtgaccttcgcaccttccggttcagaactgatcgtcattgccagcacatcgatcacgatgtcttttttgtcaatgccgtatttcttcgcttcttcgatgatttttcctgccacacggactcttccgtctgcggttgccgggattccgtcctcatcgatcgtaagaccgatcacaacacctccgtaacgcttaataagcgggaagacagcatccatattttcctgttttccatttacagagttcaccatcggcttaccgttatagatacgcatcgccgcttccattgctgtgatatcaacggtatcgatctgaagcggcaggcttgatacgctctgaagctccatgatgacttctttcatcatcgccggttcgtcaatatccggaagtcctacgttgacatccagaatatgtgctcccttatcctgctgcgtaatcccctctttcaggatataatccatgtcgtggtcttttaatgcctgtttgaatttcttcttaccggtcggattgattctctctccgatgatcatcggcttgccgccaaggatgaccgcatgtccgtaagaagataccattgtgatatctttctttgttgccggctttacgctcatctctctggtcgtctcaaccatcttctggatatgtgcaggtgttgttccacaacatccgccgatcacatgcgctcccatctctacgatttttgccatatatccggcaaactgttccggttctacatcataatagacttccccgtcacgctgcttcggaagtcctgcattcggttttacgatgatcggaaccgatgcgtatttcagaacatcctccaggatcggaagcatctgttccggtcccataccacagttgattccaagtgcatccacgcggagtccctccagcatggcaatcactgccgggacatctccacctgtcagaagttttcccttttcatcaaagatcatggttgcaaataccggaagtgacgtattctcttttgctgcaagtactgctgctttcacttcgtaactgtcactcatggtctcgatatggatcagatctgctcctgcttcttctccatagatcatggcctctttaaatgcctcatatgcatcttcaaaagaaagatcacccattggttttaataatttacccgtcgggcccacatctaacgctacataagtcgttcttccatcatgcacgccgagctctgcggcctttttcgcattttggatcccggccgtcacgatttctttcagtccatacttggaatcatgaaatttgatcgcattggcaccaaatgtattgctaagcacgatatcactgccggcttcgaaatatgacttatgaatatcaacgatctcttctgcatgctccagattccagacttccggaagttctcctggctgcaatccttttgactgcagaagcgttcccatgccgccatcaaagtataataattcttttcccagtcgttctaataacatctgtctgctcctatccttttcctgtatcttatgacctgcgatatgcgcagtccttcttctgacacacttcacaacctttgatatggcaggaagtctctgtttcactgagaccgatcactgccgtcaccgattttgacggtgtcagcatattgccgccggtaagtgtcagcccgatcttctttgccgtatccagcatacggaggattatatcctgatgtgcaatatcaaagtctccatatccaggactgaatctcggtctgatataataaccctctttcttcatatctgcttccagagcagtctgccattcatccaaatattcttccagcatagcagccgcacacgcctgaagtgttaccactcttgccatatctccgatggaatatttccgcaatagcagatcaactttcggtccaagcgttgcacctagcagcactgcttttttacatcccgtcagatttttataaagatttttactgtggatatccagatttcccagaaggattcttccactctccgggaattctaattcaaaaatgcggtagacgatcctgccgcacgcctcctgggaaagttcttcaaaacagctttccacaagcttcagcgtatgatcatctaccgcatgtctgccatatcccaagtaacgaattgcttctttcgttcttgcgtccattttgcttcctctatttattcagaatctctgaaagatttgcctggattgccgcagcaacctccggtttattcatagaatatacgtgaacatggttaatgccatttgcgaacagatcgatgatctggtctgtcgcatacgcaatacctgcctgctgcattgctttcggattatctccaaagcgatctacgattgctttgaatctctccggaaggttggttccggacatagacaggattctctttacctgatttgcatttgttaccggcatgattcccggaataaccggaacggtaacacccttttctctcgctctatagaggaaattataaagaatattgttatcaaaaaacatctgtgtagtcaggaaatctacaccacagtctactttctgtttcagatgtgcaatatcatccttcttatgttcggactctacatgtccttccggataacatgcagccccgatgcagaaatctccctgactcttgatatcctcgatcagctcatatgcatactgataatgattcggaagtgggaattcactctcttgtggaatatctcctctgagagcaaggatattctcaattcctgatgcctttaactgatcgattacctgatgcacttcttcttttgttgatgatacacaagtaagatgtgcaaggcttggtacattatatttatctttgatatgtgatgcaatctttacagtattcttactggtaccgccgcctgcaccatatgtaacactcatatatgacggtttcaattctgcaattgcttctgtcgcctttaatactccttcatatgctgcatctgtcttcggaggaaatacctcaaaagaaagatgcggtgtcttttctactaatatatcactgattttcatattttttctgtcgttctcctttagtctgtttttacattccttcgtataattcttcgtactgttttgcagaattcttccatgagaagtctttattcatggcacgttcaacaatcttgttccagtcacgcttcttatcgtaatagatctgttctgcataacgtacagttgccagcatctcatgtgcattgtagttcatgaagctgaatcctgtaccggtcttttcatactcattgtatggctctaccgtatcttttaatccacctgtctcgcgtacaatcggaactgttccgtaacgcagactcatcaactggctgagtccgcatggttcaaacagggatggcataagaaatgcatcacaggatgcatagatcttatgggacattgcttctgaataataaatgtttgcagatacttttcccggatatttccaggcaaaatgacggaacatattctcatactgctcttcccctgtaccaagaactacgatctgtactgcatcctgacacagttcatccattacataggcaacaagatcaaagcctttctgatctgtcagtctggaaaccacaccgatcatcatggtcttctggttttcctccagaccaagttctttctgaagtgcgatcttattcttgattttttctttacggaaattgctgacatcataatttctctcaatcttattatctgtcagcggattataatcttcgtagtcaattccatttacaattcctgacagacaatttgcccttgcattcataagaccatccagcttttcaccatagaatggtgtcttgatctcttctgcataggaattacttaccgtcgtcactctgtctgcatatacaattccacccttcaggtagtttgcatccttatatgcctccagtttatccggtgcgaaataatactgaggtaatccggtaatatctctgacacgcttcggatcccatgttccctggaatttcagattatgtatggtcatgaccgtcttgattccacggtaaaattcattgccatatctgaaattatccagatagattggaaccagtcctgtctgccagtcgtgacagtgaatgatatctggtctgaaatcaatcaatggaagtgcgcttaatacagcttttgagaagaatgcaaatttttcaatatccgcatatatatcaccgtacggtgcatatccgttaaagtaatactcgttatctataaaataaaacctgattccgtcgtattccatttcaagaacacctacatactgctttctccagttcagatccatataaaaatgtgtgtgatactgaagtttttctttccattcatctttcatgcacatatacttcggaagcattacacgcacatcgaatttttctttatcaaaatattttggtaatgagccgacaacatcagcaagtcctcctgtcttgataaatgggactgactcagatgccgcaaataatattttcttcattgcattttcctcccaaccttagaatactttatcattataacgtatttttattcagaataaaagggttgtttaccggtttttattttccagacggatcgtatctgcgatcagtgcaataaattccgagtttgtcggcttaccttttccgttgcttactgtatatccaaagagttcatccagtgtatccagttttcctctgctccatgcaacttcgattgcatggcggattgctctttctactctgcttgccgtcgtctggtgcatcttagcgatcgtcggatacagaacttttgtgattgcatttaatacatccatatcatccactgccatgatgatcgcatctctcaggtaatgatatcctttgatgtgtgccggtattccgatctcatggatcatatctgtcaccctcgtctccagattatactccggcttcttctgcactgtgcttccgggtattgcttcagaactattccgcctctctccttttcctgcatctttgatccggcttaagatcatatcattgtgaaatggtttcatcacataataacttgctccttttcggaaagcatcttctgtgatccgttcctgtccaacagccgttactatgataaattccggacgcttggtgatctggtcatctgcatttattttttccatcacacttaaaccatcgagcttaggcatgatcagatccagtagtactacatccggttctttttctttgatcagatgatacatatcttctccattattggctttgcctatcagattcagatcatgatcctgctctatgatttcccccagcatatccaaaattctctcattgtcgtcagcgattgctacattaacttctctcattttacgttatgcctccttgtcccttaataatcatgtcgagttttattatataattcctgcaatttccgaacaagaaaatgttgtcgtaaaaacctgacctgcatcgacaatattctgattattctacatgtttcagcatattttcgataaaaatcccatatccccttgcaggatcattgacgaatacatgggtgactgcaccagcgattttcccgttctgaaggattggtgccccggacattccctgtatgattccgcctgtaatctcaagaagttccggatctgtcaccttgatctccagacctttattttcttcttttgtatgtttgtcggtttttgttatacgaattttgtattcttttacttttccttctacacagcatcgtataaccgcatctccttttttgatctcatccgttgccataatgccgaccggctctgtattccggaacaggttgtctgtacgttcaagggttccgaatatcccacaatctgtatttttatcaatagttcccagaacattataccggttatagacgatgattccttctatcccgcccggttcccctcctgctcctttctggatactgcgaatgctggtctcgtagacccttccgtctttaatctccatcagagtgttcgtatctgtgtcatggattccatgccccaatgctccaaaacgactgtccgtgttcagaaatgtcacagttccaagcccctgtgcattgtcccttacccatattcccagcatgtactgattctttttattccgcaccggttttatcttcacatccagatatccggaatctctcctgagctttaggaccacctcttccgcatccagcttttttaatgtgtcctgcagcctctttttatcggcaatcttctttccgttacattccactatataatccccggctttcacaagatgcctggccggttctgttattttcccatccgctccggtaatcttctctgtacctaagaccatgaccccttccgtctccagatagatcccaaccggcattcctcccgggatcacagtgtccaaagaaaccgtatctgcacttacttctttttttctcccctgttcctgccgctttgtaatttcatatcctgcataaccaaggacagataacacaagcagcacaagcaggaatctacgataccagtattttctcatattccacactccatcctgtcttttgtctgcacagcaataaaaaaacagacactctgttacaaatgtctgtcttagtatatggtatttcagaaaaaatactctggatctttacgttttttatttcatctgtgatgccagatttttcatctctctggcactttgcatcaccgtatctgtgatcctggctccgccaaggatccttgcaagttcttctacggaattttcttcattcaatggatagatctgcgttcgtgtcacggcatcttctgtctttttttcaatcaaaaaatgccggtctgccatagctgcgatctgcgccagatgcgtaatacagatcacctggtgttcttttccgatcagtgccattttttccgaaaccttctgagcagtacgtccactgatcccgacatcgatctcatcaaaaatcaacgtctcgatctcatctttgtctgccattaccgctttgatcgccagcataattctggaaagttccccgccggatgccacttctgtcagcggcttcaccggctgtccctggttaagcgagatcctgaattccacatcatcaatgccatctttggcatattctttcttttccgcaaaatgtatctcaaactgtacctgttcaaaattcagatcttcaagacctttctgaatctttttttcaagcattttagccttcttctgccgcagtgccgaaagctttcctgccagttccagatacttctgcgacaactgctcacaggatttctccagttcctgcatataagtatcataattttccagaatcccgattcgttcttcctgcttcttacagtatgccatgatctcttcataagaattcccatactttgtcttcagatgattgatctcgttcagccgcttttctgtctcatagaattcttcatccgaaaattcacagtttttctgatattctgccagttcatgattaaaatcattcagcagattgtctacatccgccaactgggtatataactgtgacagctgttcatcggcatccacagcttccgacagtgttcggagtgcccttccaagcttttcgctcgcactttccccatcttcgcccgtatactggtagcattccgcaacactttgggcaatcttctttccgttacacatgcgccggtaacatgattccagttcttcatcttcgtgctcttttaattctgcccggacgatctcatccacttcaaacttaagaaaagccagttcctttgccctctcggatccatttgttcctgcttccgacagttctcttatttttcctttatactgctgccatgtttccgccactttttctttctgctttttcgtttcttctccggcaaatgcatccactattgccagatgattctttttataaagcaatgactgatgttcgtgctgtccgtgaatatcgatcaggatggcggatactgctttaagcgtcgccatctgcaccgtctctccattgatcttgctgacacttcttccttccatcagccttctctgaagcgtaacaaacccgtcctccgggtaaacatccagttcttttaatctgcggatctgtcgttcactttctaccgaaaatgtcagttctaccagtccgtatctcgttccctgtcggaggatatctttcgtgtatctcccgccaagagcaagattgaccgagccaagaatgatcgacttcccggcaccggtctctccagttaatatgttcagtcctctgccgaactctacttcgatctcatcgatcaaagccaggtttttcacatgtaaatactgtaacatgcatcctcctataagataatcttgctgatcttgtccattacttttaccgtgtcatccacacttcggatcgcacacatgatcgtatcatcccctgcaatacttccgacaatctcattccatttcattgcatccagtgccgcacataccgcacttgccattcccgctactgtcttgatcaccaggatattctgcgccatatccatagacagatatccttctcttaagacacggatatatttttcactcattgcactctcatgatgctgatgcaatgcatatctctgcttgccgttctcagacggtatctttgtaagcttcaggtcccggatatctctggataccgttgcctgtgttactttaaacccttcctggttcagatattctgccagttcttcctgcgtttcaatatgatatttgttgatcagttctatgatcttcgcatgtctgtttactttcatctcatcaatttcccttcatctttctccgtaatatttccaaaaaactgattttattgatcttcattatctttgtcgtcttttccgccttacagattgtcagcttatccccggtctggatcggcacactggtcgcaccgtcaaacgtgaccagtactttttcgatatttcctcttcgtccttccccgatctcaattacgatctcatcgtctgaagacagaacaatacttcttgtattcaacgcatgagagcagattggtgtgatcacggtaagtgacgctgtcggttccacgaccggacctccggccgacagattgtatgccgtagatccggtcggtgtggatatgataattccatccgcttcgtaagaattcaaaagttccccgtttacaaacaatttgaaataaataatgcgcaggtcatcgccccttcgcgacacaacaatatcatttagcgcgacatcctttttcccatcctgaaatgttccttctaacatcatgcgttcttcatacagataatcaccctgcagcatctgcgtgatatcttcttccagattattcacttctacttctgtaagatacccaagcgttcccatattgatacccaaaatcggaacatctcttttccaaagtgttcttgccacttcaatcagacttccgtcaccgccgatcacgatcgcacagtctatcatgtccggaatccgttccctgataatattcttttctgcatccttttcacacaatgcacagtttcttcctgctatctccagcaattcttttacttttcctgtcaccgcatgattcgtatctttcccgtcattggtaacgatccaaaacttttttaacatctgcctctaacctttcgcaagtgtagcaaacgacagatctaccgtcttttcgacatcgatctgcggcgagattctgtcagtcgcttcacatttctgtaagtggaccagatattcgatattgccttccggtcctttgatcggagaaaattccagattcagcacttcaaatccaatagacattgcataatcgatcactttatgaatcacttctatatgtgtactcttctcacgtacaacgcctttctttccaaccttttccctgcctgcttcgaactgcggcttgatcaatgctacgatctgtccttcatccgtcagataattacggatgggaagcagtactttcgtaagtgagatgaaggatacgtcaatggatgaaaactgcaccggttcccctatatcttccggtgtcacataacggatattcgtcttttccatacacactacgcgtggatcctgtcttaatttccagtcaagctgtccgcgtcccacatcaatcgcaaatacctttaccgcgccattctgcagcatgcagtctgtgaacccacccgtagaagaacctacatccgtacatacttttccttctacgttcacatcaaagttcttaattgctttttccagtttcagtcctccgcggctgacatacggaagcgtatgtccgcgtacttcgatcatagcttcttccggaaaagtagtcccggccttgtcttctttttgcccatctacatatacgattccggacataatgatggcttttgccttttctctggaagctgccagatttctctttaccagtaatacgtctaatcgttctttcataatctctcctgttatctatcgtgtcacatatctataatgtctcatataacttacggatcttcgctgtcatggtctctacatccagaccagtctctttgcgcagaacctccacattgccatgctctatatattcatccggaagtgccaggatctgcactctcgcatccgaacccgtcctcatcagatactctgttacatgttcaccgaatccgccggatcttacattttcttcgatcgtaacgatcagcttgtgctgctctgtcaggtgatccagcatctctgtatccagtggttttacaaatcttgcattgaccagtgtgcagtgatatccggcttcttttaactgttttctgacctccagcgcctcgccaaacatatgtccgacaaagatcactgcaatctcccgttcttcgtatagcatttcactctttccgtatactaccggacttctgaattccggacaggcatcgcatgcactgcctctaggatacctgatggctaccggaccatcatatgcgataccgaatcttatcatatcagccagttcccatttatgctttggcgacagtacaaccatattagggatagtgcttaagtaggacagatcaaagattccctgatgggtttccccgtcgtttcccaccagacctgcacggtctactgcgaacattaccggaagattctgaagtgccacgtcatgaatcatctggtcatatgccctctgtaaaaatgacgaatacacggcgaataccggctttattccacctgctgcgagtcccgccgcaaatgtcactgcatgttcttctgcaattcccacatcaaaaaagcggtccggatattttttccggaatcctgcaagtcccgtgccgtcttccattgctgctgtgatcgctgccagcttatcatttcttgccgcctcatcgcacattactttacaaaaaacatctgtatacgtatctttctttttcgggttttccggttctcccgtctctacccggaacggtccgattccatggaatttttccggcttttcttctgccggcccgtatccttttccttttttggtaattacatgaagcaataccggtccttcaatctttcttgcctctttaaatgcacgtaccatcgtcgggatattatgcccctggatcggccctagataggtgattcccatgtcttcaaagaacatccccggaacgatcagctgtttgagactgctcttggtcttgcggatacgctcgatcacaggatctcccacgaccggaacgttatgcagtacagttgttacaccttttttcagatctgtatagaagtccgccgtacgcagctttgccagataatccgacattcctccaacgttttccgaaatagacatatgattatcattcaatacaatgataaaattctttttaagcgtggatgcattattcagtgcttcatatgccatcccacctgtcagcgacccatctccgattaccgagattacactgtaatcttccctctgcagatctcttgcgcacacatacccaagccccgccgagatagaagtagagctgtgtccggtgtcaaatgcatcgcatgcactttcttttctcttcgggaatccgctcatcccgccatattttctcagatcatcaaatccgtcttttcttccggtcaggatcttatgtgtataggactgatgtcctacatcccatatgattttatccttcggcagatcaaagaccagatgcattgccattgtaagttctactacgccgagattcgatgccagatgtcctccggttttactgatcttctcgaccaggaactttcggatctcctgtgccagttccggaagttcttccggcttcagatcttttatatcatttgctttttgaattctttctaacataacaaggtatcccctttatctgtctctgtgaatcagctgtatcagtaactgttccagatacgcattctcccctgtaaactgatgaagcagtgcaattgcttcattcgataattcttccactttcttctgtgcctgttcaattcccagaagtgttacataagtggtcttctgattcttctcatcactgtggatcggctttccaagtacctcttctgtactcgtcacatccagaatgtcatcctggatctggaatgcaacacctacataatgtgcaatcttttctacgctctgtatttctgcatccgaagcaccaccgaggattgcgccgatcatcattgcacattcgatcagagcgcccgtcttcagttcatatatggtatccagcacatcttttgaaaccgcatgtccggtctcttttacatcgatcacctgcccgccgatcattccatagatacctgcttttctcccaaggacagtaagtgcacgcccgatcttaagactgtcttccggagactgctcaaatgcccggaatgctgtctcaaatgcgtaattcaaaagtgcatctcctgccaggattcccatatcttccccgtatacaatgtgtgtcgtctttctgcctctgcggtactcatcattatccattgccggaagatcatcatgcaccagtgaatatgtatggatcatctcaagtgctgccataaaaggctttaatgtctccggttcttctccaaaaagtctgcaggtctcctgcatcagcatcggccggagtcttttcccgcctgccatcagactgtactccattgcctccatgatcaccttctgatatccttctgcctccggaagatatcgtttcaggatttcttcgatctctgccactttcattttcatctgtattgtaaattcttctttagaattcatgttcctcaccctcttcatctaataacagcatcttcttttctactttgtcgatcttgctgttacaggctttcagcatatccataccctgatgatacagctgaaaagattcctccagtgaaatctctccttcttccatcttttttatcgtctgttccagatctgagaatatctcctcaaggctctgttcttccaaagattgtccttttttttccgccatttgtttctcctggtatctgtctgttctatttgttccgtgctttgcaccggcatcatttatatctcatacgtcttattctgcacagcttctacggatgtctgaatcagtccgtctgtcacatacaccgtcagttcatcacctttttttacttgccggatactctttatcacactgccatccgcttcttctacataagaaaatccctgattcagcttccggatcggagacaatccattcatcttctcgatctggatcgccaggcggtatcttgcttccttcacacggtcattcatcatctgacggagttcatcttccagctcagccagcctctgctgctgttcctgtaacttatgacgcggatgcagataagaaagtctggtctccatctctttcagccgcagccggttcatacggacggctcctgctacactccgattcatacgcagacggcattctgccaaataattctccacctgtctgtaatcccacactgcaagctccgcagccgccgaaggtgtcggggcacgtaagtctgccacgtaatctgcgattgtcacgtctgtctcatgacctaccgccgatatcaccggaaccgtacagtcgaagattgcccttgccactttttcttcattaaaggcccacagatcttcgatcgagccgccgcctcttccaatgatgatcacatctacttctttcatctccaacatacggattccccgcacaatggactctttggcgccttctccctgcacctgagccggataaaggatcagctgtacatacggattgcgtctcgcagatatattcatgatatcccggactgcagctcccgtcggcgcagtcacaacaccgatccgctttgcatatgccggaatctcttgcttatattcgggtgcgaacattcccatctcttcgagttcctgcttcagcatctggtacttctcataaagtgctccttctccatccagccggatctcattcgcataaagctggtaagcgccggttctttcatagacatttacggaaccaagcacaatgatctgctgtccttctctcatatgaaaagagagcccgcctcgctgccccgcaaacatgacacaggcaatcgttccggactcatcctttaatgaaaaatatatatgtcccgatgtgtgatacttacagttagaaacttccccctttacatagatacggttcagcataaagtcctgggtgaacatattcttgatatatgcattcacctgttttactgtatatacatttcgagccatttcctacctctgattaatctgcaagctttgccaatactccatttacaaatgatgcaccgtcttcactgctgtatttcttcgcaagattgacagcttcgttgattgcaacacctgtcgggacatcctcgtcccacttcatctcataaaccgcaagtctcaggattgtaagatctaccttgttcatacgtcctgtcttccatccggtcgtatgctcattgatcattgcatcgatttcatcaatcttctctacaactttctgcgctttttcactgatatactgcatatctttttctgtggcaccttcgatctgttcaaaatacagttctgcctgtgttccctgttctgcttcttcgttaaaatcagcaccaaatatcaacttaaagatatgttctctctgctctgttctcttcacttatgcttcctccggtatctcgactccggcaacgcggatgttcacatctgccacctcaagtcctgtcatattctcaattgcagtttttaccttttcctgcactttagaagtgatgtctttgatgctgtaaccataattcaggttcaatgccaaggataccgttacgatcccgtccagcacatctacttttacacctttagatagagacttcattccaagcttgctgatcagttctcttgtcgcatttcccgccatagaagcaacaccttctacttccattgcagcaagacctgcgatgatcgctacaacttcatctgcaatcttgatctctccaagattttcatctgtttttattgtatacgtatttttttcttctttactcatattctaagcgacctcccgtctggtttttcactgtcttttattataacaaacttatatacatttgaaaacccccagtcatcccgggagttttatttctgctgatatttttatgatctgccgaactcggtcagtttcagtccttcatttctgtctaccgtcatacggatgctccattcattgacaaataacagaagcggacgtcccttcaaatcttttacctttttcatatccgaagttccggtcagtttatccagatcaatttcttcattttcaatccagcggatgtactcatatggcagattttccagacggatctccacgttatattcgttctccagacggtattttaacacatcaaactgaagcactccgacaacaccgacaatgatctcttccataccggtattgtattcctggaatatctgtattgcaccttcctgggcaatctgattgattcccttaatgaactgcttcctcttcatagtatcaacctggcgcacacgtgcaaaatgctccggcgcaaatgtcgggatcccttcatatgtgaatttatcctgtgcggtcgtcagtgtatctccgattgaaaagattcccggatcaaatacaccgatgatatctccgccgtaagctttgctgatcatcttacgctcgcttgccatcatctgctgcggctgggaaagacgtactttcttaccgccctgcatatgatatacatccataccggcttcgaattctccggagcagatacgcataaatgcaatcctgtcccggtgcgctttattcatattcgcctggatcttaaatacaaatgccgagaaatctccttcttccatcggatcgatcggacctctgtcagatgttctcggaagcggtgatgtcgtcatctgaaggaaatgctggaggaatgtctccactccaaagttggtaagcgcggatccaaagaaaaccggtgaaagttctcccttgcttaccagttcctggtcgaattctgctccggcaccatcctgaagttcaatctcttcttccagctgcactctctgatcatctgtgatcagccacgagatctccggatcattgatatctaccttctttacttctccctgcgtcgttcccttttttgtatccgagaagatttccacttttttacttgctctgtcatatacacctctgaactctttacctgaaccgatcggccagttgatcgggcatgttgcgattccaagttcattttcaatatcatccagaagttcaaatgtatccattgcttcacggtccatcttattgatgaatgtaaagatcgggatatggcgcatcgtacatactttaaacagctttctcgtctgtgcctcgacacccttggatgcatcgataaccatcaccgcagaatctgctgccatcagggtacggtaggtatcctccgaaaagtcctgatgtcccggtgtgtccaggatattgatacagtatccgtcataattaaactgcaatacggaagaagtaaccgagatacctctttctttctcaatctccatccagtcagaaaccgcatgttttgcagttgcctttccttttacacttcccgcctgattgatcgctcctccgtagagaaggaacttctctgtcagtgtcgtcttacctgcatcgggatgtgagataattgcaaatgttcttcttttctttatctgattctttacttcattcgtaatctgtgacatatattatacactcctaatttatagtatatccgtttataggcactattaatcagtataacatatgtctttaaaatgctcaaacatatttttcctgtattttcaaggttttcccttgttttctgcagcttacttcgaatccgcattcaccggattgatcacaatattctgtgctgccacccccgtctttctggtcacaatatcttcgatctgcgcacggtttgcatcacttaactcggaagctcctacgatcacatctgcctgatcatccgtgatgctcacaacggaattatgaaatcctttggctgccaggagtgactctgcagccgattctttttctgcggtctccgtcatctgtaccatctggttcacggctttttctttttcttcggcgctgagattcttattatcgataatattctgtaatgtttctttattcttagagcgcacctgttccctgctcacctttgcctgcgacacaaccgaacttaccgatccatttgtaaggactgcttctccgggtgttccgtctacacttccgtcatctgtgcttccggcattgctgtctgcgccgctgccggaatccccctcctgatttttcatatctccggatgacaccgatgcatcttcatcggaaatatccagcaattccttgttcgcaagttcagaattggtctcctgtgtcttcgtcttgttcggaaataatttgcccgagtaattcatataccctgcggctgcgatcatcactgccagtgttgcgatcacaatctgattcttctttgcaatctttttcaatgttatgccctcctgtccgttttacactgctttaattcatctgctttttcattattctaatcttatgcggttcgatatcaaataatgcctggaccgcactgctgatattttctttcaccactgcattcccgccgccatctgcgatcacgaccacaccttcgatttcgggacttaattctttgcttacatatggagatccgctaccctgagtagcgctgtcactgtcacttgcatataccgtattttcttttttggatgcctttgacgactgtctggttcctccctgactgtcttcttccgtcaccgtttcctgatccgattctgtatccttatccagcaccttttctgctgaagatttcagtgtgatcatcacctttacttctccggctccttcaatctgcgataagatccggctcaggcggtcttccagataggtagtatacgcttcttcgtctgtcccatcagatgtcccccttacagtttttcctgtattgccgtctgatgcggacgaagcatgttctttcgtctttcctgccggaactgcgatcaccatcagaagaattcctgcaagaagcagaatcaggagctgatctttttttagatttttaaacgaaaactttttccagtttgtaagtttgttcggaaacaattcactcagattctttgccgatttcaatctgctccacctcgattcttctgttctggcttgtattttcatcattctctccgtctatcctgagaatctcttcctgaactttctgacttttttcttccagttcactgacctgaatcttatatacactgttatgataaatttcttcaaatgcggttctcttatccaataattccaataccggaacaaccaacattgctgtcagaatcagtcccagaacgaaacggacatatttttggaacccatgatccggcagcatctgtaagatcatgcttccaagcactgcaaaaaatgataactttaagatccagttatagataaactccatctgtcccgctcctttttggtcatgcattcgtcaccgccgccacgattgcgatcgtcagcagaaataacactcccacagtaaatacaatctgcatcagtatctgacatccttctcctaccgcttctacgcagcccgtgacacgttcatccgacaccggctggatcatggcagccgcaagcttataaagaagagctgttcccgcagtctggactaacggtatgacacacagggcaatacagatcaccgctcctgccatcccgattccattctttaccagtactgccgttccaagcgctacctccgtcattccgcccaggagattgcctattcccgggattgcctctgcacctttcagtacggtgcttcttttcaccgtatcgatcgcaggactgatcattccctggatcaggttcgcaccgatgacacacgcaagtgctgtcttaagcgtccagcggatgacaatttccaggaattccgataatttctccaacatatcttccggtcccagaaaattcaggatacggatgatcatatatactctcaccatcggcagcagtacatttccgattatgatctcaaccgcatagattaaaaacagaacaagattgtaaaatgccaccccggtcacacttcccttcgccaccgcaaccgccagaaaataaaccggatagaatactcccataaaagcagtgatattccgtatcccggattccacccacttaagaaccacatcaaaagcagcgaccgtcagtgccgccaataacatgtaaatcatatagaatccgacacttgccacctgtcggttctgaagggtacctgcaaactgattcatgaatgctgcaatcattgcaatcagcaaaatatgtatcaaattctttttgcccgtctgaagcagataaaacatctgctccctgacgaattctgaaagaagctttgcagatgccttcagatttccggttaagatttccgatattacttctttaaatataatccgtttttcagggaacagagactgtaaggaatcgtcaatttcgccgtattcaaattctgagaggatgctttcttttattttctgttgttcctgttctggatccgccgcataacaatatgtaactccgatatgccccactactggaaacaatagcaaaaatatcaaaacacgcccgatataaacgcccgttatttttttatatcccgcactacatctcataccaaaaatccccgtatcgtctgcaaaagcgcacttaacaccggaagacttaacaccaggatcgtaatcttggcgaacacttcgatctgtaatgcaatcgtctgataccccgcatctttacatattgccgaagaaaattcggccgcatatgtgatcccaagaatcttccacaatgttttccaataatcattgccaggcccggcaacgctgttgatctcattcaacacatctttgatcagtctgatcttcccaagcaaagtggcaaagatcaaaagaccaaggacaatactgatatagatgccatattcggatttaccacttttgaactgcaaagccagaagaactcctgccactcccagtattccgatctgcagcatactcatatgttccgcctcccatcccatatagcacatgcttctcagacatcacacattttataacgagaacagatcctggatagattcaaacagatcatagatatatggcacgatccagaataaaaccagtaaaagtcctgccagactggtcaagaatgcctgttcttctcttccgctgtgctttaacacctgacaaagtatggatacaagaatccctaccgccgcaattttaaatatcagattcacactcatatactgccccctattttttacaggaggataattgccagaaatatgcctccggtcactccgacacactggtacagacggattctctccttctgctccgttctcatgtcctccattttctgttccatttgttccaggtacaaatccagcgtccttacctgcatctcgatatcgatcgttcccaattcactgcccaggcgtatcagactctccatcatatcctgtggaattccggtttccgcaagatattttctcgtctcttcttcccatattcccgccagacttgtaccctgtcttttcgtcagcctctcgcacaaagaaagcagccacatcttatacggttcctgcgcttcgctccctacatgcagaaacgcttccggaagcacctgtctggaataacggatctcacttctgatccgaaaaatcagttttctcagatatcgcatctgtctgtaacactcttctatttttgcagcctgcaacattccccagcccccgcctgcaagaatgaccatgactgccccgattccttttatcatttcgccatttccatcatttctttgtatagaaggcttcccctgttatcaaagattccttcgatctgtcccacgtgtgcgtcatttccaagtaaaatataccgttcgaaccttccttctccgatcatccggttgaacagtggttttttcctaagttcttccattgactctgcatgtacggtcgccagcatcttacatccacagtgcatggcatattct

SEQ ID NO: 2831 - DNA, 336 bp, Unknown
  gut microbiota DNA sequence
ctgacaagacagttagaatataaggcaaagtggaatggcaggaaatatgtcaaaatagacacattctatgccagtagtcagctgtgttcagtctgtggataccaaaatatagagacaaaaaatctatcagtaagggaatggacatgtcctgtctgtggaacaaatcatgacagggatatcaacgcagcaaaaaatatactggaagaaggattaagacaaatagcataaaaataacaatatagggcagggactgcccgaattaacgcctgtggagatagtaggttacgaggtctgcgaagcaggaagcccattggctttagacaatgggtagttcac

SEQ ID NO: 2832 - DNA, 1310 bp, Unknown
  gut microbiota DNA sequence
agatatccttattcagattttccatacgaaaaaagaaaaagtcgttgcaatcaattttggaaaaaatggatacatggtaaccatgattgcaagaaaagaaccaaccattgttaaagatggaaattgtcttccatcctctgaaaaataagcggataaaagaaaagcgacactgcaaaaccacatgctaagggagttctgcagtatcgtctttttttattcttctaccttccactctctggtatcaaagatgtgaagatgcagtgcttctgaaatatatcccaacaattcgcagcctgcgatacagtttccttttttatcaagagacggtccgtagatcccgattcccattttctttttcgatacgctaagcaggccgccgccgactccgctcttagtcggaattcctgttcttaacgcaaattcacctgatccgtcatacatcccgcaggtgagcataatggtctgtaccatccgtacagtctgagatgagatcagacgttttccggtagataattgcactccgtcatttgcaagcaaaagaccgaacattgccagatctcttgcatttaccgacatggaacacatctttgtataaaaggtaacactatcttctacatcggtatcaatgatctccttactttttaaaagataggcaatcgccttatttcttgcgcaagtcgccatctcagactgaaatacagcttcgtctactgcaatctccggatcttcacatacgtcctgcatatacttctgcatatcttcgatggaatagtggtttacaagcaggctcgcaaccgtgattgctccagaattgatcatcggattaaagggccggttacttcggttatccagttctaccagtgagttaaaagcctcccctgacggctccacaccaacatgattaaacacaaactctgctccaaatgtttccagtgccagacacagtgccattactttggaaatggactgtatcgtaaatctgtcttctgtatttccggtctcaaattgattgccgtctattgtgtaaaggcagattcccagtttattcttatctgccttggcaagctccggaatatacgatgcaacacttccataccggatcacaccttttccgatatggatggcattttccagtattctcataacctcttctgatttcatcatattctcctttttcgctcagtcataatccccttacaactgctatttcctaagtactaagatacatcattttccggcgtgaactacccattgtctaaagccaatgggcttcctgcttcgcagacctcgtaacctactatctccacagg

SEQ ID NO: 2833 - DNA, 8943 bp, Unknown
  gut microbiota DNA sequence
agaaactctgcgaagaaaaagcaggctgcggagctgaaaaaggcagagaagcgtaaagccgaggttgacgggctgtttgctaaaatgtatgaggactggtctgccggacgcataaccgagtataacttcaatatgctgtccgagaagtaccagaacgagcaaaaggagcttgaaacaaaaataaggcagcttcacgaaacgatggaagccgccgtacagaccgcagcggacgctgaaaagtggattgccctgatgaaacagtatgtcaaccctgtggagctgaccgccgaacttctgaacactctaattgaaaaaataaccgtccacgaagctgtcaagggcgaggacggaagccgtgagcaggaagtagaaatctactaccgcttcattggcaaaatcgactgacctttcttttttacccaacaatatctttaattaagggaaacgggacttggttttccagacattaatacgttagaaccattggcagatgcactcgggatagaagtggtggagcttatgagatcggaaatcaatacagaaagaagagaaactgctgtagatcggaagaacgtagtagagattatgaaatcaacggcagagatatcggagtatcatgcggcaaagaaaatgaaatggttaatcagtggaattagctttgtaatggcagtattaggtgtaatggttacacagtcaacaaaagtgttttcttcgattgcattttatggctgtatcataggatgtactacatgtgtggttcttttacggcaatattgggaaattcgtgaaaaaagggaattttatttttcacttatctggtgtctgggggcagccagtctgatatggatgttccagttgttttcgataaaagcaataaacagtatcatggatgtggggagcattcttattggtagtgtgattgattttatatttttaaaagattttattgaaagtgtaattaagaaaaaatatctgcaaatggcagtgtgtggaatatttcttctttcaacgacagtagaatattttcggattgtattaaagtaataaatgcatttattaattctcgtgttgctttcttgaaaaatataagttaaacttataataaataaaattttacagagagaatgaggaaaagtcatggaaagcaacaaagaagaaaagataaagacggtcagtgaagagaatatctataagctgaacggaagagttccacttaaaaaagccattccgttcggcttacagcatgtactggcgatgttcgtatcgaatctggctccggtactgatcgtgtgtagtgcggcagtacttagaagtaatggggcacatttaagttcggcggagattacacagttattgcagtgtgcgatgtttgtagccggaatcggaacctgtttacagttatatccgataggagtgatcggatccggacttccgattattatgggagtcagttttacgtttcttggaagtctgttggtcattgcaacgaacccggatcttggatatgaagctatggcaggtgcggttattttaggcggtatttttgaaggttttgtcggactgagtgccaagtactggagaaaatatctgactccggttgtatcggcttgtgtagttatcgcgattggattgtcacttctgccggtaggtatggattcctggggcggtggaagcggagtgaaagactttggttcctggtatcatctggtcgttggagcatttacattgatcgtgtgtctgctatccagagaagtactgaaaggcgtatataagaatttaaatgtgctggttggactggtatttggttatgtacttgcaattatatttactgtagcgggaatcgcaccgatggttgacttttcggggattcataagacaattcaggaggttggtgtgttcagtatcccgaagcttgtgttcctgaccagtcataaaccggtattcaatctgggagcatttttcacgattgcaatcgtattcctggtatcggcagcagagacgacaggtgcaacgacggcagtctgtacgggagcacttggacgtgatcttaagatgaaagaacttcgcggttcactggcggttgatggattttctagtgcgatctccggatgttttggatgtctgccgctgacatcatttagtcagaatatcggacttgtgacgatgacacaggtgatcaaccgttttacgattctgatgggagcactgattctgatacttgcatctttattcccgccgcttggagcattcttcaattcacttccacaggcggtgcttggcggatgtacggttatgatgtttggatcgatcatgtatgaaggaatcaagatgctgaaagaatgtaaattcgatgacagaacaatgattatcgtgtcactgtcatttagtatcggagttggtctgacacagacatccgggaacttctttgcagcatttccaagtgcggtaggagatgtatttaatggaaatgcggtggcaggagtgttcgtggtatcgctgcttttgagtctgtttttgccgaagaagacgaaggtggagtaagcgagaatataaaacagcatagtgaatcatagaagaaaagattatctggagaaagggaagtatccggataatctttttttgggccatgcgtttataagtagttgccgaaagaagattctttagagttaaaaatataagaaaagttggaaaaatcatataattacgaaaaaacggttggaatattgcgtggtaaaaattattgacaaacgataattccttgctataataaaattataaattatcgaaaaacaataattttcaaacacagaaaggaggaaatatgggaattcgtatatgcctggatgaagtcctgaaaaagaagagaatgacttcaaaagaattatgcagacaagtcggtattaccgaggccaatctgtcggtactccgaagcggaaaagccaaaggtatccgtttgcatacgatgaatcgtatctgttatttccttcaatgtgatgtaggtgatattttaaaatttgatggaaatctggatgaagaggagggtgaataatatgaagatgaaaagttttgaaaaattccggaaaccactgaccagtctgatgagatttctggaaatcttacattggttcgatggtatcgtattactttgggcgggatcggctatacctatgcacagcgtgcacattaacggggctatattcggcatcaaacaggataccatgatgaatgcctacgggatgctctttacactgattgatgcaaagggaaatatgcggatgcatctggtatccgtgtggcttctgctgttgggagcaacatctatattactggccctgatttttcgcaacgttcataaaatactgaagtcactggaaggcacaaaggaacaaccagaaatgggcacaccgtttacagcagaaaatgtagaaagagtaaagaaaataggaatttacagtatagtaatgccgacgattcagaatatggtcgtttatatttgcggagtattgattaaaatgaatggactgaaagatgtcaattttgaagtgagaggattcatttttggaattattgttttatgtttagcctatgtattctcttatggagtaaatctgcaggaagaagtagatgggtttatctaagatttctatttggagaggagagatggatatgcagaaaagtatcaaatcattgaaaagaaatggcatattgttattggcgtatgatttattggtgttatgtattgtatttgtaaaaaatggaatgataaatatgtcagcggaagcggccacttctctaattgtatctattggttttggaatattcatcaatttactctggatcgtggattccaaaacctggattactgattacggaaaaaggaaatgtatctggtcctattggtgtggcgaaattgtacttctgttgttagtagttgctttggaaaatatgaatcaactggttgcaacatctgccatattgggaatgatggcggtatatcttataattggtatatggtgggtgagccgtaagctctaatgcgttaacgctctccacacacattcagaaactcctgtacaagcggcaccggcttcttatcctttgcccagatcagaagtatcttagttacaagatccggctcatccagttcttgtatacaaagtccgtcacaaaggcttgccatggactgtggaaagatggcagtcgcaagattttcctttgcccagagcattgcacctctcggatcgtcgcagacacagaagatgtccggattcatattctgggcatgaaaggtattcatgatgagttcttcgtatcttcggtataagattaatggtctgtgtagaagatcagcgagttttaaggaagaggcagtattttctggcgcagataccgcgatcatcggctcagaacacaattccatataagacacctcgtcaagacgcagtggtgttctggcaacggagatatcgatgatcccgtccagaagatactgataaagcgagtaagtgatcccgtcgtggacttcaaagttcacgtcgggattttttttcgaaaattgggaaatataaggcatgatggtatctaccgttgtcggagtcaggccgatacgtaagatacgttttttaccggtttttgagacttccagttcggtagatcgggcgtattccagcaggttaccggagcggtcgtagagaagcttgccggcttcagtcagggtaacacccttgctggtgcggtcgaaaagttttacatttaattcattttccagctggcggatctgatagctgagcggcggctgggacatatttaagtgtcttgcagcttcgttgatgctgccggtggatgcaatctcgcggaaatattctaactgtctgagttccatgttggatcaccttccttatacattttttgtattgcaaagctataaaaacaatattattcatatcaatgataacggactataataaaacagtcaaggacattaataataagaagagacaagaaaataaaggaatggagtgaaagaaatgaagcgtcttgagaaatttctgagaccataccgcagggaaagtatcctggcaccgctttttaaattgctggaagtggtattcgatcttatggttccggttgtggtagctcagatcattgatgtgggcgttgcgaagaatgaccgtggatatattgtggaaatgttcttcgtattactgcttatggcagcagtcggactgttgtgcagctttaccgcacagttctttgccgcaaaggcaagtgtcggatttgcgaccagtgtcagacaggcaatgttcgatcatatccagagactgtcatttacagaactggatacgctcggaacggatacgctgatcacaagactgacagacgatgtgaaccaggtgcagaatggaattaatatgggactgcgtctgttgctgagaagcccgtttgtcgtgatcggtgcgatggtgatggcatttaccatcaatgtgcgttgtgcactgatctttgtcgtaacagtgccgatcctgtttgtagttgtattttccattatgctgatcagtattccgctgttcaagaaagtacaggcaggactggaccgtgtgacaggacttacaagagagaatctgacaggtgtccgtgtcatccgtgcgttctgcagggaagaacagtcggtggaggaattcgaagaaggaaaccgtgagcttacgagactgaatgaattcgtaggaagaatttccgctcttctgaatccacttacgtatgtactgatcaacgtggcaactgtgttactgatcgcacgtgccggagtgcaggtgaatatcgggaatctgcaacaggggcaggtggtagcactgtataactatatggcacagattattgtagagctgatcaaattagcctctctgatcattacgttgaataaatcaatggcgtgtgcagaccgtgtggctggtatcctggatgtgaagtccagtatggaatacaaagcagtggctggaaatgataaagttgatgataatatggcagttgagttcaaccacgtcaccttcacatacgaaggtgccggagcatccagcttatcagacatcaccttccgggcgaagaaaggacagacgattggaatcatcggcggaaccggaagtggtaagagtacactggtcagcctgattccgagattctatgatccacaggaaggtatagtaaaggtaaatggcgtcaatgcaaaggattatccgcagggagaactttgcagtgagataggcgtggttcagcagcgttccatcctgttcaaaggaagtatccgtgataatctaaagtggggcaatgatcaggcttcagatgaagatctgtggaaagcgatcacaatcgctcaggcaaaagatgttgtagaagctaagcctggaaagcttgattttgaagtggaacagaacggacgcaacctgtccggaggacagaaacagcgtcttacgatcgcgcgtgcactggtcagcaagccggatatcctgatactggatgacagtttaagtgcactggattttgcgacagacgcagcgcttcgtaaagcaatcggtgaactggaaggcaatgtgacaacattcctggtatcccagagaatttccggcatccggcaggcggacaagatcctagttatggacgacggtgaactggcaggacagggaacacacgaagaactgatggaaacttgtgagacctatcaggaaatctattattcacagttcccggaagaacgtccggttgtaatgaagacttctgagaagacagagaaaggagcggcagagtaatgaagaaattattaaagctcatagggaaatataagattttccttggattcagtgtcatctttgctgcgatctctgtagtattgcagttgtatgtgccggtcttattcggagatgcgatcgatgaagtggtagcagcacatcaggtgaactttgatatgatgtggtattatctgagacagattctggtattcatcgtgatatcggcacttgctacctggttcatgaatctgttgaacaaccgtatgacttaccggatcgtacaggatatccgttcacaggcgatccgccacatccaggtattgccgttatcttatctggatcagcatagtaccggagatatcgtaagccgtgtcattgcagatacagatatcttatccgatggtttgctgcttggatttacacagctgttttccggaattgtgacgatcgttgtgacgctgatcttcatgttctccaagaatgtgtgggtaacgcttttagtgatcattctgacaccatttagtttcgtagtagcgaaattcatttcttccagatcttatacgatgttccggaagcagagcgagacccgaggacgccagactgcactgatcgaagaaatgatcggcggacagaaggtagtcaaagcattcggttacgagaaagaatcatccagaagatttgatgagatcaataaagaactgcagacatacagccagaaagcggtattttacagcagtttaacgaacccatctacacgatttgtcaacaatatcatttacgccggagtagcactactcggagcttttctgataccgggcggaacgctgacggttggaggactttctgtactgttatcctatgcgaaccagtatatgaagccgttcaatgatatcagttcggtaattacagagatgcagaatgcgctggcatgtgcggaccgtatctttgacctgttggagcagaaagaagagacaccggatgcagaaggagtatttgctacagtcgatggcaatgttacaattgatgatgtggcattcagttatgataaagaaaaagaactgattaagaatttcaatctggatgtaaaaccaggtatgcgtatcgcaatcgttggtccgaccggatgcggtaagacgacatttattaatctgctgatgcgtttctatgacgtagatgaaggaaaaatcctggtggatggaaaagacatccgggaagtatccagacatgcgctcagaagcagctttggcatggtactgcaggatacctggatcaagagcggaaccgtgagagacaacatctgttttggaaagccggatgcaactgatgaagagatcatctgtgcggcgaaagaagcaagaagctgggaattcatccgcagacttccgaaagggctggacacggtgctccatgaagacagcatcagccagggacagaaacagcttctgtgtatcacaagagtcatgctttgtctgccgccgatgctgatcttagacgaggcgacatcaagtattgatacccgtaccgaactgcaggtacaggaagcatttgataaactgatgaagggcagaacaagctttatcgtagcacacagactttccacgatacggaatgcttcgttaatcttagttatgaaagacggtaagatcatcgagcagggcaatcatgaagaactgctgaaaaaaggtggattttaccataaactgtatcacagccagtttgaaagttaatatatcaatgtaacataagtgaggccggaggtttttgaaatctccggcctcacttataatgcacagtatgaatttttgcggtataatacaattacagtgtaatgaaaacagggagaataagcatgggctttagaaaagattttgtatggggagcagcaacaagtgcatatcagatagaaggtgccgtgaaagaagacggaaaaccgatcgatgtatatggacagaatatatataatggatattgtgtgcggatgggagaagacggaaggtcggaaacagtaagccgctatgaaggatttccaaaaacagcgattgtacttccagtggtcactgatggataactttgaaataaggctaccgcaatcccactggctttagacggtgggttaaggtagccaaaaatcagaaattattgtatactcatggcatgggaacat

SEQ ID NO: 2834 - DNA, 15778 bp, Unknown
  gut microbiota DNA sequence
tttttgtatagaaattttgaaatatagagggaatgaataaataacaagtgctatagattatatcactttaacaaatagatttctgacagatataatataaatatatgggtattagggatacctgagaattatttgtattaggaggaattacttatgaacatcggagtaacagaaatcagcccaagagcggtgcagagagcagcagagaagaattttaaaagcgggtattactgttgtgaggcattgatgtgcaccatccgtgatgaatttaaactggatgtaccaaaagaagtcattgcaatgtcatccggtatggctgtcggagcaggcaaatcgggatgtgtctgtggcgcattcaacggaggtctgcttgcacttggaatgttcttcggaagaacagagcaggacgggccaaccaatccaaagagtgtaaaatgtatggaactggttcacgaactgcatgactggttcaagaaagctaatgggaagaatgcaatctgctgcagagttctgacaaaagaattcaacatgggacagggtgagcacaaagaacagtgtatctttttcacaggactgtgcgcatggaaagtagcacagattgtctgtcgtgaactgggaatcaagaacctggatgaaattgatgaaccggcagaacgtcgtgcaattgcagatatctagaatacatagatccagactagaaaggaagacaagatattatgaaagatgtaatcaaaaaaataccgattccaatctgcggagtcatgcttggagcggcagctttaggtaacctgcttcagagctattcagaaggaatccgttatgtgtgtggagtgttcgcagcatttctgctgatcctggcacttctgaagctaattatgtttccgggagctgtgaaggaagatatgaagaatccgatcatggcaagcgtatcaggaacatttccgatggcacttatgatcttaagtacctatgtaaaaccatttatcggacaggcggcttattatatctggctgtttgcgatcgcattacatatcgtgctgatcatttattttacggtgaaatttgtatttaaattgcagatgccaaaggtattcgcaagttattatatcgtatatgttggaattgtcgttgcatcagtcacggcacctgcttatgagaaacttgcaatcggaagtgcagcattctggtttggatttgtgacactgatcctgttactgatcctggttacataccgctatgtgacggtgaaagaagtaccggatccggcaaaaccactgatctgtatctatgcggcaccgacaagcctctgtatcgcaggatatgtacagtctgtcatgccgaaatcttacggatttctgatgggaatgtttgtagttgcaacggtgatctacatctttgcacttgtaaaagcaatcggctatctgaagatgccattcttcccaagctatgcggcattcaccttcccatttgtcatcagtgcgatcgcttcaaaacagacgatggcatgtgcaatgaatatgggacatccgatgccgttcctgaaatatgtggtattgatcgagacgattattgcggttgttctggttgtgtatacttatatccgatttatgggatttatctttggtggaaagaaataaataaaaaataataaagagtggctgcttgttgtagggcagccgctttttgtgttcttgcatagccttgaaaaaaaggttatactttatgatatgtttttttgtttgacatgacagttaataataagatgtatatggaagcatcgctaaactggaattagggaattgcaatttgcgggaaagaaaatattcgaggtggcagggtgaaatggtaaagatagatctgatcacaggattcttaggatccggaaagacaacatttataaaaaaatatgcaaaatatctgatagaccagggagaaaatatcggaatactggaaaatgattacggtgcagtcaatgtagacatgatgctgttaaaagatctggaaggtgagaactgtgaattggagatgattgccggaggatgtgatgcggactgtcacagaagacgtttccgcacaaaactgatcgcaatgggaatgtgcggctatgaccgtgtgatcgtagagccgtcgggtatctatgatgtggatgaatttttcgatgtattacgggatgatccgatcgacagaaggtatgagattgggaatgtgatcacggtcgttgacgcaaaattagaaccggagctgtcagatcaagcagattaccttctggcatccgaggcggcaaatgcaggatgtatcgtactcagcagaagtcaggaagcagaggatgaagagatagaaaataccgtcgcacacctgaatcatgcaatggaaaaagtacagtgcaagcggagattccaaaatgagattataataaaagactgggagacattcgacaatacggattatgaaaagctgttatcctgcggatatgtatcggagaattaccggaaaatgcatatcgaagagggagagacattcaaatcgctgtattttatgaatctggataagacaaaggatgagattacagaagcggcaaaaaaagtcctggaagacggagaatgcggcaaggtattccgtgtcaaaggattcctgaaagataaagaagaaaaatggctggaattaaacgcaacgcatcaggagataaggactgctccgattccggaaggacaagaggttgtgatcgtaatcggagaagagatgaatgaggcgaagatacgtgggtatttttcctgaaaaattaatttgtcagaaatacaacgggaatgttaataaaataactaaaaatatttgttgaaaagacacaagaataatgcataatgacgaaaagaaaatagagaataattgtgtagattagctgaaaagatggaaaatgactaaatgtcattgaaatgatttgtgcatcatgatatagtaaatgcagttgaacaagcaagctgagataggagagcgaatacaaagtaatcagacgattactttttaggcgcactctttttttttgaaaaataacccagggtgtaatagaataaatgcaaagcataatagtttagcaaagtagaatgaggacagataagatgaatcagatattttatgatgcggttggcaataatccgattattgcggctgtgaagaacatggaagatatagaagtaagttgtacaatagaagagatacaggtgattttcatattatttggagatgtctgttcgatagacaggattgtaaagcgggtgaaaggtgccggaaaggttgcgatggtacatgtagatctgatcagcggactcagcccgaaagaaatttcggtagaatatctgaaagaacatacagaagcagatggaatcatatcaacaaagccgtcactgatcaagaaagcaaaagaacttggaatgtatacggttctcagatattttctgctggactccatggcatttgaaaatatcagacagcaacaacatatggtgagaccggattttatagaagtacttccgggtgtgatgccaagagtgatcaaacggatctgtggttcagtgaagacaccgatcatagcaggaggattgatcacagataaagaagacgtgatggctgcattatcagccggagcaattgcagtatcatcaaccaatcatcaggtatggaagatgtaataactgtaaaagaaaaaacagaatatttaattgcttgagggagcaatttaaatagaacgcatgcgaaaaagtaacaagtaaaatgaaacgaaaatcaggaggaaatgaatatggcaaaatatgtaatggcgttggatgcaggaactaccagtaacagatgtattctgtttaatgagaaaggtgagatgtgcagtgtggcacagagagaattcacacagtatttcccaaaaccgggctgggtagagcatgatgcagatgagatctgggcaagtatgcttggtgttgcggtagaagcaatgaatatgatcaatgcagaggcagaagatattgcagcgatcggtatcacaaaccagcgtgaaacaacaattgtctgggacaaagagacaggagaaccggtacatcatgcgatcgtatggcagtgccgaagaacatcagaatattgtgattccttaaaagaaaaaggattaacagataaattccgtgaaaaaaccggactggtcatcgacgcatatttctcgggaacaaaggtaaaatggatccttgataatgtgccgggagcaagagaaagagcagaaagaggagaattattatttggaactgttgagacatggctgatctggaaactgacgaaaggtgcagcacatgtgacagattattcgaatgcatcacgtacaatgttatttaacattaatacactggagtgggatgatgagattctggaagaactggatattccaaaatgtatgttaccggaaccaaaaccatcaagctgcatctacggagaggcagatccgtcttatcttggaggtccgatcccaatcgcaggagcagcaggagatcagcagtcagctttattcggccagacatgtttcaatgcaggagaagcaaagaatacatacggaacaggatgtttccttctgatgaatacaggggaaaagccggtattttctaaaaatggtctggttacgaccattgcatggggattagacggcaaagtaaattatgcgctggaaggttcgatctttgtagcaggagcagcgatccagtggttgagagatgaacttcgtattattgattctgcaccggattctgaatatatggcaaagaaagttaaagatacgaatggatgttatgtagtacctgcatttacaggacttggagcacctcactgggatcagtatgcaagaggaaccattgtaggaattacacgtggagtgaacaaatatcacattatccgcgcaacactggaatcactggcatatcaggtaaatgatgttcttgttgcaatgaaagcagattcaggaatcgatcttgctgcactgaaggttgacggcggcgcaagtgccaacgatttcctgatgcagacacaggctaatatcatcaatgctccggtaaaccgtccgcagtgtgtagagacaactgcaatgggagctgcttatctggcaggtcttgcagttggatactgggagagcaaagaagatgtaattaagaactgggcaatcgacaagacattcgagccaaaaatcgatgacgaacagagaaataagatgatcaaaggctggaacaaagccgtaaaatacgcttatggatgggcgaaagaagattaaaaactgaataaagaaagatagatagaaaaagggggaattttctatgttaccttatattgctgaattcttggggacaatgatactgattattcttggagacggagtggttgcgaatgtgaacctgaataaatccggaatgaaaggcggcggaacggttcagatcaccattgcctggggtcttgcagttatgctgccggcatgcatatttggggctgcatccggagcatcctttaatccggcactgacactggcgctggcaatcgacggaagttttgcatggtctatggttccgggatatattgtggcacagtttgcgggagcatttgtgggaggtgcagttgtatatcttctgttcaaaggacagtttgatgcaaccgaagaccaggcaacaaagcttggagtattctgtaccgcaccatcgattccgaatcttggtctgaatattttcagtgaggcagtcggaacatttatacttgtatttgcaatcaaaggaatggcaaatgttccggaacttacagacggacttggcaaatttatcgtatttggaatcatcgtttctataggtatgtcactcggtggcctgacaggatatgcaatcaatccggcaagagaccttggaccacgtctggcgcatgcagtacttccgatcaagggaaaaggaagttcaaactggggatatggaatcgtgacattaataggtccggtaataggagctgttgctgcggtattgctttttggtgctattccgtggtaaaataacaaaaaatagaacaagaggcgtgagagaagagagcctgacaggataatcgcatattcgtgatgcgtttacttgtcaggctcttttttcaaaaaatcatacagatattagataaggagagataaaaatatgtatgatgtgataataattggaagcggagtctcaggctctgcagcagcaagggaattgtcccgttataaagtaaaggtatgtgtattagaaaaagaagaagatgtctgctgtggaacgtcaaaagccaacagtggaattgtacatgcaggatatgatgcaaaagaaggatcattgatggcaaagttaaatgtccgcggaaatgcaatgatggagcagttatcgaaagatctggatttcccgtttcagagagtcggttcgctggtaatctgtctgagagaagaagatatggataaattgcaggcattgtatgacagaggagtggcaaatggtgttccgggacttcagatcctgaacagagaagaagtgctcgagatggagccgaatattgttgataatgtatatgcggcactttatgcaccatcagccggaatcgtatgtccatttggattgaatattgcgatggcagaaaatgcctgtgaaaatggtgtggaattcaaatttgatacaaaagtacagaaattggaaaaaaaggatggtatctgggaaatttacacaaatcagggtgtgttcaagacaaaatatgtggtgaatgcggccggcgtttatgcagacaaattccataatatggtcagtgaaaagaagatacacatcacaccaagaagaggtgattattgtctgttggataaaacagcaggcgcacatgtgagcaagacaatatttgctctgccaaatgaattcggaaaaggaattctggttacaccgactgcacacggcaatctccttcttggaccgacagcgattgatatagaagaaaaagaaggaacgaatacgacaagagaaggactggatcaggtacttacaaaagcaggacagaatgtaaaagatataccgatgcgtcaggtaattacttcatttgcaggacttcgtgcacatgaagaagggcatgaatttatcatagaagaagtagaaaatgcgaaaggatttattgactgtgcaggaattgaatctccgggccttaccagcagtccggcaatcggggagatggttgcagggattttgaaagaaaagcttcatttggaagaaaaagaaaatttcattgcaacaagaaaaggaatcctggatccaaacactctgagtaaagaagaaagagtgacattgatcaaagagaaaccggcatacggtaatattatctgccgatgtgagatgatcacagaaggtgagattatcgatgcaatccatagaccgcttggagcaaagtcattagacggcgtaaagcgcagaaccagagcaggtatggggcggtgccaggccggtttctgttcccctagaacgatggaaatactggcaagagaactggacattccgatgtcagagatcacgaaatccggcggaaaatccaagattatcacaggaacgaataaggatcagctgtaatagaaaaaggaagatagattatgaaaacatacgatatagtaattattggcggaggcccggcaggacttgcggcagccgtatcagcaagagaaaatgggatccaggatattctgatcctggaaagagataaagaactgggtggaatcctgaatcagtgtattcataatggtttcggtcttcatacatttaaagaggaactgacaggaccggaatatgccggaagattcatcaaacaggtaatggatcttggcatcgaatacaaattgcatacgatggttatggatatcagctcagataaaatcgtaacagcgatgaaccgggaagaaggattatttgaaatacaggcaggtgcaataatcctggctatgggatgccgcgaacgttccagaggtgcattgaacattccggggtatcgtccggcaggcatttactcagcgggaacagcgcagcggttggtcaatatggaaggttatatgccgggaagagaagttgtaatcttaggatctggcgatatcggactgatcatggcaagacgtatgacactggaaggtgcaaaggtcaaagtagtagcagaactgatgccatattccggtggtttaaagcgtaatattgtacagtgtctgaatgactatgatattcctttgaaattaagccacacggttgtagatatcaaaggaaaagaaagagttgaaggaatcacactggcagaagtggacggtaaaggaaagccgattccgggaacagaagaagaatacacttgtgatacgttattactttcctgcggactgattccggaaaatgagatatccagaggtatgggcgtagatatgaatcctgtgacatccggaccgaaagtcaatgaaagcctggagactaatatcgaaggtgtatttgcatgtggaaatgtactgcatgtacatgacctggtggattttgtgtcggaagaagcgaagactgcgggaagaaatgcagcagaatatgtgaagaacttacaggcagataccgacgatagagataagcatagtagggaagaggcagcggagattgtattgaatccggtagaaggcgtgcgttatacagttccaagtaccattaatccggttcatatggatgagaatcttacggtgcgcttccgtgtgggcggtgtatacaagaactgttatgtgagtgtatattttaatgaagaacgtgtgatacataagaaacgtccggttgttgcaccgggagagatggagcagattaaacttacgaaagaacagcttatgaagtatccgggtcttaagacaattacagtaaagatagaggaggcgtagaggatgggaacagtaacaacgagagaactgatatgtatcggctgtccgatgggctgccctctgatcgtgacaatggaagccggcgaagtgatcagtgtaacaggaaatacctgcaaacgaggagacgtatatgcaagaaaagaagtgactaatccgaccagaatcgtaacttctacggtaagagtatccggcggtgatgcggatatggtatcggtgaagacaaaggaagatattccgaaaggaaaaatctttgaatgtgtgaaagcactgaagagtgtggaagttccggcaccggtacatatcggagatgtactggtgaaggatgtggccggtaccggtgtggatattgtggcgacgaaaaatgtagaatctatataaaatttacaaccgctacaaaatacataatggatatgaaatatacaaaatatgtgaaaatttgctataatggattcagatttaaaaagataaaaatggagagatgatcgtggaaccatattattatagcaagatgaacaaagtacagcaggcagcctatcatgcaattcggcagggactgcttgaaatctcagattcaatacagattccaggaatggaggcggaggaactttataatgtattcttccgcctgcgtctggatcatccggaaatcttctgggcaaccgggtataagtacaagtattatccggattcgcccaatttcatttttatcccggaatatttatttgataaaaacaaaataaaggaacatcaaaaagcactgaagtccagagtagaaaagctcgtaagaccggtaaaagataaatccgaatgggaaaaggaaaaatatgtacatgatttcatctgtgcaaatgtacactatgataaattaaaaaagtcatattcccatgagatcatcggaccgctcggacagggtgtcggggtctgtgaaggaattgcaaaatcagtgaaagttctgtgcgatgcactcgggatctggtgtatgatcgcagtctgcggtaacaatccggagaaagggatcaaataccgtcatacttggaacattgtgagaattggtggaaattattatcatctggatgcgacatttgataatacactcggaaatgacaaaaaagaaatccgctacgactatttcaacctggatgataaaagtattttcagagatcatgagccgctgatcgctccggcaccaaagtgcgaagaaggggaccatttctattataaagagaagaaactgtcgtttacaaagacagaagatgtatatagaagagcattacagaccgcaaaaaaaggaagagtatttacgtttcactggcggggcggttatctgacgaaagctgttttggaagaacttctggagctgattcagaaagccggaaaagaaaagcagaagaatgcaaggatcagtttgaactggccgcaggcggtattgcgatttgattatgtagaagatcatggggaagtggaaccggaagttgtggttgaagaggcaaatgaaggagagaaagaatagtggatgcatttgtaatgttgcaagagcttctggaacaggaacagtttgagctgatttttccggagcgatcaatttcagggcaaccggatatccgactggtatatctgatgaatgatgcggtggaaagctttcttgtatttcacaatgccagaatgacaggggaatacagaccggactatgaaggagagatatcggcatcgatgagttttgaagatatggagtacattcttgtggtccatcagggagattcagtcgtcacgatatttttcgaagatctgttgacagatgtccatctgtatgattatggggagatcggacatttctggatgaaggattatgaatatctgcggcagctggaataccgtctggcaatcatgagagacaagtatgattatctgggagaggaatactgtacaccagaggaacgaaagcttgcgatgctggtggattttccgccgcttaattactgctgttatcctgcagtgccggaacaatacatcgtcccaagagtagagccatgggtgccgacagaagaagcaattgcagtgatggagaaactggccgcagaggcggatgataaaggattgctgaagatattaaagaactaccggaaacatccaaagccatatatcgcaaagaaaattgcagcaatgcttcaccggaatgcgcatgcaaaagtggttgatctgttggatgaaaagttgagaaaaacagtttcaggctacaagaaacgttcatttggagaagagatggatgtaagatgtcagcaactgatgcacaaggtggaagaaagaagacagcaattgcaaaaggaaggaaaagattctgttattttaagagaagaaccattcgagattgcaaaagacagtatcggttatcagattcatctgatgatctgggagaagggaatcttaaacaggaaagtgaaaatagagagttattcgctggaaaagaataaagaatagcagatgcttgtccgcatgccagtattaaaaatgggcatccacaccggatgcccaaaaggaaaaaagttatgaaaaagaaaaatgatatatataaactcggttgttagcttttattaaataaccgaaggattttttaggcgaagccagatcagataaaagttgcttcatatttctgatacctgagtgacttctttgttgttgataattatataatacatggcaaatgtttctaatttgtgttataaggctaaagaaaatatgaaaaatcttaagataatctgtaggaaatctaaagtgagcaataagacttccgatagaagaggttgagaaggtgttagcacagtaaaaattatccctgtgtaactgctgctctctgctgagtttattcagctttctgatagatcaggcggctatcaccgcttttcaatgtagtatgcccacagcatgtgaagcctaatttggcgagcagatgctgcatcgggatattatcatcgtgtgtatcaatcttaatatttggaaactgttcataagcccagttcaggcagaaggtggcaatgcctttcgtgtccggtgctgtggcaactctgtgaacaacggcgtaagggcaggaattcaaccaggaaccgtcaatgttcagataatcgggatcttcttccggatgaaaatagaatacaccgccaatccgttcccggtcatttgcccggatgatacagacatgtaagcagccggaacggatgtcctgtgtagtcagttctaacggaggatagttgtccttccactggtcagggtttccatgttctttcatatattcccgggcataagcatagattgcaaggatatccgggaggtcattcattgttgcttttctgatctgcataaaaatctcctttatatataaagcgttcgtttattttcgtaattgtgggaatatctcgatactccgttccagaattcccttcatgtatgcaatcgcagtgccataatttgtgatcgggatatctgcatcatcggcacatttcaggcggtatttcatctcacgctcgttcagcatacatccaccacaatggatgatcatcttatatcgggtcagatccagaggaaattcggttccgctggtaaattcaaaggacacgtcttttccggtatatttgcatacccagcgaggcagtttgacagtaccgatatcgtcacactgacgatggtgggtgcagccttcgctgatcagaatggtatctccgtcttccagtgtgtctaatgcacgtgcgcctctgacaacggtttccagattccccttgtatcttgcaaaaaggatagaaaatgaagttaaaaggatatcagaaggtgtatctttgtcaacttctttaaatgcctgactgtcggtgatcacaagcgcaggttttttgcccagtgagtccagagtgctcttaagttccgtctcttttaccacaatggcagttgtaccggcatcgagaagatcacggatcgtctgctgttgcggaagaatcagtcttccctttggtgccgccgagtcgatcggaaccaccagcacgacaaaatccccgggttttacaagatcacgcacaatgaatctggaagaatcctcagaaggaaccagagatccgagccgttccttcagttcatgaatatgaagatgttctgtggtattggtccacagaatattttccagaggaatcttatatttcaggtgtgtggatacaatcatttcctggtgtacatgttcggataccagatcagctttattgagtacgagcaggagaggaatttttttatcctgtatacgtgtaagaattgcattgtcctgtggggtgattccggtggttccatcaactaccagtacagcaatatctgtcttgttcaagacctgataggctttctggatacgaagttttccgagttctcctgtgtcatcgagacctggagtgtcaatcatgacaaccggaccaagcggaagtagttccatggctttgaacaccggatcggtcgtggttccgcgtacatcggatacgattgccagattctgtccggtaagtgcattgatcaggcttgattttccggcattacgcctgccaaagattccgatatgtgtacgttctgaagagggggtgttgtttaaactcatgatgtattcctcgctttctgacagctatgtgtaaagctgaccatataaaaatgttaaaactgtatgaatctgcggtattgtttcaatgattaaatattcagggaatctccacggtctgttacaacctgatatccaacggatttcatccgcatttccagacaatgtctgcactgggcggattcatctccggtacagatcttattatcatatagaagataatctttccggacttccgtcggtgagagatttggcattacgacattggctccggcaaggattccgagttcacgtcctttcggatggatggttccaagtgcagttgtggccggaagcagaacctttggaatcatcagacgaatcagaccaagcatatataaggtaagctccagtgttcccgcagcttctccggcaaatggggtatcatggtgtgggatgaacggaccgattccaatcatgtgtggattcagttctttcatgaaaagcatatcttccgccagatgttccggtgtctgataaggcgatcccaccatgaatccgcagccgacctgataaccgatgtcctttaagttacgcagacactgctgtctgtggacgggactaaggtttgatggatgaagctgtctgtaatgttcgtgattataagtttcatgacgcagaagataacggtcggcgcctgcatcgaagtaagcctggtaactttcttttgatttttcaccgatggagagggtgatggcgcagtcgggatattgctctttgatcatccggatcagatggatgatgcgttcatctgtataatatccgtcttctccaccctgcaagacaaaggtacggaagccaaggtcatatccttctttacaacaattcaggatgtcttcttctgacagacgataccggtgtgcgtttccattgcttttccgtatgccgcagtagagacagtcatttttacaatagttggtaaattcgatcagtccgcgcacgtagacgtcgtgtccgtaatagcggtggcgttctttgcgcgccagggaaaagagatattcggaaagttccggagtgcgtccatcgatcagtgtgatccattcttctttggtaagtgtatgttctttgtgtaatttatcaatgaaacttttttgattttggttatctgtattcatttatagttgtcctttaattgctggttgttgataatcatctccatatagtatatcatactaattaataagagtagacaataaattcattggaaactttggaatgtagtgtggcagcataaataaaaaggaaaggaaacaaattatgggaatcggcaaaagaatattaaatgtattgatcggactgttgtttatcataagtgtaacggtattgggatcaagttttctggcaaaaaaggtattggtggatgcaatcagtcaggcaggagtcgatactgcaatttcacaccggatgatggatgcggtattcggttatgcaggagcggatgatacggaatggatcgcaaagatacagaacaagatcgagaaaaacggagaagtacaggcaattacacaaaaggtcatgaacgagataacagaggatctttccagcggaaaagcgtacaaagatgtagatgtaacaaaagaactgaatcggattctggatgacagtatgcaggaaattaaggatacgaatccggaattaaatgacgatatgctggcaatgatgaaacagcagttgaaagaggaactggttgatgtgcaggatgtgctgaacagctatgcttcaaacctgtataataatatgaacgataccagtacggtgcaaggaaaagttgcaaagctttataccatattattgtctatgccgtgccgtgtggcagcgggagcagcaatcctgattcttgcggttctgacgattctactgggctatccaagatacagaggtctcttttcacttggtgtagaaggtctgatctgcagtgttatctttgcgccgggaatcggacttatgggaaataaggtactcagcttactgacggacagaatacttggacgtacgattgatgtgaatctgaaggcattcctttggatgggatgtatctctgccggagcaggagtggtattcctgcttgcggggctgatcgtgagctggaaagatgacagataaaaatccaaaattcaaggttgagaaagaaggtgacagtggatgttaaaggcatataaatatagaatatatccaaataatgagcagaaaatacagattgc

SEQ ID NO: 2835 - DNA, 29940 bp, Unknown
  gut microbiota DNA sequence
cccggaacgaattcgtttgtcaggaaagcatctgttaattcttctcttaatttgtttccgatggtgaaagctcccatacatgcgatgttggcatcgttgctgagacgcgctctttttgctgagtagatgtctgaaagtaatgccgcataagccccttttactttgtttgccgcgatggaaacaccaagacctgttccacagatcaggattccgcggtcatattcaccggaagcaacagcctctgcaactgcaactgctgtgttggcgtagattggatcttcgcttccgaaatctttgatctcgccatagcccttattttccataaatttgatcagttcctcttttgcctgctgtgcgtttggatcacatccgattgcgattttcataataattatcctccttgaattatgaattgatttttttattaaagtaacatctgataaaatgtcttcttactatataaagaagctttattttgcgccatgtgcgctgattgcatcccggatcaaagtattgaatttgtctgcctgccatgcggcacgtcctgtgaacaacccgtcgatggatggctgaacgatcagatcacatgcattgccaggatttacgcttccaccgtaaagtgccggaatctcatcggctgcatcaccgaagatctcacataaagttgctttgatgactttgtgcatttcttctgcataatcagcagaagcaggagttccgttgactccgatggaccatacaggttcgtatgccacccagatgttcttggcgtcttcggcagatacaccatgaaatcctacctttaactgtgtgcggagcacttctgcgctgatgccgaattctttttcttctgcagtctctccgatacataaaagagtcttgaatccatgttccagtgcgcagagaactttcttgttctcttctatatcggtctcgccgaatacatgacggcgttcggaatgaccgatcatgacaaggccgatgcctgcttcctgaagcatcagaggagaaatctctcctgtgaactgtccctgttcttcccagcacatattttgtgcgcccagacggatatttttctggtcgattgcttttgaggcactatccagggtagtataagaaggaatgatgaataattcgatttcatccctgcttatatcttttgtcagagattccagatcctgaagataggaaacggtatcttttatattcttgtacattttcaggttacttccaaaaaaaagttttttactcatgataccctccgttttcgatattttcttttactttcttttttacgattatatccctaatgcagtagaaaatcaataataaaaacaaaaataaacgaaagaaaaagaaaatacagaaaaacactgataaaacgttaacgaaatgttgaaaaatgcacaaaaacaagaatggaaatctatgcaattgtgataaagttacaaaacgaacagaaaaactattgaaaaagcagaaaaagaaatgtaagatataaacatcaaaacgaaaacgcaaacaaaaataaacgaaaggaaaataaaagattatgagtacacagtataaaccagttacagcaatcacaatgggagatccggcaggtatcggacctgagatcgtagtaggaacaatgttaagcgaagaaatccacgactgttgtcgtccgtttgtaatcggaagtatcgcgatcatggacagagctgcaaaggttcttggaaaagaattgaaatacaataagatagaagatccatcggaagcaaaatatgaattcggaaccgtagatatcattgagacgggcgattacgatacagattctatcgagtggggaaaagttcaggcacttgcaggacagatggcagttgactggatcatgaaatccatcgaactcggagaagcaggaaagatcgatgcagtttctacagcaccaatccacaagggagcaatcaaactgatcggtgtaaaagaacctggacatacagagatctatcagaatgtaacacattctccatacgctctgacaatgttctcctgtcacaaattaagagtattcttcgtaagcagacatatgtcacttgtagatgcatgtcattatgctacaaaagatgtcatccttgaagatgttattaacattgacaaagaattaagaaaagtcggaatcgagaatccactgatcgcagttgcaggattaaatccgcataacggagacaacggattattcgggcgtgaagagattgatgagatcgagccggcggtaaaagctgctcaggaaaaaggaatcaatgcaatcggaccttgtccggctgactccgtattccacattggaaaatccggtaaattcgatgcaatcctttctttatatcatgatcagggacacatcgcttgtaagacgttagactttgaaaaatccgtaacacttacattcggacttccattcatcagaagttctgtagaccatggaacagcatttgacattgcaggtaaaggaattgcaggatgtatcagtctgatcgagtctacaaaagtagttgcagaatatgcggcaaaacagcatgagaaaaaagagaactaattcataaattcataaagggaaagtaacaacgaagatacacaaaaaggattggtggattctttttgtgtacagagactaagtgaacggatagaaagagaggaatgcatcatgcctttgataggagcagttgcggatgacctgacaggagcaacaacgacaggtgtattattagcaagatcgaaagcaagaacagcagtattttttaatgaagaagcagcgcagaaagcaagagagacagcatctcttgacgcaattctgatcagcagtaattcaagaccacttccaaaagaagaagcatatgagaaagtaaaatcagctaccaatgcattaaaagcgatgggagtaaaatacttttcaaaacgtattgatacaacgttgcgcggcggcgtaggcgtggaagttgatgcaatgttagatcagctgaatgaagatacagtggcagttgtcgtgccggcaatgccacagtccagaagaatccttgttggcggatattcggtgatcgatggcgtggcattgatcaacacaccggttgcacaggatgtacgtacaccggtaaaagaaaattacataccaagacttcttgcaggccagactggaagaaaggtcggactggttacattggatcaggttctgaaaggaaaagaaggaatcagggaagcgcttacagaagtaagaaatgatggcgcaagtgtcatcattgttgatgcgatcacactggaagatgtggatcagatcgcacaggcctgtattgagcttgactgggacgtagttgcagtggatccgggaccgtttacttccaaacttgcgtacagaagaagactgatccaggaagaacagctgaatatcccaccggcagcaagtgaagaaggaaagacagtcctgatcgcagccggaagtgcaacgccggttacgaagaagcagatggaggtattatgtgaagattccagacatgtcagaatcagcgtagaaccgattcctctgatcaatggcggggatgaagcgttagacgaagcgttcaaagcagtgaacaaagcagtcgaactgattgaaagcggtgaacagccaagagcgatcctgtttgagacagcacttcacggagaacttctgaatctggatgaagaagataaaaaacatggctatgcaggcggaatgagcgcaaaccgtatcaatgccggacttggaaccattatctcgcaggtactggaacaggtcggaagagaacgaattgccggtttgtatactacaggtggtgacacgatggtaaatgtatgctatcagctgggagttgagtgcatcgaagtgatggactatgtgattccacagacagacgtcggaagattggtaggaaaatatgacggacttccggtcgtaggaaaaggcggacttacaggaaatgacaatacagcctgcgatatcgtagagcgtctgtttaaagaatcagcaagatagcatcggggaaagccatcctgatcataaacgaaaaaacgcatcaaaaaagagaaaaggagagagaacatgagcgaagaaaacaaacagcctcaggacacaagaaaagatcttgatattctgaacaaaatgaaaaacctcccgggaggtctggtaatcatcccgttggtaattgcggttgtacttgcaacatttgtaccgcaggtattccagatcggaggatatgtaacagcactgttctatgaaggaaatgcatgtatgatgggattcttcctgatcgtatgtggatctatgatcgacatcaaacaggtaggtatgccgctttacaaaggtgtaattatgaccggtaccaagttcttgcttggagttatcgttggtcttattgttggtaagatctgcggaccacaaggattccttggaatcgcaccattcgtattgatcgcagcaatcacgaactcaaacggatcactgtacatttccctttcttcacagttcggaaatgcaacagatacaggagcaatctcaatcctgtcactgaatgacggaccattctttacactgatcgcacttggtgcaacaggacttgctaatatcccgatcaaatccctgatcgcagtattagtaccactgcttatcggattcatctggggaaatctggacaaaggattccgtgatgcatgtaagacggcgcagccgatcgtaacattcttcatgacgatttctatcggcgcgaagactgatgttaagacaattctgacagcaggagcttccggtatcgtacttggactgatctctgcagcaacagcagttatcttcttctttgtaatcaatcttcttcttccaaagaaggaaagaaatgcgatgggtgcagctatcggtacaacagccctgaactcagctatgacacctgcagcagttgcagaagcagatccttcaatggaaggtatggtaagtatggcaacagcacagtgcgcgacagcatctatcattacactgttcctctgcccgttcattacagcagcatttgataaatggatgcagaagagacagaaaggtatctacagtccggaaggctgggcttatgataaagtaaaagcaaactaatctgaaccgtaatacagataacatttcagtccttttatatgtcaaagtataaaaggacttttctgaaaaaagaaagaaataaaaatacaggaggttatgctatgagtacaccagagaataaggcagaagaaaatgtaacaacagaaaatgaaacgacaggattagcagatgcgatcaaggaaagccggatgacagtgaacatgacaaaggaagcattgtatgatttcctcttgttccatgcatattccaaattcagcggttttctggtgaatatccttggactggcaatcatttttctgggaatcttttcttatacaacaggaaaggtaaatggtgcgggggcagcactttatcttgctgcggcagcactgttcctcggcagtacgccgatccagcttaagatgcgggcaaaaaaacaggttgttataaataaagaatataattcgccggcagagtatacattttcggaagccggtattatgataaggcagaatggagagagcagaacctatgaatgggatcatatagagagagcggtagtgacaccgaagacgattggaatctattatgcaccggaatgtgcaatgattcttccaaaacaggattttggagaccagtttgtaccgatatttaccatcattgccacacagcttggacagagtaaggtgagaatgagataacagagaaaatatggggattgttttgaaaaaggaaatggctgtgtgcttgacaatataaacagatagtgtaaacttatttattaagagatagttgcagggaggcagccatggaagaacgtagaaatgagatattaagagaacttgacagaaaaggaaaagtaaaggtaacagatctgagcagggaattcggatgctcggaagtgacgatcaggaatgatatcaaagcgatggatatagaaggattgttgaagcgcacccatggcggagcggtgaagctggaaacggcagaaactgaaagcggaagatattcgacagaatccctctaccggaatgtcgcacagaaaaagcagattgcggaaatggcttatgattttctggaagaccgggatacgatcatcatcgatgatgcgtcgaccagtttctaccttgccagggagatccggaaccatccggaaaaaaggatcgcggttgtgaccaattccctgatcaccggcaatgagctggcgggagtcggacatgtggaactctttatgatcggaggctatgtgacgggacatcttgcggcaacaatgggggatgtggcaatccagaatatgtcaaagttccatgtggataaagcatttatcggtgttcacagtattaattttaatgtgggtcttacttccattgccacgccacagatggaagtaaaaaaagcgatcatgaaagcggcagagaaggtatatgtacttgcagacagcagcaaattcggaggaggctatctgtctgtaatctgtccgacaaacgaagtatataagattattacagatgacggagtttctaaagagaatgtcagcaaagcaaaagaactgggtgttccacttgtggtcgcgtaatgaaagaggaatgtgatggagagacagcagaaggcttataaaggcgtaattgattactttaaaaagaagattttggatggagaacttcgtccgggggagaaactgccgccggagcgggatatcgcagaacggttgaatgtaagccgtaattcggtgcgggaggcaatccgtatcatggatatgacaggagtaatttcttcgcagcagggatcgggaaattatattacctgcgaatttcagaaaagtcttgcggagacgatgacgatgatgtttgctatggatcagatagactacaggcagatcagtcagatacgtcaggcgttggaatgtctggccttttcgcttgcaatagagaatgcaacagatggtcagatagaagaaatggagaaagcagtaaaggaactggatcggagtcaggatgatgtaaagaatgcagcactggataagaaactgcattatacactcgcacaggcgtcgggcaatatactggtgcaggattttctggaggcatgttccggtgtgatcgatttatttattcacgatatgcgtgcagagattttgcgtacggaagagcggaaaaaaatgttaaatgaatatcataaaaaattgatagaagcactgaaagagaaagacgaaacgaaaggtcaggaagcattaaaatgtcactttatgctgatcaatgagattttaaaagagcgggaaaatagaaaagtatagagagcataaaaggaaagatgctttgcaaaatgcgaaattaagcggttgctttgacggtgggaaaccggcgggcagccgcttttttatgtcatgcgttcgtaagaagcagttgcaggtcatacagatacctgatcacctgagcgtgtaagaaaaaaattggtgaaaaaatctacaaatttgtctataaaaaatcaatgatgtgaaaaaataaacaaatattgacttttaaatccacaagaattatactaaatacacgaaaaaagtggtacgaccaatgtgctggtccatttctactggcgggtataaatggaaaataataaagcacatagaaacttgcttgaggcaagtttttgttatgcaaacaatggtagtaccaattatgaaacgttatgaatggagggcacatcacaatgaaacttttagcgtttgttcttgcgctgttatcgatcttgtggcatatgccggaagcagaatgagataaaaaattatttataaaatattcaaaaaaaggaaggaagaaacagatatgaagattcttgtttgtatcaagcaggtaccagagagtaataaagtggaagtggatccggttaccggagtgttaaaaagagacggagcagcatcaaagatgaatccttatgatctctatgcattggagacagcgttcagaatacgtgagcagacaggcggaacagtacaggtaatctctatgggaccacctcaggcaaaacaggtgatcagggaagcgtttgcgatgggagcggatgcgggaacacttttgtcagaccgcaaattcggaggagcagatgtgctggctacgagttatacgctggcacaggggatcaaagcgagcggtgagttcgatctgatcctctgcggacgtcagacaacggatggagatactgctcaggtaggaccggagatttccgagtggctgaacattccgagtgtagcagatgttgtaaagatcaataaagttgaggaagacggaattaccgtcagcatggatctgccggaggaagttgagattgcaaaggttcagtttccatgtctccttgctgtgaataaagatattttccaaccgagacttccatcttatgtgaaaaagacggagacgaaagagcgtgaaatcaatgtgctgtccctgaaagatatgaaagataccgatgaaatgcattatggtctgaatggatcgccgacacaggtgcagaagatatttccacctgctgtgaatgataaaaaagagatatggaatgaagctggagatgtgcttgcagagaaattgtttgataaaatcgttgaaatgaaattcgtgtaggaggaaaagaaagtggctgaattaatcatacatcaggaaaaagttacagataatcaagaactggttaagatctgtccgtttggggcaatggaagaaaaagatggaaaactttcgatcaatgctgcctgtaagatgtgccgcctttgtgtaaagaaaggtccggaaggcgcagtggaatatgtagaagatacagcaagaccaagcgtgaataaagaagaatggaaaggaattgctgtatatgtggatcatgtagatggaaagatccatccggtaacgatggaactgctgggaaaagcaagagaactggcgcaggtaaccggtcatccggtatatgcggtattcatgggaaatcatatcagtgaaaagggtcatgaactgctgcattatggagctgacaaagtattcatatatgatgaaccggaactggagcggtttaagatcgaaccatatacagccgtttttgaagattttattcagaatgtgaaaccatcgtctattctggtgggtgcaacgaccgttggaagacagctggcaccaagagtggcggcaaggatgaagaccggactgacagcagattgtacgattcttgaaatgaatgaagatacagatctttctcaaattcgtccggcttttggtggaaatattatggcacatatcaagacgccgtatcaccggccgcaaatggctaccgtgagatataagatcatgaatgcacctaagcgatcagtagaagaaacgggtgaaattgtaaactgtacaattgcgaaagaaagactggactcacatgtagatgtactggatattgtattaaaagaaaaagaaaaattcattgaaaatgcagatgtgcttgtagtagcaggtcgtggtgtaaagaaacaggaagatctggagatgcttcaaagacttgcagatcttctggggggacaacttgcatgtaccagaccaatgacagagtccggatggctgccggcgaaatgtcagataggtttaagcgggcgtacagtcagaccgaagcttattattacctgtggggtctccggagcagttcagtttactgcgggtatgaaccattcggaaacgatatttgcaatcaataaagatgaaaaagcaccgatttttaaaaccgcacattattgtctggtgggagatctttatgatgtgatcccgcagctgattcagaagatagaagaaaagaagggagcataatcatggaaaaatataaaaagctggataatgcagatattacatatataaaagagattgtaaaggacgaagaacgggtactggtcggagactttattaatgaagaatacagtcatgatgagttgggaggaacaagcagctatccggatatagtggtaagggcaaaatcaccggaggagatatcagcgatcatgaaatatgcatatgaacatacaattccggtaacaccaagaggtgcgggaaccggactggtaggatcttccgtagcaatcgaacatggaattatgatcgacaccacgcttatgaatcatattctggaactggacgaggaaaatcttacagttacagtggagccgggagttcttttgatggaacttggaagttatgtagaagaacatgatttcttctatccaccggatcctggagagaaatcagcgaccatcggaggaaatatcagcacaaatgcaggtggcatgagagcagtaaaatatggtgtgacaagagattatgtgatgggattggaagtggttctccctaacggagagatcacgcagttcggagggaaagttgttaagaacagttccggttatgatctgaaaaatctgatcatcggttcggaaggaacgcttggatttattacgaaagcaattttaaaattacttccgctgccgaaaaaggtgatcagtcttttgatacctttcccgacactggagcaggcaatcgatacagtaccggtaatcattaaatccaagaccataccgacagcagtcgaattcatgcagagagaagtcattgaagatgcagaagaatatctgggaaaagcatttccggataagcagtcagatgcatatctgctgttgaaatttgatggaaattctgtagaagagattgaagaggcgtatgcaaaagtagcgaaattatgtctggagcagggagcactggatgtgttgatctcagatacagaggaaagagaagaatctatctggaaggcaagaggtgcatttctggaagcaatcaaaggatctacgacttatatggacgaagtagatatggttgttccgagaaactgtgtcaatgatatggttgtatatcttcataatcttcagaaagaaaaggatatccgtattaaaagttttggtcatgcgggagatggaaatcttcatgcgtatattttgaaagatgatttaagcgatgaagaatgggaaaaacgtatgaaagataccatggagaaaatatatcagaaagcacatgagttaagaggacaggtatccggtgaacatggaattggatttgcaaagaagccatatctcaggaaatcacttccgatagagaatctggaactgatgaatggaattaagaaagtgtttgatccgaagaatattttgaatccacataaagttgcacagttgtgatcgacgattcttttactttgtttatatacacttttttatcaggtatgtcatagtttatatatgaaagaataatcaaaaaggagacatctatggcatattcaatcatgctggatgctggccatggcggtgcaagagatccgggagccgtgtatgaaggccggcaggaaaaagatgacaacctgaaactagtgcttgcgatcggagagattttatcagacagaggaattgatgtagagtataccagaacaaccgatgtctacgagacaccatatgaaaaagcaatgaaagcgaatcaggcaggagtagatctctttatttcaattcaccgaaattcgtttcctgccgataatgaggtggaaggagttgaaagtctgatctatgatctgtcgggactcaaatacaagatggcacaggatatcaatgagcagctcgaaggtgtaggcttcgtgaatctgggcgtgaaagcaagaccggatctggtggttctgaaacgtacaaaaatgccggcgatactggtagaagccggattcctgaattcggacacagataaccgtctgtttgataataactttgaagatatcgcacaggcaattgcagatgggattctggacacattggaaagtaatgggctgatcaaagaagaaaaagttccggtgtaccgggtgcaggtgggcttgttccggaatcaacgctatgcgaaccggctgcagaatgaacttctggagcaggagtatccggtgtacattgaccggtccggtccgtattacagagtctatgtaggagaatttgataatttaaatgatgcggtacagatggagcgccgtctgaagcgggcaggatatcagactttgatcgtgcaggggaagatttaacatagatttttcattgccggggtattttatttaacatagcctttctatacttgaatcagaaaaagagataagagtaaagattcaaaaaacgggaggcgtttagagatgagatatctgtggaatatgttgaataaagaatttacaatagaaggggctgtcagtgcctttctggtaatcaatatgattggatggatggcagcaacgatgggagcgggaatgctgatctgcaaatttttgggattttctatcacgggtaatttggaaaatctcatgtgtgcaggaatctacggaggattgatcgtaggattggtcgggggcagcttatatctgtacgggttatacaaacaccactccatggaatagaagataaattaaaaagggacttgttttacaaaacagtgtaaaacaagtctttttttagttctggcatatacaggagaatatgatggaggatggtatagcaattgacacgaggatcatttcataatattatggaattgctttaggagtgttaagacaacaataaaatgtgtatgtatgaataaaagtaataaaaagatggaggaataaaatggcagatagattacagtttaaagaaaagcttgcgggagtacttgcgcttgcagaagatcagaatggaaagattaccgtagatgaagtggaaaagtattttgaagaggacggactttcgcaggaacagatgaatctggtctgtgattacctgttatcgatgaagatggcggtgatcggttataaacaggccggaggtacggtaaaagaagcggaaaatgaagaacaacagccattaagcccggacgaacagaaatacgtagaagaatatctgcgaagtcttggcgatatgaatgaagagacaccggaagaggtgcgcatggcatattatcttccgaaagtggtagaagaagcggtgagactgcatcatccggaagtgtttatcggtgatatgatccaggaaggaaacattgtactgatgctggcattaaaagagatccagaaggaaaaagatgaagaagagattctggaacagatacgtgccggaatgctggcagcgttggagtcgcagacagaagtaaagagaagagatcataagatggttgagaaagttacagaacttgatgagacgatcaagagtatgaaagaagaatacggacgtaaagtcagcgtggatgaagttgcagacagacttggaatcagcgaggatgagatcgaagatattctgaaacttgccggagaagaagtgaaagatgaagaataaaaaggagacggggattaatcctcgtctccttcttcatcttccggttttggttccggcagatataaatgtacactttcaattctgtttttgtctaatttttctacaaccagatggatgtcgtcttcggtggtgacgccgtcgccaatctcaggaagccggtccagatgctcgataatgaatccaccgacggaatcatactcttctgaggtcagattaagatcgagcctgtcatttaagtcgtccagattcgtggaaccttctacgatataatcgcgttcaccaacctgtttgataaagtcttcttcgttttcgtcatattcatcatgaatttctccgacgatttcttccaggatatcctctaatgtgatcagtccggaagtctcaccatattcatccagaacgatggcaatgttaaaagaagcctggcgcatctccacaagtaattcggaaatattcttatattcgtaagtgaaataggcctcgcgcataaagtcgcggatatgaaactctttttctttgtcatataagagaagatctttcatattgatcgtaccgacaacattgtccgttgtatcttcaaaaatcggaagacgtgtgaatttgtcctcgcggaaaatgtcgatcaattcttcgtaggtggcatttacatcggcgaacgtaacatgaactcttggtaccataacatctttcgctttcgcatcgccaagatcaaatacgttatagatcatctctttttcgtcagattcgatgacaccgctttcgtggctgacatctacgatcgtacggagttcggattctgtcatctgtttatttccggcattcggatcgatgtgaagaatgcggagaataatatccgacagcgtattgatgataaatacaaatggtgtcatgactttgatgtacagatttatggccggagcataacgaagagacatcttttccgcatgcagtgtagccatggtctttggcgtgatctctccgaagagaatgatcagtacagacagaactgcacttgccactgccaccatagatccgccaagattgtaagccagggtggtagtaagggaagcggcggaaagattcaccacattattaccgatcaggatcgcactcagcatcttgctggtatcatcggtaatacacataacggtttttgcccgcttgctgccttcgtcggcaagaccgcggatacgcattcggtttaccgttgttaaagctgtctccgcagatgaaaaaaatcctgaaagaatcaataaaatcaatagaataatgagttgtatcgcgacactcgtgtccaattgtataattcactcctttaaaaaataaatacttggcattaatataccgcatttgaggcaaatttgcaagtgtacgttgaatttaccgggcgtttagtgtaagatgtagttactgtctgagggcaggaattttatgaactgaaaattctgtatgatatagtagcggttggaagaagaacaacctgacaaaaaaggtggagacaagaatgaatcaggaaataggaaagaaattattgagtattttaaaagtggaacaggtaaaaaaggatgaaccgatgaagattcacacaacattccgtgtgggaggtccggcaagctattttgtgacaccagagacggaagaagaagttgcaaaagtgatcgaggtgtgcacacaggaaaatgttccttattatatagttggaaatggaagtaatcttctggtatccgatcagggatatgaaggagtgatcatccagatatataaacagatgaatcgggtggaaattacagaaaatgagattcacgcacaggcgggtgcattgctttccatgattgctaaccgtgcaatggaagcagaacttacaggttttgaatttgcggcaggaattccaggaacactcggaggagcgtgtgtgatgaatgccggagcatatggcggggagatgaaggatgtactggaaacggtaaccgttcttacccgtgacggggatgtaaaaacgttgacaaaagatgaactggaactcggataccgtaccagtgtgatagcaaaaaaagactatattgtattaagtgcggtgatcagacttgagaatggaaaaaaagaagagatcaaagccgttatggatgacctgaaggaaaaaagaattacaaagcagccgttggaatatccgagtgcaggaagtacattcaaacgcccggagggatatttcgcgggaaagctgatacaggatgcaggacttcgtggatttcaggtcggaggagcgcaggtgtctgaaaaacattgtggatttgtagtgaataaggatcaggcaacagcagcagatgtgatgaacctgatgaaccaggtgtctgataaggtgtatgaaatgtcaggagtacggcttgagccggaagtaaagagactgggagtgttctaagatgagatgtgtgatcgttaccggaatgtccggggctggaaaaagtacagcacttaagatgctggaagatatgggatatttttgtgtagataatctgccggtaccgctgattccgaagatggcagaactgttaagcgtgccggggacggagatcaacaaggctgctcttggagtagatatccggagtggacagaatttttatgaactgaagaagatattaaaagaactggaccggtcaggaacaagatttgagatcctgtatctggaatccagtgatgatgtactgatcaaaagatataaagagacaagacgatttcatcccttatccggaaaagacgggagagtggaagaaggaattaaagaagaaagaaaacgactggaatttttaagagagcgtgcagattatctgattgacagcagtcatatgctgacaagagaactgcgtgcagaactgtcaaagatttttgtggaaaataaagaatataagaatctgtatatatccgtattgtcatttggattcaaatacggaataccggcagatgcagaccttgtatttgatgtacgttttcttcctaatccgtattatattgatgaactgcgtccgaaaagcgggaatgacaaagaagtccgggagtatgtcatggataatgacaaggcaagaatgttccttgcaaaactgacggatatggtggaattcctgattccgaattatgtacaggaaggtaagacacagctggtgatcgggatcggatgtacaggcggaaagcaccggtcggtaacgttggcgaatgaattatatgaagcattgagtaagaatgataattatggtatccgtatcgaacaccgtgatattggaaaggatgctgtcaccaaagcgaggtagaaagtcagatgtcattctcgggaaaagtaaaagaagaattattggaacattatgccagagcaagacactgtgatattgcggaattgtctgcaattgttcatatgtgcggagcatttggagtgggatacaaaggagtgtgctgtcttaaagtacatacggaaaatctcggggtcgcaagaaaatgctttacattgttggaaaaaacgtttaatataaagaatgatatcgtagtccgcagaaatgccgggaaagataattacagttattacatttatgcaaaaggtgaagaactaatggcgatccgtgacacgatcgtacaggcagtctgttgtaagagagcatatatcaggggagcatttatagcatcggggtctatgagtgatccaagcaagtcttatcattttgaaattgtctgtaacgatatgcgtcaggcagagcatctgcgggacatgatgaacagtttcgatgtagatgcgaagattgtacagcgtaaaagaacatatgtagtttatcttaaggaaggctcacagattgtagatatactgaatgtgatggaagcccacgtggctttgatggaactggagaatgtccgtatcatgaaagagatgcgtaattctgtgaaccggaaagtaaactgtgagacagctaatattaataaaaccgtatctgctgcagtaaggcagatggaggatattacatatatcagagatcagatcggttttgagaagctgccggagggattaagagacgttgcccttacgcgtctggcatacccggaagcggctttgaaagagcttggtcagctaatggcgaatcctctgggaaaatcaggggtgaatcacaggctcaggaagttaagtgaaatcgcacaacagttaagggaacagcaaggaggagcaagtcgttatgattagaaagcctgttaccattcagaataatatggacatggaagaccgtccggtggctcatctcgtacaggaagcaagccagtatgcgagccaggtatatattgtgatgggaagtaaaaagattaacgcaaagagtattatgggaatgatgagtctgaaacttcagaaaggcgaagatgttacaattgtagcagacggtcaggatgaagatgcagccgtaagtggcgtggcaacatttttaggtgcataacaataatacagggaatatccggatgatgtgagataaaggggccgttgtgatgagagttacaatagcctcttcattattaaattaagaattatatgaaagataagggaggatgcatattttatgaagcgtttgctttttatctacaatccacatgcgggaaaagaacttttaaaaccgaagcttgcagatgtgattgatatctttgtgaaagccggctatgaggttgtggcatatccgacgcaggcgtatcgtgatgcgtataagaaaattaagaaatatgattccagtgaatatgatctgatcgtgtgcagcggaggagacggaacgcttgacgaggtcgtaaccggtatgatgaaacgcgacagggataagcgggagccgatcggatatattccgaccggtacaacaaatgacttcgcaagcagccttcatattccgagaggattactggaggcggcagacaatgcagtaaatggggaagtatttgcctgtgatgccggaagatttaatgatgatatttttgtctatattgcggcattcggactgtttacagatgtatcttaccagacaaaacagtctatgaagaatgttctgggacatctggcatatgtgctggaaggtgcgaaacgtctgttcaatattccttcatataaggtgaaggtgacacatgatgatgaagtgatcgaagatgaattcgtatatggaatggttacaaattccagatccgtcggaggattccgtaatctgatcggaaaacaggtcggattcgatgacggggtttttgaagtgacattgatcaagacacctaagaatccgatcgaattgcaggaaatcatcgctgcattgatgatcgagcagatggattccaagtatatgtatacgtttaagagcggaaggattatgttcgaatctatagaggagataccatggacgctggatggggaattcggcggcgaacacgatgaagttgtggtcgagaacctgaataaagagcttcagatcatggttccgggaacgcatgaagaagattaaaaatccttaaattgtagaaaaaaccgagaaatttaaaaaaattaaaaaaagtacttgcctttttgcaaaatccttgctatactaggcaagtaccaaacgaatggctccgtggtcaagcggtcaagacgctagcctctcacgctggaatcaggggttcgattcccctcggagtcacttagatctgtagattcttctacagatctttttttatcaaagtattcaaaacaagtctgtgaaaagtccattattaatctcatagatataatctataagaacgcttttatataaagaaaaacaatttcaataagcggataataaatggtactatgaaagaagtcggaaaggaataggaattatgaaagatcttttgatagtatctcattgcattttgaatcatgcggcaaaggtggaacaggatgaagcggaactggccggagaatataagatccgggaagagttgctgcagcttgttttaaaaaaagaagtacagttatttcaaatgccctgtccggagtttatcatgtatgggtctcagagatgggggcatgtaaagaatcaatttcaacatccattttacattgaacaatgccggaagattcttcgaccggttttatttcagttgcaagaatatgcgcagcatgtggaaaaattccgcattttggggattgtttcggtagaaggcagtccaaactgtggatatcatcttacctgcgaaggagaatggaagggtgagattggaacggatgaaaaaagaatacaggacattcagaaatctctgaaaatgacagaaaaaccgggtgtatatatggagatactggaagaagaacttcgtaaaaaaaatatgaagatttctattatgacgatgcaggaagcagtacagctgctgaaaaactaatggttggagagaagagaggagaacaaaatgaaaaacagaaaagtctatgtaacaactttttgtggtgttgcagtagcaatgaacattgtactgggaattatcacatcggcactgggtatcccgttatatctggatacactcggaaccgtgctttctgcggcgattctcggtccgctgccgggtatcatcgtaggagcattgagcaatattattacaggattgatctatagtgtgtcggatatcccattctgtctggtaaatatggcggtcggtctgatcgtaggtcttgtggcaaaaaaatggaaattcggaatcgttcctgcagtaattacaggtattgcacttagctttatctgcccggcgattggaacaccaatcggaatctatgtatatggcggactgaatggatcagtttcggatatgctggtgatgtcactggtgcagggtggaaaaacaatttttcaggcttccttcctcagaaatgttgcgtcaaacttaatcgataagattggaacatgcattatcggatgtctgctcattaaagcaatgccgatgagatttctggataattttaagaaagaggcataaatctcatatgataaagattgaaaatctggtacataaatatacaatatggaaagatgaaaatacaaaaagtgagaagacagtgttagacggaatatcattagatattccgtctggtcagtttgtggcaattttaggaccgaatggttccggaaagtctacattagccagacatttaaacgtattgctgcttccggatgaaggaaaagtatggattgacggaaaggatacacaagcaaaagaaaggctttatgaaatcagaagccgggtaggtatggtgtttcagaacccggacaatcagattatcggcaccagtgtagaagaagatgttgcatttggcccggaaaataaaaatgtagagccggaaaaaataagaaaaattgtagaagatgttttgcggaaagtaaggttgtgggagaagagaaaaactccgccttccaaattatcaggcgggcagaaacagagactggcaacagcggatgcgctggcaggaatcccggaatgtctggtgttggatgaaccgacagctatgctggatccctcttcaagaaaagaagtaataaatattgtgaaagaattgaatcaaaaagagggaatgacgattatcctgatcacacatcatacggatgaagttgtagatgcggatcgtattatattgatgaaggatggaaaaataatcggagatgataccccgaagaaaatatttgcagaccatagcctgttaaaaagtgcgaaaatggatattccgccggttgtagaattgagtatgcggctgaaaaagcaaaacatcggattggatgaaccggttttacacgaacaggaaatgatcagaaaaattacagaattatatagaagtaaatgcggaggctggaaagatgctgcaaggtaaacatatcacattttcttatccggagccggcaaaagggaagacagatgtcctggcagatgtttcgtttgaaatcagagagcacgattttataggactgatcggtgcatcaggatcaggaaagacaacattgatcaagcatctgaacggtctgctgaaggcagaatcgggagagatcctttttaaaggggaaaatatatacagtaaaaaatatccggtttcagaattgagaaaaaaagtcggacttgtatttcaatatcccgaacaacagttgtttggcaggacgattttgaacgatgtgatgtatggtccgctgaatctgggaatgagtgaagaagaggccggaaagtcagcaaaggaaagcctggaactggtcgggatttcggaagagtattatcagatgagtccgatggagctttcaggaggacagaaaagatgtgttgctattgcaggtgtattagcgatgcagccggaaatactggtgttagacgaaccggcagctggtcttgatcctgagacgaaacatgaaatatttgagttgttatgcaggataagagagaaacgaaataacgcaattgtactggtatcacatcatatggaagatgtagcgcaatttgctaaccgtgtatgggtgatgtataaaggaaagattgcgatggatggtactccggaagaagtgtattccagagtggaagaactgaaaaaaatgaacattggaattccgcagatcacacatttgacatatttactgataaaagagggtatacctttgccacgaccggcaatcagtgtggaagaagcagaaaagatgctggcagagattttgaaagaggagaaaccattatgattcgggatattacgattggaagatattatgattcggaatctgtgattcaccggatggatccgaggacaaaattgatgggagttctggtatacattatttcgctgttccttgtgaaaaatgtctgctggtatatcggatgtctgatagtaatgcttgtcctttataaggctgcgggagttccatttgggtatttgttgaaaggactgaggggaattttgcttttgctctgctttaccttcctgttccgcatgttgtacacgccgggagatccggtcgtacaggtctggatatttacgataacaaagcagggaatattaaaagcagtgcagatgacagcaaggattgccctgatgatctctggggcatctcttctttcttatacttcaactccgaaagaacttgcggatggtttggaaaaagcattttccggattggaaaaaacagggattcctgtgcatgaaatggcagtcattgtgatgatagcgttcagattcattcccattatgttagaagaattaaatgttttgatggatgcacaggcggccagaggtgcaaaatttgaagatggaaatatattggaaaaatgtaagggcgtcatgacgttattgcttcctttgtttctgctgacggtacggaggtcatcggatttggcaatggcaatggaagccaggggatatacaggaagcggaaaaacttcaagaatgtatccattggtatataaaaaagaagaccgggcgggataccttgcgattttgatatatattaccgttttcataattgcaaggataagttccttgtctttttagaagttatgatatataatgcaagtgaaacaaatttgtcataaagaagcagagatgcttatggcagtaagaattggaggaataacatatgttagtatcagcaaaagaaatgctcgataaggcagtagcaggtcactacgcagtaggacagtttaacatcaataacttagagtggacaaaatctattcttcttacagcagaagagttaaagtcaccagttatcttaggtgtatctgagggtgccggaaaatacatgaccggattcaagactgtagcagctatggttaaagctatgatggaagaacttaatatcacagttccggttgcattacaccttgaccacggaacatacgaaggatgtaaaaaatgtatcgatgcaggattctcttcaatcatgttcgatggatctaaatatccaatcgaagagaatgtggcaaagacaaaagaactgattgctatctgcagagaaaaaggaatgtctatcgaagctgaagtaggatctatcggtggagaagaagacggagttatcggtaaaggtgaatgtgctgatcctaatgaatgtaagatgatcgctgaccttggtgttgatatgctcgcagcaggtatcggtaatatccacggaaaatatcctgcaaactgggaaggattaagctttgagactctggatgctatccagaaactgactggcgatatgccattagttcttcacggaggtacaggaattccggaagatatgatcaagaaagcaatcagtcttggtgttgcaaagattaacgtaaacacagagtgccagctgtcatttgccgatgctacacgtaaatatattgaagcaggaaaagatctggaaggaaaaggatacgatcctcgtaaactcctgaaaccaggtgctgaagctatccaggcaacagttaaagagaagatggaattatttggttcagtaggaaaagctgaataattaaaaattttcacttgccttttttgactggttgagttatactaactggcataggaagaacaaaggcgttccaacaaaagttggagtgccttttttcatactatggtatgcacagaaagtgtataagaagattatatgcataccatagtgtgaaacttatactataaataacaatgagaaaggaaacgaagagacatgagtgaagcaattaatgtagccaagatatttggcgaagacgtgttcaatgatactgtaatgcaggaacgtcttccgaaaaaagtctataaggatctgaagaaaacaattgaagaaggtaaggaattagaccttgctacagcagatgtaattgcacatgagatgaaagaatgggcaattgagaaaggggctacacactattctcattggttccaacctctgacaggtgtaaccgctgaaaaacatgattcatttatttcagcacctcttccgaatggaaaagtactgatgagtttttcgggaaaagaactgatcaaaggagaaccggatgcatcatcattcccatcaggcggacttcgtgcaacgtttgaagcaagaggatatacagcatgggattgtacatcaccggcatttgtaagacatgatgcagcaggagcaacactttgcatccctacagcattctgttcatacaaaggagaggcacttgaccagaagactccacttcttcgttctatgcaggcaatcagtgagcagtcactgagactgttaagattgttcggaaatacaacatctaagaaagtaacaccttccgtaggaccggagcaggaatatttccttgtagatgctgaaaaattcttacagagaaaagacctgatctatacaggacgtacactgttcggagcaatgcctccaaaaggtcaggaattagacgatcattatttcggaaccatccgtcagagaatcgcaggattcatgaaagatgtcaatgaagaactctggaaagtcggtgttacatctaagacacagcataacgaagttgcacctgcacagcatgaacttgcaccaatctatgcagagtgtaatgtagcgctggatcacaaccatattatcatgcagacactgaagagagttgcatgccagcatggtatgaagtgtttactccatgagaaaccgttcgcaggagttaatggttccggtaaacatgataactggtctcttacaacagacgacggaaagaacctgttagagccaggcaaaacaccacatgaaaatattcagttcttactggtacttacctgtatcctgaaagcagttgacagacacgcagatcttcttcgtgaatctgcagcagatcctggtaatgatcacagactcggagctaacgaggcaccaccggcaattatctctgtattcctcggagaacagttagaagatgtactggaacagctgatcagcacaggcgaagctacacatagtctgaaaggcggaaagcttcagacaggagttgatacacttccggatcttgcaaaagatgcaacagaccgtaatagaacatcaccatttgcattcacaggcaacaaatttgaattccgtatggtaggttcccgtgattctatttcaggaccaaacgtagtactgaatacaatcgttgcagaggcattctctgaggcttgtgatgttctggaaaaagcagacaactttgatgaagcagtacatgatctgatcaagcagtatgcaacagagcatcagagagttgtatttaacggcaacggatattcagatgcatgggtagaggaagcagaaaaacgaggacttccgaatatcagatccatggtagaagcgattcctgccctgactacagagaaagctgtaagtatgtttgaaaaattcaaagtatttacaaaggcagaactggaatcacgtgcagagatcaaattcgaaagctatgccaaagcaatcaatatcgaagcacgtacgatgatcgatatggcaagcaaacagattattcctgcaattattaaatataccaaagatcttgcagacacagtggttgcagtgaaggaagcaggtgcagatgcatctgttcaggctgaacttctgacagaagtttccggactgttagcagagactaaaaaagcgctggaagcattgaaagttgtcgcagatcaggcagcagctatggaagagggagaagatcaggcaagattctaccacttcgatgttgtacctgcaatggaagcactccgtactccggttgacacactggagatgatcgttgacaaagaagcatggccaatgccttcttatggagatcttatctttgaagtataatcagagatggaagattatctgttagacgaagaaaatattttagaaatacattagaaaaatttaagaaccctggacttggaatggacacatgattgtgatattctaagttcagggtttttgaataccaaagtatgttaaaatcctgcaaggagggcaattatgacgaaaagagaatttttagataaattaaaaaaagcacttgtcaatgacctttcgggaagtgtaatacaggagaatgtgaattattacaacgattatattacggaagaagtgcgaaaaggacgcagagagtctgatgtgatcgaagaactgggggatccatgggcaattgcgaagaatattattacttcggaagaaatgaaaggaaacacacaggaatcatatgacagctatgagccgggaagacgaagagagaattcttatgaacaggactatggcagcgaatccggatacaggggcgcgcatgtctttggacttgatacctggtggaagaaactggttctgatccttggaattataggaattgttgtattggttgtggcggtggtcggaggaattatcagtctgcttgcaccgatatttgtaccgcttctgattgtgtgtctgattattaagctgattaatggcaggagaaggtgaatagataataagtaaaagaccgatgggggagccatcggtcttttgaggggagtataaataattaataaggggttgtagaaagtgtcctttctacaccaccagtataatatagtaaaaaataaaaatcaagaaaaatattaaaaaaatcttaatatgtgccgggatgcataattggaaaatgtcaggacatactaatcacgtaacaaaaagtgattaggaggaattcaaaatggctaaaaattacaattcatcagaaaactgtcataacgaggcggacaagcacacatcgaacagaaatgcatccagaaacacatcgaacaagaacgcatatggaaagaatgcatcggacagaaatgtaacggacaagaatgcaaacaacaaaaatgcatatgacaaagatgcgaaagacaagaattcttacaattatggaaatgagaacagcaactactagtaacaaagagtttccgggcaggacgtacgaaagtgcgtcctgcttttttgccgccatgtatgtgtaacgaacttccaaaagcaggagaccgggtggagaaccgggaggttctatatgtgaaatgggttgacaaagagaggcggttatcagtaagataagtaagtagaaaataatagatggaatgcagttgtactgcatgaatagagcagataatggagaattgaatgaaaaaaatggaattgatcgctccctgtcattttgggctggaagcggtattaaaacgagagatactggatctgggatatgatatctcggaagtagaagacggaagggtcggtttctggggagacgcagaggcaatctgccgtgcgaatatatttctcagaacagcggagagagttcttctgaaagtaggcagttttaaagcaacaagctatgaagaattatttgagaataccagagcgttggactgggaaaattatatcccggaaaatggaaaattctgggttgcaaaagcggcatctgtaaagagtaaattattcagtccgtcggatatccagtcagtgatgaaaaaggcaatggtaagaagaatgcagcaaaagtaccaggtagaatggttttcggaagacggagcagcatatccggtccgtgtcttcctgaaaaaggatgttgtgacggttggaatcgatacatccggtgtatctctgcataaaagaggatatcgtgaagtatcgggaaaagcaccgatcacagagacactggcagcagcactgatcatgctgactccatggcacaaggacagaattctggtggatccgttctgcggaagtggtacatttccgatagaagcagcaatgatcgcagcgaatatcgcaccggggatgaatcgttcctttacggcagaagaatggacgaacttgatcccgaagaagctttggtatgagacggtaaatgaagcgaatgaactgattaacgatgatatcgaagttgatatccagggatacgatgtagacggatctgtgatcaagatcgcgagacgtaatgcgagagaggcgggtgtcgatcatctgatccatttccaggaaagagatgtgaaagatttaagtcatccaaagaaatatggattcatcattacgaatccgccgtatggagaaaggctggaagataagaaggatctgccggcattatataaggcattcggagagagctttaagaatctggattcctggtctgcgtatatgattacatcttatgaagatgcggaacgctatttcggacggaaagccgatcgtaaccgtaagatttataacggaatgttaaagacatatttttaccagttcttaggaccaaagccgccgaaggccggacgtccgtcggacagataggagaagaaataagatggataaaattatatttgcaacgggcaatgaacataagatgatagagattcgtgcgatcttaagtgatctgggagtggagattctttctcagaaagaagcaggaatcaaagcagacgtgatagaggatggaatgacatttgaagaaaatgcgatgatcaaagcaacagagattgcaaagatcgcacatgagatgccggagtatgcacatgcagtcgttctggcagatgattccggcctggagattgattatctgaataaagaaccgggaatctattctgcgagatatatgggagaagatacttcgtatgatattaagaatcaggctcttctggaccgcctggacggtgtgccggatgaaaagcgtacagcgagattcgtctgtgcgatcgcagcagctatgccggatggttcctgtgaagtagtcagaggaacgatggaaggaatcattggacataagatcgctggagagaatggattcggctatgatccaatcttctttcttccggaatacggatgtaccagtgcggaactttcgccggaaaagaagaacgaactgagccacagaggggaaggattgaagaaaatccgtaaaatcctggaacagagatagaattcaaaagaaacagacaaaagaagcagacagaagaatagttgggataagagaatatgaagatactgatcataagtgatacgcatggggcacacagaaattttgaccgtgtgatagaaaaagaacagccgctggatatgttgatacatctcggcgacgtagaaggcgatgaggattatattccggcagttgcggactgcccggtacatatggtgcgtggaaataatgactttttttccgatcttccgggagaggaagagttcatgatcgggggctatcatatatttattacacacggacatggatattatgtatctatgggagaagaacgactgaaacaggaggcaagagggcgtggtgccgacattgcaatgtatgggcatacacaccggccgttctatgaaaaagaaaaagatctgatcacgttgaacccgggaagcctctgttatccaagacaacaggggagaaagccgagttatatgctcatgcagattgacgacaacggaaaaatggagattacacaggaatatctgaatccgtaaagggagagtccggaaaatccttgtatttggtgtgctacccgtcaagtagacaaattaaataa

SEQ ID NO: 2836 - DNA, 5052 bp, Unknown
  gut microbiota DNA sequence
attttaagcaccattaatcacatctctaatcattcacataatcataataatccgcttcgctggcaaataagatatattcaccatctaccattcccatataaccgtcacctgtgttaaaacctttcattgccagttcctccatttctttgaaaataaatgatctgttttcccttttatgtctatagtttataacatcaggtggggtataaaattacctcccgtcctctgcgcattaaatcgtatgccgcaagacgaaaataagggcaaaaaattctttaaccgaattttttgcccttatttttctatctctgtatattgtctgacttattttaaatactgcatccatgcccgccacatgtatgcccttcctcatggctgtgctcatggtgagaacactttacatccgttaagtgccacataggaaatcagaaaatttgcaaaccagccagccggcacagcaagccagacaaatgcaatgccaaaccgaggcgcaaaaatcaaagcaactgccaaacggatcgcaaggtttaccatattggcgatgagaaacggacgcatgattccaagtccacgaagtactccatcggttgccatcttgatacccatgaaaatgaaaaagtaaccgagccatctcatataatcccctgacacctgatatgccaaggcagctccatctttgcccagaaataacgaagaaatctgcgtatgcagtgtttcaatgactacaaaagcaaggactgcaaaacacagatctaacaccagtgccgcgtgatatccctttttgatacgatccattttctttgcgccaagattctgggaaacatacggtgagactgcatttccgatagatacaaatatcaaggaaaaaacattctctactctcatcgttgccgcataacctgcaagtgcctgtgtaccgaatggatttacaactgcctgtacgatcatcataccgattgacactgtagactgctgcagaaccgaaggtacagcaatccgcagcatggaatacaattcatgcctgtcaaaccagtcaaaatgactttgataccggcgcatcctgctaaagaagatcaaaagtgaaaacactgccgaaatcccctgtgcgatgagcgttgcaagtgctgcaccaaacactcccaaaccaagtcccgccaccatccagaaatccataaaaatgttcaaaacagaagaaaatatcaaaagtcccagtggaatcttggattcaccgatcgaagtgaacattgttgaaaggatgttatacataaacagaaatggaaatcccacaaaataaacacggagatacagtactgcttcctccagtatatcagcaggtgtctgtaataaactcatcatcgaatgggaaaaacaaaatccaaagacacccagaaatatgcttagaatcaggaaactgatcaatgatgttgacacaattgttttcattttactataatctctggctccaaaataacggctcacaagtacacctgcacctacaccggcacccaatgctatacaaatgaagacattcgtaagtgcagcacaggcaccgactgccgcaagtgcagatgagccaacaaactgaccaacgataatagaatcagccatattatatacttgttgaaaaaagctgcctaaaatcataggcattgcaaaaacagtcagcgctttaagaggcgcatctgtaattaaatattcatcttttgacattcgctaactccttcataaattcgcttattttctttccgtagacattcattttatatcttttgaatgcaaaatgcaaattttccaaattccttcacaagtcctatatgtctgaaaatgcaggcaacaaaaaacaggcttttctgacaaaaaattacttgccggcagataaatttctaccggcaagtaatttttattttttcaattaaaagcctgtcaatctgaaaaacattaattcatttgctgacccgtcgtctcgtttctgtgtcagcataattaacagagatccgtcatctaaaagctgcatgtcttccagccatggataactgacaccgaatatgtcatctgtagaaattgcacctatgtgtgttccatcttttgcccaaaattgtatttcccgcatatttccatctacagccacaaacccattttctgtttctgccatacctgtaatggaaccgagcttgtccttagaactgatgtcttctccgcctagtttcaaaagctgattgccttcataatcatagacaataatttttgtaccttcatcttccgcagccatggagccggcaaccatgatatgactattcgtgatctgtacgtcatctaacatggaaaatggtcccttgcgttcttcatcattatttaatccggtcagtatccacggctcagccgtcaggttaccaccttgatttgcaatcttctgagtatcactgttcacccagaaactgattccccattctccggatggatgcatattcaaatatccatctacggttgtctgcattgccttttttccatcttttacgccaattacatctccgattcccggcgaaagatataacattccactgttgtctccggacaaatattcacaatcatcgtctagttccatcgaagaaacgaatttgagtccgctttctgaatattcataagtatccagtttgttctccagcaaatggaatacctggttgccctgttttacaaactgatgttccatgatctgcatgacaccctgtgcttctttaaatggaatatattccggaacgattgtataagaacctaccatctgctttgccaatacaggttcaagaggctctccctcccatggccatggtgcgtctttatttccttcatcctttaatttcagcacaattccttccagcagttctttgtcagaatcatctatttcctgtccctttactctgatatcataggatgtaccagacttttcatggcgatacatatacgttttctctgcggaattaccttccggcattgctgtatattctgcatttcctattgttacagtgtccattttcccttttgcatatgtctctaaatccacgccgaagtcaactaaactatttctatatttataggaattctcctttgttgcttctatataaatgacattctcggattcatctactgtatctccatcaaaaaatctaacgcgagcgtagtctttatctttcttcatattttctttatcatagttccatgctttcggataatacactgtaaataaatttaatttaagattttccctgtccttaaattttgtttctgcctgctctgtttttttcttctccggagcctttttttgtccacatgccgctatcatcatcatgcatgtcatgatacacagcacacaccacaatttctttttcatggtatcttccctcccttcacgctttccacatctgtttcagctattcaccgtcacttttcacacaatgaaatgtgtagtagtcttcgtcattactgtaatctactttcaacgtgccatcgtcatttatcgccactgagagagatgggttatctgattcaatcgcacaataccccagtgcaaccgaccatgggaatgtccctatctcttctcctttataaataactgttacattacggtcatttttgaaatcaagacgcagtgcatcattgatgttgtctactccttccatagaagtctgcggtccgtctcctaaaagttcttctacgctttcagaagcccacttacctatgactgcactttcctcctctgtcagatagagcgaaggatccattgcatcggttccatcctttgcaaaaatcacctttactcccatctccagcatgtcgtcaaaagaaatgatatcttttccgatggttcccaccattttttctccttcgatgctcaaggtaaactgatcatcttcgacagaccatttaccatttccggtagtgtctccgactgaaaaggatacttttcctccatttttcacttcaaattcaaaatcaccaccgaaagtttcatctacactgacggatattcccatcatttgagcggagaccgctacccattttccttcatatggattcttctctcctgcttttccggagcctccacacccggtcagtgctgccatactgatgataaacactaatcctaataacaaattcaacttttttctcataagcctcttccctttcaactacttcttatctgcaaaaaacggagtcagcaattctgccaccttgctgattggcattgtctgtaagatcacctttcccggtcctttcacaacagtattaaaaatgccctctcctccgatcagcatattttttactccttttacggttacaatatccatcgtacaggtttcttccattgccgctaagtacccggtactgatcaccatttcctgtccggcactcagatcatattccactgcatgtccgtcaatttctacaaatgcagttccatttccgctcaatctctgcataatgaaaccttctccgccaaatatgccttttcctaattttttctggaaatgcatggacagttccacgccttcttctgaagcaaggaatgcacttttctgcacgatcatggagtgaccgctgctaatctccagcgctttgattgctcccggaaaacttgatgcaaatgcaatcattccgtctgtaccttctgcggtatatctgttttgaaacgcagaatcaccagacatcattctgccgaacattttcttcattccgccaccggaaaccgtctccattttcatgttcgggctcatccagctcatacttccgctttctgtgatcatagattctcctgctgctaattcacatacgacaactggtaaatttcctcctaaaatctcatattttttcatagtaaagttctcctttcttttctttttcgtttttctttttcatcctacaacagtacctttttcattaagttttgcggcacattgcacacacatatccagatcatcacagatcaaaaagcaatggtcacatacaagacgcttacatatcggacaactgctacatttatctctaaccgctccggtgatg

SEQ ID NO: 2837 - DNA, 13531 bp, Unknown
  gut microbiota DNA sequence
ttagtttacacagaattatttacacactcactgttgttggcagttcctctttttattcgtctttattgtacctttatctgtcccagtatctccccgatcggtgccgcaatcgtcaactccgcaccaacttctctggctgttgcacccttattgatcaccaccagatgttttcctctgaaataatcaataaatcctgctgccggataaacgatcagggacgtaccacctatgatcagcgtatctgcttcacttattgccttcacactcttattgatcacagcagaatcaagaccttcctcataaagtacaacatccggtttgagcattccaccgcagctgcatctcgggattccgtctgcgtgttttacataagccgcatcgtagaatttatggcatttcatgcagtaattgcgatgaatacttccgtgcagttccagtacatttttgcttcctgctgcctgatgaagtccgtcaatattctgcgtgatcacggcagttaatttgccggctgcttctagttctgcaagcttgcgatgtgcagcattcggtttcgcatccaggaacatcatcttctccttatagaattcataaaatccttccgggttctgtacgaagaaactgtggcttacaatctgttccggtgaatacttatacttctgccggtataatccatccgcacttcggaaatccggaatatcactctctgtagagacacctgcacctccgaaaaatacaattctttcactgtcatcaataattgtctgtaattgttctgcttctttttcgtacattgctattcctcctgaattctatgaattttattttgtatttctgacatatgcagaaaaaactgcccacaacctgtaaaggctgcatgacagtcactttctatcttcttatttgttattctctttctcgatccatgcagtcacttcatgcagatctgccaattcttccgtgattcctttctttacttcttccggcacaaccgccatatccggtacatagatcgtatatccgcctgctgccttcccggccagaagtccaggggcactgtcctcaagaaccagacattcttccggattctgtccaatcaactctgccgccttcagaaaaatatccggctctggctttccatgttctaccatatctccgtatatcgcatttgcaataagatgttctacaccggacacatgtatcagcctgcttgcacgctttttctctgtagaagtcgctatcacagccggaatcttatgtgcatctaagtattctaataaatcccgtaatccttctttatgcggaacagagtcttttgtcacttcatcgaagtactcatgcttcattgcccttgcttcatcataatccagtctgtctccaaaatattctgcaaatttttttcggattgattgtggatttcttcccctgaaagaatctgtcaatgcaatcggaatgtctacgcccaactttttgcctgcataaatccatccttttgtagaaaggcattctgtatcaaacatcgttccatccatgtcaaaaattacaccttttaccatatactcttatgactccttattctcactatacccggtaaagaattcagataatgcatccagtgtcttcacaagtaccggaagttcggtatcatccagtttgtccaggatagcctgtgtcatctgtctgtggtaatcttcgtgatgatggtaagcctttacacctttttctgtcagcttgacaagaacgactcttctgtcttcttcactgcggtgacgctccacatatcttttattcaccagactgttcatggcagtcgtaagggatcctaccgtaatattcagctttctggcgatggaagacatattatttccttctccgagtccgattgcttctattacatgcatatcattatttgtaagatccttgaactcgtccgtaataatcgccttttcttccagctcccatatttcattgatcagactgaccagtgtctgattgatcatcttatatgcgtcatccattcccatcttctgtaatttccttcactttaactcttcattctttactcttgtcttttattataccctttctggcatcagagaatcaataacttctttcacagtttccagatgatctgctctgtatgcatatgccccgcagaaaagtaatgcatcatcgacatttccctttgcggcattgatcagtgcctgcgtaatacaatatggtgtcgttcccggattacagtgtttcagacagcggtaacaatgtgcgggagcgatcctgccctgttcttttacttttttcataaagggattcagaatcgcacgtcccggcattcccacaggactttttacgatcacaatatcttcttttccggcattcagatatgcttctttatagcggatgtctgcgtcacattcttccgttgtaacgaatctggttgccacttgtatcgcatctgctccaagggaaaatgcatgtgcggcgctttcactgtcatgaattcctccaccgattgctatcggaatcttcttttcgtatttatccgaatagttctgtatgatttctttgattttctgaatctcctgatcgtatattgcctgtccttcatattcatccagctgatcttcacgaaatcccaaatgtcccccggcaagcggtccttcgatcactaccagatccggtattctttgatattttttatcccagtactttaatatgacattcgccgactttgcagtagatacgatcggcgcaagcagaatgtccgaatcccccacatatttcggaagttccgtcggaagtcccgctccagatacgatcagatccgcgcctgcttctaccaccgcatgcacatattcttcataatgctccatggcaaccatcagattaaatcctatgattccatccggtgccagttttcttgctttttcatattccgatttcaccgctcttaagtttgcttctaatggattcttttcaaaatctttttctttaaagccgggttgagcggcagagataatccctatgccgccctcttttgcaactgctccggcaagatttccaaggctgatccctactcccataccgccctggataaccggaacttttgccatctttgttcctattttcaatggttgtatttccatatcttttttcctcgtcatattatagaatctatgtgttcatacctattacatatttctgaagcgctcgtatctatgtcttatcaattcctgttctgacatgcttccatatctcatcagaaactcttctattgcttcatttatctgcatgatcacagaatccatattctgaaccgtatatgtttccggttctgcgaaaacatgctctacgattccctgtgctttcaaattctctgctgtcagcttcatcacttctgcggcttcttttgctttagaactgtctttccatagaatgcttgcgaatccttccggcgaaagaatcgaatagatagaattctccagcatccacacttcatccgcagttgccatcgcaagtgctccaccgcttccgccttcaccgataatgatagatacgaccggaacctttaatccggacatctcatagatatttctggcaatcgcttctccctgtccgcgctcttctgcttccagtccgcagaacgctcccggtgtatcgaccagacaaatgacaggtctggcaaatttttctgcctgtttcatcagtcttaatgcttttcgataaccttccggttccggcatgccgaagtttctttcgatattttctttcgtatttcttccctttgcctgtgcgatcaccgttaccggcataccatggaaccttgccacaccgccaatgattgctttgtcatccgcaaaatatctgtcaccgtggaattctacaaagtctgtaaagagcgcatcaatgtaatcacttcctacaggacggtcttttcgtctggaaagttctactctctgccatgccgttaatttttcttctttccttccgtctgccacaagatcctgagcacattcttttctattaaaatctgttccttttccattctcatgaagtgcaaggattttagaaagtactgctttcatctgcggacgttctacaatggcatccaggaacccatgttccagtaagaactctgctctttggaatccctccggaagcttttggccgatggtctgctcgatcactcttgggcctgcgaacccgatcagagcttttggctctgccaggatcacatccccgagcatcgcaaagcttgcggttactccgccagtcgtgggatcagtcagtatgctgatataaagaagtccggcatcactgtggtgcttcagtgctgcggatgtctttgccatctgcatcagagagacgattccctcctgcatacgggcccctccggagcaggcaaataagatgaccggaagtctttcttctgttgcccgctctactgcccttgctatcttctctccaactgcttctcccatgctggccatcaaaaatctcccatcacagactccgatagccgtctcacggccgtcaatctttgcttttcctgttaggactgcttctgaaagccctgtcttttcctgcagtttttccagtttttcttcgtatcctttgtattccagaggattccctccctgaagatcagaatcccactcttcaaaagaaccttcatctgtaaccatctcgatccttcgtctcgcatgcacgcgaaaatatcccccgcacttcggacagatgtaatgatctttctttacatcctctgcaataattgctcctccacacttgttacatttgcggagtaatccctccggtacttccggtcgtctggtaaatgtaatataattctttcttccgacagcaattctggttttcttaaatacgttgtccagcttcatcagcagtcacctctacagtctttcaataaattcaatatctatatttccctcaatgtaatccggatgattcacaattccatactgataatccacattcgtgtcaattccttctataatgacctcacccagcgcactctgcatcttgtggattgcttcctgacggttcttcgcccatacgatcagttttgccaccatggaatcataatatggcggaatcgtataaccactgtatattgcagaatcgatgcggattccctttcctcccggaagatacatatccgtgatcgttcccggagacgggcggaatcctttctccggattctctgcattgatcctgcactcgatcgcatgtccggtcagtttaatgtcttcctgtgtataggacagcttctgtccggatgcgatacggatctgttcctttacaagatctacaccggttacccattccgttaccggatgctccacctggatcctggtattcatttccatgaaataaaagttcccggatttttctaataagaactcgatcgttccggcattctcataccctgctgctttggcggctttcaccgccgcatctcccatcttttttctcagttcatctgacaatgcaacagatggggattcttcaatcaatttctggtgattacgctggatggaacagtctctttctcccagatggatcacattgccatatttatctgccagaatctggaactcaatatgtcttggattttctacaaagtgttcaatgtacatcgtcgaatcggcaaatgccatctcggtctctttctgcgccgtctgaaatgcagattcaaactcttccggtgtccatgcggtacgcatgcctttccctccgccgccaagggcagcttttataataaccggatagccgatctcctgtgccaacgcagcacctgtctttgcatcgtagaccggttccttacttccgggtatgaccggaacgcctgcttccatcattgtatttctcgcaacctgtttattaccaaggcttgcaatgactttggaatccggtccgatgaatgtaatattgcattgctcacataattctgcaaatttactgttctcagacaggaatccgaatccgggatgaattgcatctgcaccactgatgatcgttgcactgatgatattttccatactgagatagctgtcttttgacggagcaggacctatacagactgcttcatctgcaagcttcgtgtgcagtgcttctttgtccgcctcggaatagaccgccacagtctctattcccatctcacggcaggcacggatgatacgcactgcaatctctcccctgtttgcgatcaatacttttttaatcatctttccttacactcctatgctgctttttgtttatccaaccatgaatgtcagttctgcactgactactacctttccatccacacttgcgactgcctcgccgacaccgacaggcccttttcgccggatgatcttcgtctccagacgtaccttgtctcccggaatgatcttacctttgaatttacatttattaattccgccgaaatatgcaatctttcctttgttttcttccagacttaagattgcaaccgcaccggcctgcgccagcgcttccacagtcagtactcccggcatcaccggttcttccggaaaatgtccggcgaagaattcttctctgtaagacacacatttatatcccactgcgtattctcccggtacataatcctcaatgtaatccaacagaagaaatgggtggcggtgcgggatgatttcttttatctgattgatatccaaatgattcatactgtcctcctacacgatgcggaacaatggctgtccatattccacaccttcctgattatttaccagaatctctgcgactgttccgctgtaatcgctttcgatctcattcatcagcttcattgcttctacaattccgagtgtctgtcctttttctactctgtcaccgacttttacgaaactttccgcatcctccgcaggtgctgcatagaatgttcctaccaacggggattccaccacatttccgacaggtgtttcttcggcagacgttcccgatatctgatctccttctgctgctttttttatctcagcagcagaagttgttaccgcattcaccggtgcagacagattttccgtcacatagcatgtattttctttcttgctcaaatgcaatttgattccttcttcctcatatttaaatcctgtcagatctgactttgacacggcatctatgagttcgatcattttctccatttccatatgctttttgtccctcctgtgattctccgctagccttcataccgcttcaacaataacactgcattatgccctccgaatccaagcgagttggtcagtacataatccactttcttctcaatcggcgcaccaattgcataattcaggtcgcattcttcatctgcggtttctgttccgacagtctgatgaatgaagttatcctgaattgtcttcacacaggtaataaactctacacctcctgctgcgccaagcagatgtccgatcatagattttgtagaattgatcacaacatcctttgccgcttcgccgagtgccagcttaattgcacgtgtctcgaacaggtcattatgatgtgtactggttccatgtgcattgatataatctacctgagaaggttcgattccgccttcttccattgcaagttccattgctttggctgctccgcttccgtcttctgccggagaagtaatgtgatatgcatctcccgtagaaccgtatccgacaagttcggcatagatgactgcaccacgttgttttgcatgttccagttcttccagaacaactacacctgcaccttctccgagaacgaatccatccctgtctttatcaaatggtctggatgccttcatcggatctgtagaagtcgaaagtgctgtcagacttgtgaatcctgcgactccggtctcacagatacatccttctgctccacccgccagcatcacttctgcgtcaccatactggatcgcacggaatgcatcaccgatgcagtttgttccactggcacatgctgtgacaacattcgtgcattttcctttcagcccaagctggatggaaatattacctgctgccatgttcgagatcatcatcggaaccagcaatggattgactcttcccggtcctttggtccggatcttttcatattctttttctactgcctgaaggcttccgataccggaacctacgatcacaccgacacggaacggatcttcttttgacatatcaagtccggaatcctcgaatgcttctttcgccgccgctaccgcatactgggaaaatggctccattcttcttgctgccttaaaatccattctgtcttttgcctgaaaatcttttacctcggccgcaattttcaccttatattccgtagtgtcgaattttgtgatctctccgattcctactttaccttctttgataccgtcccagaactcctccacggtatttccgatcggagtcactgctccaagtcctgtcactacaacccttctcttcatatatcttaatctcctttacatcaccataccgccgtctacatgcaatacctgtccggtaatatatcccgcatcctctgacgcaagaaatgcaaccgcattcgccacatcttctgcttttccgaattttccaagcggaatctgtgcgacagacgcttcttttatcttttccggaagtacttctgtcatgtcggtctcgataaatcccggtgcaactgcattgaccgtgattcctctagatgccacttctctggctgctgttttggtcagtccgatcacacctgctttggacgccgcataatttgcctgtcctgcattaccgctgacacctacaacagatgccatatttatgatgcgtccgcttctctggcggatcatctggcggagtgcagctcttattgtatgaaatgttcccttcaagtttgtgtccaataccttatcaaaatcttcttctgacatcttcataaggagtccatcctttgtgattcctgcattattaaccagaatatcaattcttccctgctccttgatcaccgtctcgataaattctttacaggcatcaaaatcggccacattacattgtatgatcaccgctttaccgcctgcagactcaacttcattctttacttcttcggctctttctctggaaccgttatagttgatcacaactgttgctccttttgatgcaagctttacagcgattgcttttccgattcctctggatgctccggttacaaccgcaatttttccttccattgtctgatccatctttacgattcctccatcctgtttccaccatctgcgagttcctcacagactttatccacatcctcccactgggaaatgtggaatactttcacatttcgattgatttttcttaagaatccttccagtgtcctgcccggtccgatttcgacgaatgtatccacaccatctgcgatcatgcgctccatgctctgcatccagcgcaccggtgaactgatctgtgtcgtaagaagccccggagtttctctgatatccgttacttcttctgccgatacgtttgtcacatacggaatcttcaattcatgaaatctggtattctccagctcttctgccagcttctctcccgccggaaccagcatcttcgaatggaacggcccgctgacatttaacataattgtccgtcttgcacctgcttcttttaattttccggctgcttcttccacagccttcgtcttgccggtgataacaatctgtcccggacaattataatttgcaactgatacatctgcgatcggttcgatcacttcttcgattttctctgcatccatggagatgaccgcacacatagcaccttctcctgccggcaccgtattctgcatcagaattcctctttttctcaccagacggatcgcatccatatcattcatcccgccggcaattgcgatcgccggatattcaccgagacttaatcctgccgtaacatctgctttcaaccctttattctctgcaactcttgtcatcgcaagacaagtggtaaccatcgctgcctgcgtatattccgtcagatccagtttgtcattttcttcaaagcagagtgctttcatatccagaccaagctcttcacctgcctgatcgaatatgtatcttgcgatctcactgttctcataaaagtcggctcccatgccggctttctgagctccctgtccaggataaataaatgcagtcttactcatagaatccttttcctccgatcaatgcatctgtctcattcaccagtttctgaaccagctttttacatgacattctttcttttaccatacttgcaatctgtcctgccattacacttccgttcttcacatcgccttctacaactgcttttctaagtccgccaagtgtaagcttttctaattcttcaaatccggctccggcgttctccagttccagatattttctcgtcatatcattgcgaagggctctgaccggatgtcctgtggttcttcctgttactttggaatcaatatccttcgctttgatgattctttctttgtaattctcatgtacctgggattcatctgtaacgacaaaatgtgttcccatctgaacaccttttgctcccagcataaatgcggcggcgattcctcttccgtctgcaattcctccggcagcaataaccggaatattgactgcatccacgatttgcggaacaagcaccatcgttgtactctcgccgatatgtccgccggcttcacatccttctgctaccagggcatctgccccgcagcgttccattctcttcgccagggctacagaagcaacaacaggaataacctttactccggcttctttccacatcttcatgtatttctccggattacctgcaccggtggtcacaacttttacaccttcttcaacgattacctttgcaacctcgtctgcataaggactcatcagcatgatgttgacaccgaacggtttgtctgtcagttcttttgccttgcgtacctgatctcttacccagtctgccggagcacttgctgcaccgatgagtcccagtccgccggcttcggatacacctgctgccagatgatattctgctacccaggccataccgccctggatgatcgggtattcaattcctaataatctggttacttctgtctgcataatctctatactccctgtctttttataatctcatttttatgttactgtcctgtatttcttactctttgtgagcatttacgtactctacaacatcacctactgttacgatcttttccagatcttcggatgggatctcgattccgtattcatcttccagtgccattgtcagttcaaaaagatccagggaatctgctccgaggtcatctttgaatgatgcattttctgtgatcttgctttcctctactcctaagttgtctgctaccatttttttgatctgttctaacatgtttttgttctccttctcatatttgtttttactgttttttaccattccagaatacttgcgccccaggtaagtcctgcgccaaatcccgcgaggataatcttctgacctttttgcagctttccggctctgttcagttcatcaagaagaatcggaatgcttgcggaagatgtatttccgtattcttccagattcatcggaaatttttccaacggctcgcccagccgctttgcgattgcttctacgatccttttgttcgcctgatgtaagatataaaagctgatttcttcctgagccacattatttttttccagtacttcttttactgcctgcggcacgctctttactgcaaacataaatacttctcttccatccatctgcatcagatattctttttcatccggcttcggcagatcttccggcgataactcgcttctgtcatatctgctccggcagcacagtgcttctcctttggaaccatcggagtgtgtcaccggaagataatatctcatatcttcacttttcagtaccgctgctccggcaccatccccgaacaagatacatgttccgcggtccttccagttcgtcaggttcgacaaactttcactgccaatgatcagagccgtctgatacacacccgcattcagatacgccgccgctgtattataagcaactacaaatccggtacatgccgcactcagatcaaaacaggttgcacgctttgctccgagttctctttgcacttcacaggctgtacatggaagtattacatttgaagaaatcgtagaaacgatgatcagatccacgtcatctgcagtaatacctgcattttcaagtgcctgtcgtccggcttggacggccatggataccgtcgtctcttctctaatgatatgacgtctcacgactccggttctctcccggatccactcatcactggtatcaaccagttttgcaatgtcattgttatccattacaaatgatggtacgcaagatcctgtcccacatattcttccagtcattctaaatacctctgatttattttgattctaaattattttgactgtcaaagtatatatcaagaaattttgtttgtcaagtattttgaatatcaaaatatatttttattttccgggcatctggtgtttaccggaaattcatataattatgataatgtatcttaacttatagcagcttttcttcccactctttttctttgaatccggtcaggacgaagttgtctccgattacgagtgggcgttttacgagcattccgtcggttgccagaagttttaactggtcatcttcggtcatttcttttagtttgtccttcaggttcatctgtttgtatatcataccactggtattgaagaactttttgagtggaagtccgctcattgtgtaccattcttttaattcttcgtaagttgggttttcttctttaattgctcgttcttcaaattctacgttgtgtgcttccagccactttaatgctttcatgcaggtgctgcattttctgtatacaaatactttcataatagattctccttttccatttttgcttatttttcacaatatattattagtgtttcatatcattcttccaacgttttatttcttctacactatgccctactgcttctgcaatcatgtcttcccttgctcctaattctagcaacttcattgctgtttcatattttcctttttcttttccacgctcttctcctattaactctcccgctttgtaaatcttatccatctctttacacataatctccactccttcctgtgtctctttcaatactcttacccgctctgccaatactttgctatacatgtcttctgcctttgtacaatgaaaatcatgcatcaatctgcccagatctgtattttctttcatccgggcgttaatatatataatttcgcttttatcattataatctccgcctgtttctcttacagtccgtttgatatgtaagataggttcaactccagcatctgattcctcatctacaataaaaatgacctttgattccggcagtttttcaaaatcttctcccgcaaacagactatgtgcgtctattatactgctgtggtagcgcaatctttttgggcctgctccggctttttcctgctgtacttctatatcatatatttct

SEQ ID NO: 2838 - DNA, 44844 bp, Unknown
  gut microbiota DNA sequence
aatgtatggagctgactgatactaatcggtcgagggcatgaccaagcaaggtgataggtaggatgaaagaaaatatttcttgtatgcagttttgaaggtacatagcttcaattgaagatggcccagtggctcagttggttagagcgccgccctgtcacggcggaggtcgagagttcgagtctcttctgggtcgtttgtatgggatcatagctcagctgggagagcatctgccttacaagcagagggtcataggttcgagccctattggtcccatcaaattaaataatatggatggattcccgagtggccaaaggggacagactgtaaatctgctgcaaattgcttcggtggttcgaatccacctccatccattagccgtaaggcactcgccgatgtggctcaattggcagagcagctgatttgtaatcagcaggttatcggttcgagtccgatcatcggctttaagtcataagacttaacttaatatcgcggggtggagcagtctggaagctcgtcgggctcataacccgaaggtcgtaggttcaaatcctgcccccgcaactcacacataatattatgtgtatgcccagatagctcagtcggtagagcagaggattgaaaatcctcgtgtcactggttcgattccggttctgggcattttccttgcaaaaggaaatgagggcgtgtagctcaggtggtagagcacttgacttttaatcaagttgtccggggttcgaatccccgcacgctcatggaatgagagtgaagtagtatataagtactgcttctttttttttgctaaaaatgattgacagaagtcagaaaaatgtttatattatattttaataaaagggagtaatcggcatctatttatttttaaggatagatgtttacgatgacgtcagtacgatgacagacaggtcatccgtatcgtaatgaaatggtgagacttttattgcatagtttttgtgcaataaagggctctttttttattattaagatttacgctttattttgcacaacggttttgtataactttgcacaatagaaaggagaataagatgttaacaagtgaacaggcaaagaagaatcaggaaaaatatggattcaatgaattgacggaaggaaaaaagaaaagtgtactccggatatttctggaacaattcaaagattttctggttattatattgattgtatcagcggtcatatcaggaattctcggagatgcggagagcgcaattgttatcttcgtcgtgatcacgatgaacgcggttctgggaacgatacagacggtaaaggcggagcagtcactggacagtttaaagcagttatcggcaccggaagccaaggttgtgcgtgatggcagcgtgattcagatcccgtccagggaagtcacgatcggtgatgaagtgatcctcgaagcaggagactgtatcccggcagacggaaagctgatcgaatgtgcaagtctgaaagtagatgaaagtgctctgacgggagaaagcatttccatagagaagaatctggatgaagtggaagaagctgcggcactgggagatcagacgaaccgggtattctccggaagctttgtcacatatggaagaggaagatatgaagtaactgcgatcggtatgaagacagaagtcgggaagattgcagatcttatgaagaatacttcggaaaagaggacaccgctgcaggtgaatctggatgatttcggaaagaaattatcggtgctgatcctgacattttccgtagtgatattcggagtgaatgtatttcagggtgaatcgtggggttcggcatttatgttcgctgttgcacttgcagttgcggcaataccggaggctttaagctcgatcgttacgatcgtgttatccttcggtacgcagaagatggcaaaggaacatgcgatcatacgtaagctgcaggcagtggaaggtctgggaagtgtatcgattgtctgttcggataagacgggaacgcttacgcagaataagatgacggtcgaggattattatgtaaatggaaagaggattccggcaggaaagattaatctgaagaatgaaaatgaaaaattacttttaagattcagtatcttgtgtaatgattctacgaatacggacggacaggagatcggtgatccgacagagacggcgctcatcaatcttggaacgaatcttggtattgatgcgatgcaggtaagggagagatacccgagattgtcggaagtgccgtttgacagtgaccggaagttgatgtcgactgctcacaatatgaatgatgcactccttcaggaaggccatatgatgatcgtaaaaggtgcggtagatgtcctgttggagcgtatggacagaatacgggttgggaatactgtaaggaggatgacagattccgaccgggaggacattgccgtccagaacatgcaattttccagagaaggcttaagggttcttgcatttgcatataagcagatggaggaagagaaagagatcggtacggaggatgaggaccagctgatatttatcggtctgatcgcaatgatggatccgccgagagaagaatcgagacttgcggtggaagagtgcagacgtgcgggaatccgtccgatcatgatcaccggtgaccataagattactgcagcggctattgcaaagagaatcggcatcttaaaagaagaatcggaggcctgcgagggagccgtaattgaagatatgtcggacgaggagctgcaggattttgtagaaggaatctctgtgtatgcgagggtttcgccggaacataagatccgaattgtccgtgcatggcaggaaaaggggaatatcgtagcaatgacaggtgacggtgtgaatgatgcaccggcgttgaaacaggccgatatcggtgttgcgatgggagtgaccggaagtgaggttgccaaggatgcggcagcgatggtcctgacggatgacaatttcgcaaccattgtaaaagctgtggaaaatggaagaaatctgtatcagcatattaaaaatgcgattcaattcctgttgtccggtaacttcggggcaattctggttgtattatgtgcatccgttgccggactgccggttccatttgcaccggtgcatctgctgttcatcaatctgctgacagacagtctgccggcaattgcactgggagtagaaccacattccaaagcggttatggagcagagaccacggccaatgagcgagtcaatccttacaaagccatatctgctgagtatcgcaacggaaggagtaagcatcggcgtaatgacgatggctgcattcctgatcggatacacaagccagaatgcagctcttgcaagtacgatggcattcggaaccttatgcatgagccgtctggtgcatggatttaactgtaaggatgataaaccggtaatatttacaaagagattctttaataataagtatctgatcggagcatttgtcctgggtatgatcctgatcacaagtgttcttatgattccgggactgcacggaatgttcaaagtagttacgttgagcctgaagcagctgatgacggtatacgggcttgcattgttgaatcttcctgtgatccagggaatgaaatatttgaaagagagatagaaacagagaatggaattgagaaaagaaacggtaaaacagatcagggggctgatcgtatttacggcattattgattgtctgtctgtggaaatatgatgttgtgatggatgcgtttagattcgtattgaatattttatatccatttctgcttggcggtgcgattgcattcgtcttaagcgttccgatgaattttgtggaaagaaaattattcacggagagaaagtttcctgaaaaatataaaagaaaatatgccagagggatcagtcttctgatcgttctttccggtgtgatcgggcttcttgcaattatcatgttcgggctgattccgcagcttgccgggacatttgccagtctcggcaagagtatccaggattttatcccgcagctgcaggagtgggcagatcattggtttcataataataaggagatcatgaatgtagtcaacaatctggaatttgactggaacaaggtgatggaggctgcgatggagttcctgaagaacggagccggaagtatgctggaatccacgatcaatacggcgaaaaatatcattggtgccgtgggaacattctttatcgcttttgtatttgcaatgtatattttgctgcagaaagaaaagctgggaagacaggcgaaaaaagtgttatttgcatttgtcagaaagggaagagcagaggctgcgttggaggttcttgcattgacatataagacattctccagttttctgacgggacagtgtgtagaggctctgatcctgggatccatgttcgtgattgcgatgacgctgcttaggcttccgtatgcacttcttacgggaattgtgatcgcatttaccgcattgatcccgatctttggagcatttatcggctgtgcggtcggtgcatttctgatatttatggtgagtccggtccaggcattgatatttatcgtactgttcctggtactccagcagatagagggcaatctgatctatccgcatgtggtgggcaattcggtcggccttccgtctatctgggtgctcgctgcggtaagtataggcggaagcctgatgggtatcgttggaatgttgatctttattccgctgatgtcagtgttctatgctttgttccgggaagttgtctacattaaactgcggcagaaaaagatttatccacaggatattggttgattgtggataacttttggggattaagcatcggttttatctttgctgcctttgctgtcctttccattctgggctttgctccagatacggagggcggtgaggattccgaatgtatacaggatcgtcacgagtattaccggattatccttcagaaaataaataacaaggataacggataacaggcagatggcgagctggaatgtagtccagaatcttttctcacgtacttcctttgcctgctggagaagttccatacgtttctgttccatgcggagatactccatcagatcttcatcactgatgcgggagaggatttgttcatcacggttcatctcgatcttgcgtttggaacggaaattggagaaaaattcgcggaacggatgctcgtctttggagcgggatttttcctgttgttcgtagaaatcctcttccagatcatcgtcttcttcttccgcatcttttggtgaagattcttttgtattttgggtgtcactgaatttgttagtgttatcggcagttttaccgtcggtagctttgctttcagtatctgaagtttcctgcgcagcagatacagttttctcctcatcagaaacaggataaagcacaacattgtcagtggcagcaggtgcggtagcttcagttcctttagtctcagacgattcttcggtctgtactgctttttctatattttcggacataattttacctccgtcttcatttctatattgtcttttattttatcatatcagctatgaaagcaaaaaacaaataaagagtacataaaattctggaaaataacttgcagtagaaaaactcccctaaaaatggtagaattgtaaggaatcatttggaggaaaacaagatgcagttaatgaatgaaatcccggatacgttctggagtctgttccgttcggtcaaccgggatatttatattgaagcacttttatgtattaatgaagaatacgaatataataactatttcctgacgaaagaggtgtgcatccagatcttaagtgatatgaatgcgaagaagcgctttgagctacagcgggaggaaaatgatacagactttgatatgttggagacgccttcttcgaggatcttaaactggctgctgcgggcaggatggctgaagcgtatcgaggattataatacactggtgacaaatattgtcattccggattatgcggcggtgatgatcgatgcatttgaaaagctgaattcggaagatgcatcggagacggacatttatattcagaatgtgtatgcaacgctgtatgcgttccgcaatgatccgcgggcaagtgtcgggctcttaaggacggctctggtgaatacgaggcggctgaataaggcactgcaggatatgcttcataatatgaataaattctttgcgaagctcttgcagcaggattcttacagtgggatcctgcgggaacatctggacagttatgtggaagaaatcgtatggaagaagtatcatattctgaaaacatcggacaatttttatatctataagatggatattaagaaatgtctgagagagatccgggatgatgaagcatttatcatgaaggtacaggcacggtcgaagatgctgggagataaccaggatgatgtgttggatctgttggatctgatcgagcgtggatttgacgatatcgagcaccgcattgccaatatggacaaagaacatacaaaatatgtccgggcaacggtaaccagaatgaattatctgttaagcggtgagacagatacgaagggcctggtggtacagcttctgaataagatgtcggaagaaccggagcagatggaagagatcatcacagagaccggaaagcgcatgaatctgtcacttctggagatcctgtcagagaagtctttatataagagaagaaaatccagaaaagacttcatcagtcagctgcttccggatgagacgacgggtgatctggataaggacgatatcttaagactgaaccggatacagatgcggttcagcaagaagcagattgaagaattcatcgagaataatatggaagatgaagtgatggatgcgtcgaagatcaatattgctgacgaggaagaatttgaaaaactgattcttgcttatgattacagtacgcgtaagaacagcagatatatggtgctggaagaagaaccggagatggtggaaaaggacggataccggtatccggcactcaggtttgtgaaacggcgagtgtaatagataaaaggagttctgaaaataaatgatagattactacgaacagttaactcaggaagaaaaagaagaggtcacagaggtcatccagaccctgtaccgccagacatttctcctggaaagaaaatttgataaacgtgcgggcaggatgcagtatacaaaagaataccgcacctgcacgaagcatctggaattttttaaagcatattttgaagtcgcagggatcacgctcagagaaaatgtacatatgggtgtgatctatatccagggcgaacagttgtggggcgagaagctgccgcgtctggcgacgatctatttactggtgctgaagcttatctatgacgagcagatgcagactgcatcgtcgagcagccatgtggtgacaacacttggtgcagtaaacggaaaagcgggagaatttcatgtattgaagagtcttccgtcaattacggaaatgagacgaacgatcgcacttctgaagaagtatcagatcatcgagccgcttgatgttctggaagaattaaacgagtcgacccgcctggtcatctacccttgtatccatacggtacttttaggagatgacatcagggaattattagcaacattcagtgaggaggatcaaattggagacgaagcagccattcaaagcactctcgaagatatgcctgaataactggcattacatagataaaaagatactgacgcttaatgaaggaatcaacttcttcaccggacattccggaagtggtaaatcgacggttctggatgcgatccagatcgtgctgtatgccaatacggatggccgtggatttttcaacaaggcggcagcagatgattcggaccgtacactgatcgagtacttaagaggtatggtgaatatcagtgaaaataatgaatcacagtatttaagaaaccgtaatttttccagtacgatcgtgctggagctgacacagacgaataccagagataagcagtgtgtcggtgttgtgtttgacgtggatacgtcgaataatgacgtaagccgcctgttcttctggcacacgggagaattacttccgaatcattaccgttcggaaggccggtgccttaccactgcggaaatgcgtgagtacctgcagcgttcctttacgccagaacagttctactgcggaccgagcaatgaaagatttcggagacagctatacgatatctatcttggcggtctggacatggaaaaatttccaaagctattcaaacgtgcgatctcgttccgtatgaatatcaaactggaagatttcgtaaaggaatatatctgtatggagcaggatatccatattgaggatctgcaggaaagtgtcatgcagtatggacgcatgcgcagtaagatcgaagagacgatggaggagatcagaagactgaagctgatctgcggaaaatatgagcagtatgcagaaaaatccgatgaggagaaggtgtgctcttatcagatcgatcgtctggaggttatgaaccatgaggtgaagagtcaggaagccagagaccggatcaaggtaaggcaggaagccatcgaagatctgaagaagcagcaacaggtgatggagcaggaagaaaaggacctgcagaaagagtatgaagagatcattctgcggatcgcagacagtgggtatgcaaggctggagtcagatctgaatacattaaatgagacgctggagcgtctgaataacggaaaagtccgctgggagcagactgcagagcatctgaaggcatggacggagaaagacattacgccaaatcaggtgatctgggatattgaaaaattcgcagacggaagcatttccgaagaagagcttgtgcgcctgcaggaaggcttaaaagatctgcaggaggagctggaagaccagagacaggaagcggatgcagaccttcgccggatcaagaaagaagagaaagaggcaagagcagagttaaaagaactgaagcagggaaagaaggcttatccgagagagctggaagaggcgagattcgaactgcgtaaccgcctgcacgagcgctgcggcaagttcgtgaatgtgcatattcttgcggatcttctggatgtgaaggacgagagatggcacaatgcagtggagggttatcttggaaataataaattgcagctgatcgtggaaccaaagtatgccagggctgcgatggacatttaccaggagatggatacaaaacgtttcttccgggcagcagtcctggatacggagaagcttacgaaggacaagcatcaggtacagccgggggcgctggcagaagtagtaaaagcgaaagaagcgtatgtgcaggaatacattaatttcttccttggaaatgtaaagaaatgcgagtcactggatgaactgcgtgagtgcaggatcggtgtgacaccggattgtatgctgtaccagagctacaaactgcagcacatgaatccggagaattacaccagaagagcctacatcggtgagacgagtatgcgccagagaatccgcaagctggaagaaaaatgtgagaagttaaatggcgagagaatgccggtacaggagctgttagaagagatccgccaggcaatgcagatggagatgttgaagcagccggcagaggattatctcggatggctggctgacagcaaggcaatcatttccaaagaaaagaaaaaggctcagcttctggaacagatgaagaagttaaaggatgaatccgttgctgcatgggaaggaaagaagaaagaagtgcaggcggcacaggatgcgaagaaagaatccgtatccaaggtgcaggaagcaatctgggagaacaagaaagaaatcgaacgtctgaatgcagaagttttcgaatcggaagaacagatgaaggacgtgaagagaaaagtagcagataagcgttacgagaaggagttccaggaatatctggcgagtagaaaatccgagaattatgagtatctgagacgtcagatggtttcgcgggtatatacgctcagggaagaagaggaagacgcttaccggaagctggtggaagagagaagcagttatatcagagaatatccgaaccgtacattctcaacttctatccgggacaacgcgccgtatgagaagcttttgaattcgctgtcctgcgatcatctggagacttacagggagtcggcgaagacacaggcgaaagcggctgtggagcatttcaaagatgacttcatcttcaagatccgaagtgcgatcttggaggcttatcagagaagggatgagctgaaccggatcatcagcaaactggacttcggtaaggataagtatcagttcgtgatcacgaagaacaagggtgcagatggaaaatattataagatgttcatggatgattccctgcagatccgtccgtctgacttagatgatacgatggacaaccagcttgatatgttcacgatggagcatgagaaccagtatggggagatgatgaacgagctgatcaacatcttcatcccgccggagaatgcgacaaaagatgagatggatgaggcgaaacgcaacatggataagtatgcggattaccggacctatctgtcattcgatatgcagcagatcgtacatggcgataaggagatgacgatcggactgagtaagatgatcaagaagaactccggcggagagggacagaacccgctgtacgtggcacttctggcaagctttgcgcagctttataagatcaatctgtcgccgaagatgcaccggtcaccgacactgcgtctggttgtgctggacgaggcgttctccaagatggatgccgagaaggtggcaagctgtatctcactgatccgcggacttggcttccaggcgatcatcagcgcgacgaacgataagatccagaactatctggagaatgtagataagaccttcgtgtatgcgaacccgaataagagacatatttccattcaggaatttgagaagacggagtttggggagttggcggaggaataagggggacgggaaaagtggctttttccctgtccctaatggttttatgaagtggtattttctgcatagttgttacgtgcctgacgaggtgtcattccgtagatttctttgaagagacggttaaagattgtctggttagtgaaaccactcttctgcattacctcagaaatggacttgtctgtattcatcagaatacgtccagcatgagaaatacgcacctcattcaggtaacgaagaaatgtaatacccatatgctgcttgaaaaaacggcagaaatattcccggctgaatcctacctgattagctacttctttcaatgagagtttttctgtataatgttcattcacataagagatgatttttcgcagaatatcattagactgacttgttccagtagtcgttcccggcagggaatatacggaaaaataacgaatcaaatcagcaagcatcagcaatgccgtgccgtctgaacgcatggcgctggtgcttttattttcgacattggttcgtgtcagatcgtgggcaagctggcagatgtggatgtactgggtggattttggatcatccagaggaaccgggcggcaatttatatgatacagttccagatccgggcagtagaccgcgagctgttttttatcgacatggatacataaaaacatatacaggttagaatccgaatgtatggaatgtacttctttggaatcaaaaacaatcagttgattgtggtgaagggtaagatgttcgtgttcgatatgaacacggacggatccattcaggcagaataaaatctccatggcttcgtgccagtgggctggaatatgtgtattttcaagtgcggccattgatacttggatacccagattgccaagtggatgcagtgcttcgtgatatgcttttgccataataatctcctttttataaatagtaaagccagtacaataatgtcaatatcgttgtaaaataagataattataacactggtttgaaaccgaaaacaaggctaaaatacaagatgtaaaaggaaaacaaagaaaataaatatataaatagtaaaaaaggagaggtcaatatgagtacagtagcacttaagaatacaatggtaatgaataacacagagaaaaaggctggtttagtggagcgtttcaaaaaatattttctggataatgcagcgttttttgcggcggcttctgcaggaatgtctggaaatggttatgcggcagcacagatcatgagagatgcaagacgtgttgcatctgctaacagataagaaagaataagaatgactattaagggaagacatcaggtaaataagaactggtaactcgcaatctccggaagatcaggtgttgatatagaactgcgtgcaaaagtattatgtataatatggcggcaccgactgttacacatcagtaaatcgcttttgagattgcggtggctttgcggaaatatatcaaagataaagggggaaagtgtaaggtgtttatgtcccccggttggtgtgtagctggatactcggaattaactgtagtagatctggcagatgtatggagagaaagaaacgtgtggtatcaggggaggtctcgtcagcggatggaaacagagtatgaaatccgtcagtaactgtagagcaactttttataagtgattgagacaaagggaaaacaacagataataagaatagataagtgggatgaatgatgagagtgtgtagtgatttactgcatgcttttttctcttttcaaagggattataataaaaaaagaaggaacccattcctggcaagaatcggtttcctctttccaaaatacattccaaaggaagtatccaaatgttatgatacgtattttaaatctattttgcaagctaaaaaatataaaactttctgatcaggaatggtttgatcgggcaatcgcaaaattaaatctttcagaacaagtctgtccatactgtgattccaaagggcaaatgatatttcatgacagttacccccgttacatgattactttaaaagccaatcatatagaaaccgaaatactacggattccaagggtaaagtgcgactcctgtggacatactcacgcagttttgccagagatgctgattccgtattcttcttatagtatccgtttcgttctgacggtattaaaagactattttttacacgcacatacagtggagaaaatttgtgaaatgtaccagattgcccattctacattttatgcttttcgggatttgttcttttctcataaaaagctgatacttggagcattaaacgatgcgcagaagaaaacatccgattttattgaagaaacggatggacagttactttttcagttctggaaatctttccggctttcttttctgcagacataccatgcatcagattttcatcacttatagttttcgggaaaaagtacttctgatgcttcccataatcccggcatgtacaagaacatcggttaggaatacgctgtaatcggaggcgatagaaatggaacaacacaataacaaagagggaatagacgaattgatggagattgcaaggctccggtttgggataatcgcaccggtgattcaggaaacgtatccggatgaatctattatggcgtattgtcggagggtatcaaaggttccaatgcagctcccagatgggcgtactgttcattataagccaaaaacaatcggaaaatgggtttctctgtatcgcaatggagggattgatgctctggcaccaaagagacgttctgatctagggaatacaagagttgttgtgatataacatacacatccatgcttgactattatctaacagtttgtgaaaactagagaaacgccgtgtaccgaacggtacgcacggtggtgtgagaggaggctaatcaactaatgattagcctcctattcgattgcaaaaaataaaattaaatatatttatcgttgaattaaatgatgagctgtgataaaatacaaatacttcaatcaaaacatgttaatcagaaattcttttttcaagataagtaactcgcaaaaatctttccaaatatgacaaacaaaatagaaacgggtggtaaaatggctatgacaattacggaaatgagagaattaaaaaagcaaaatggctatactcttgagaaaatagtagacagatcaggtttagattttgaaatagttgccaaaatattttccgaagatgacacaatagggcagaaagagttctgcaaaatgttatcctatagtgaaatccgcagcctggagagggtatttgtacaggcagatgtaaataagatagcagaggcacttggtgtatataaagtaaagaaacagggggaatatactttagaagattattatgcgctgtcggatgagcagagatatgaactgatagatggaatattgtatgatatggcggcgccaacggtagtgcatcaggaacttgttcttgagattgcagcagctctgcgccagtatataaaagggaaaggcggaaagtgcaaagtttttgtatcaccgatagacgtacaattagataaagatgataaaacgatggtccagccggatatttttatcttatgtgaccaaagtaaaaatattggtagatgtatctatggcgcaccggatatggtgatagagattacttctccgtctacacggaaaaaggattttggaaagaaactggagaaatatgtaaatgcaggagtacgggaatattggatcgtggatgtgaaaaatcggaaagtaatcgtatatgatctgggagaagattttggagaaaatatggatctggcaatttatggaatggatgggaaagttcctgttggaatctatgacggggaatgtaagattgattttgaggagattatagggagcgtagaaaatatttagaatatttatattatataaaacaaaaaatgaatattgtattagaatctgctgtataaaaacagttgattaatttctgaaggttgaatataattgaaaaaaatgaaagtgacggggataagcaaatggtaggagaaagctgtaaagaagttattcagggaaaaaagcacagattaaccaatacagagttgaaactggcagattacatattggaacattatgatgaggcattgaactataatgttaccgagctggcagacagtgcgggggtgagtgatgcgtcggttgtcaggttctgcaaaaagctcgggtataagggatatcaggattttaaagttaatgcagcaaaagatgtactaccaagagacagacacttcaatccgggacttgagcaagatgatgatattgagacgatatgcaaaaagatttttttgtcggaagtgaatgtattaaacaggacacttgcaagtctggatacaaatgaattaaaagtcgtagcagaaaagatagaaaaagcagaaaaaatagtttttttcggaagcggtggaagtctgatcgttgccaaagatgcagcacataagtttatgaaaatagggattcgtgcttttgtgtatgaagatatagatcttcagctgatgtcttcatcgctgatgagtgagaaagaagttgcaatcggaatatcgcattccggaagtaacaggaatgtgatagactgtataaagaatgcaaaggaaaatggagcagagaccattgcaattgtgggacaagggaaaacgccgttatcaaagattgcggatatgatattgtattgttcgtcagaagagacgatgttcgaatcagaatcagtaagtacaagaattgcacagttggcaattatagatgcaatcgttgcaattgtggcatttgacaactatgaagaatcttatactgcaattcagagaacaagaagggcaacatccgaaaataaatattagaaaataaatattaaagaaaaacggacaaggttttgatgattaaaaatcgccaaaaccttgtccgttttttgtaagttggtatgaaaaaatatttcaaagaaatcaaaaggaagagtaaaaaaattcaacaaaataaatgcgaagatgaaaaaatatgcgataaaagtggaaaaaacggtgaaaaccgggagaaatgaaaaaaaattacaaaaatacatgaaaatacttgaaaaaatatttcagaaatgatatgattcaatcaagttgaaaaggagagtgaaagagatgaaagcagtaatcttgaatggaccaaataattttgatgtgacagaacttccaaagccagaaattggcgacggagatattttgctggagatgaaaaaagcagcaatctgtggaactgatatgagaattcttgcaggaacaaaaacaaaaggagtcagatatccatctgtaatcggacatgagatgtgtggcgtcattgcagaagttggaaaagatgtaaagggatatgaggtgggagaaaaagtctcaatcgcaaatgtaatcccttgcggatcttgcccggcatgtctcgcaggaagagaaaatgcatgtatgaacagaaaagcaatcggttatgaatttgacggtggatttgaagaatatattcgaattccggaaatcgcaatcaagagcggaaatgtagtaaagctgccagaggatgtttcctttacggccggagcactgatcgagccattagcctgctgtatcagaggattaaaaaatgccggaacaggattcaatgacacagtgttgatcgttggagccggaccgatcggtttgatgcatatgcagcttgctaaaattgcaggagcaaaggaagttatcgtcagtgagccaaatgaaatgagaagagaagttgcattggagcttggagcagataaggttgtagatcctacaacagaagatctcccacagattatcagcgaagcaacaaatggtatgggagccgatgtgatcgtgatggcaatcggagttcctgcactggtaaattcaacattgaaactgtgcaaaaaaggtggaacagtcaatctgtttgcaggatttgcaggtaccggagaatgtacgattgaagtaaatacaattcattacaacgagatcaaggtaaacggaagtaccgcttacaagagagaagattatctggaagccgcagatatggttaagacaaagaaaatcaatcttgacagaattgcaacgcatacatattctattgaaaaattccagaatgcatacgagatgtgcaaaagcggaaaaggattaaaaattattattgaaccttaataataaataaaagttaaaaagtgaaaagaagaaaaggagaaaaagaactatggcaatgttaggaaaagaagtaagaatgagcagactggtaaatccaaagagcaacaagatgatggcaattactgttgaccatgcaatttcaagaggaatcgcaccaatgacaggtcttcaccatattcaggatacaatcgataaaatcattcttggtaaaccggatgctatgacaatgacaaagggaattgcagaacattgtatgtggaaccatgcaggagatgtatcaatgttaatgaaaatttccaactattctccggttgcaccgacaaatgatacagtattcggaactgttgatgaagcgatccgtatgggagctgatgcagtgtctatgggagctatgacacttggtgatttccagggtgaacagtttgagagaatcggaaaagttgcagaagagtgtatggcaaaaggaatgccgctgatcggacatgtatatccaaagggagagagtgttccggttgacaagagaactgcatgggaaaatattgcttactgtgtaagaagtgcatgtgaactgggtatggatattgtaaagactacatacactggtgatccggaaagtatggcaaaagtagtagcttgtgttccttcaacattccgtgtagttatccagggtggagatgcatgcaagacactggatgattatttacagatgacaagagatgctatggactgtggcgtaggcggagttacaatgggaagatttgtatgggattacaaagatgtaacagctttagttattgctcttagatatatcattcatgaaggatacagtgtaaaagaagcaaaagagcttttagcacagttagagaatgacaaaaactacgatcagttctaaaatagtattattgaaaaataatagaaatgggtgtcgaatatgataacaggatatttacttggggttgatgtaggaacaacaagcatcaaagttgcgattataaatgaaaaagcacaattactgggaatgagtagcagttcctataaattaattataccggatcaggattcggtgcagatagatacagaagatatgtggagagcatatttgaaatgtatcaggcttttaaaagacggaaaagggatagatttatcaaaagttgtgggaatcagtatatccagcctttgtccgggacttgccgcactcgatgaaaacgggaaagtgcttgtagatccgattatttattctgacagaagaagtacggaagaagctgagatcataaaaaaagtagttggagaagatcgactgtttgagataacagcaaatacagctatggcaggtgcgatgtccggaacatctatgctttggattaagagaaatcttccggaggcatacgaaaaaacaaaatatttcggacatgtcaatacattgatggctcagagaatgtccggagaatttgcaatagattattcgaatgcatcctacacaaatctctttgaaacaacaggcggacttaaatggtcagaagaactgtgtgaaaagacaggaattgatattcagaaacttccaccacttcattcatcaactgatgtggtgggaggactgataaatgaagatttaatcaagatggggattccacaaggaacaccgattgttataggtgggggcgatacagcgtgtgcaacactggctgcaggagttaccaaagccggagatgtatgcgaatcggtaggaacaacaaatgtcttaacgatttgtgtagatgaacccaaatttgacagaggattcattaaccgatgtcatgttgtagatggaaaatggatatatcagggtgcattgtcacatacaggagcttcttatcagtggttcagagataattactatcaggaatttctgacaggagaaatagacccgaaatatgtatttaaccttatgaacgatgatgctgcaaaagcagaagcaggcagtggcggtgtggtattccttccatatatgttgggagaaagaagtccgatatgggatccatatgcaagaggagtattctttggtatttctttgcatacaggaagaaaagaaatgaaccgtgcaattatggaaggctgtggttatggattgaaacagcttgccgatattgcagagaaagttacaggaagagaaataaaaagttttgtttccatagggggcggtgcaaaaagcactgtctgggctcagatcaaagcggatattacgggaaaagatatcgagattttggatatgaatgatatggcaccgattggtgcggcattgttggcgggcgtaggagccaatgtatttaaagatgtatatgaagctgctgatatggtggagaaaaaagtctttaagtgtataaagagcaatcacgataatgatgcggtatatgcaaaaagatataaagtatatacagagttatatcctaaaatcaaagaactttataaagttggaagcaatctgtattaagagaggagaagactatgaaaaaaagaatattatcagcattactggcattggcaatggtaagcacatgtctggtaggctgtggcggaaataaaagcagtgaatcgaagtcatctggaaaagtaacaaagattacaattgcagttccggatccggaagcttcttatatttatcaggctgcgacagaatttgcagatcgtgcgaaaaaatattctaataatacactggagtttaccgtttcgggaaacggatcattatatggaggagatacagcagctggtattaaacagctttcggcaggttctttacagatgctgattctggcaaccagtgtatatgcaagttttgatccggcatataatgtaatctcagttccatatatgtttgacgatcagcagcagttattagattaccttaacagtgacacaggaaaagatcttatgaataaagtatctgagaaaggaattacaactgtaggaagctggacaagatcattccgtaaagttacaaactctaaacagccggttaatactccggatgatttgaaaggaatggtattacgtgtaccgaataactccctgtatgtagagttctttggagcatgtggtgctgttacaacacctatgaacttcagtgaagtatataacgcattacagttaaacacactggatggacaggaaaaccctgtagatgtaccatattctaacaagttctatgaagtacagaaatatatttctgcaacagaccatatggctgatgcatggcttgttggaattaacagtaatctgttcaagagcttaagtaaagagcagcaggatgccattaataaagcgggtgaagaagttcagaaatggaatgtagacttcatagagaaagaggatgaaaaggcattacagacactgcttgataacggaatggaatacaatgaactttcagcagaaaatcgtgaaaaatttgttgaagtatcaaaatcatgctatggaaaattcaaagaactgatcaatgatgatgaactctttgataagacagcagaattttgcggaaaaagtgaataagtagtttgaagattgagagggaattattccctctcaattagaatcagagatcaggaggaagcttatggaacggaagaaaacagctttttcaaaattatttgatattgtagatggaattgagaatgtagtgttggtaatcatggtaattggaatggttgttacaattatgattcagatcataggacgtattatcggacatccaagtccatggacggaagaaaccagcagatatttattcttgtggatgatgtttgttgcgctggcagcgggatttaatcaggcagaatcatcaagagttaccttgttgatagaaaaaggaccaaactggctgaagaaatttagtgaagtactttatgcggtagtagtagtaggatttttcggatttatgatcgtatacggatggcaggtagtacagcagcagatcatgatgaatgaaatgggaacggcactgaaaattcctatgtcgattattggaatctgtcagccggttgcaggtgtgttaggtattattggtgtattgcagagtttccttgaatatcacggaaaagttgcaattaccggacagaagaaagaagagaagattgaagggggtgaagaataatgagtatgagtattgcgttattgatattgttcctggtatttatgtttcttggagttcctattgcggtttcactgggagctgcttctgtaatttgtatggtgacgatgtcggatcttccactttctatggcggcacagtcaatgtttacatcaatgaacagttttatcatggttgcagttccgctgtttattctttgcggttcgttaatggatgaaggtggagtagcagagaaaatatatgatcttgctgaagcaatggtaggatggatttatggtggattaggtcatgtatctgttgttgtaaatatgcttttcgccggaatgtccggttcttcggttgcagcgatcgcatctatcggtaaaatgagtatcaatgcattacatagaaaaggatatccgaaggaatatgcgactgcgatcaacttatcaggttccatgcttgcttctgtaattccgccaagtatcctgatgattaatgcagctgcaacagcaaacgtatctatcggacaggcactgctcgccggattgattccaggtgtcattatcggagttgtctttatgatttataacttcgtatattgtaaaaagcatgatatcggtgatcgtacaccatttgaggtaaaacgtctcagcaaagcttttgtaagtgcgattccggcattacttacaccggtaatccttttaggaggagtatacacaggattctatacaccgacagaaggagcagcgattgcggtaatctatacaattcttgtatctatttatatttacaaagatcttaaatggaaagatattcctagaattatctgcaaaaatgctcgctcaaccggaacgatcctgtttgttgcgatcgcagcaaaaccggcatcattactgtttgaattagatggtctgccgagtgcagtggcaaatatgattacaggtatatcaagtaacagaatcgttattatgtttatcttatatgcattcttaatttgtgtaggaatgtttatggatgcaacagcagctatctttatcctggtaccgatccttcttccggcagtacaggcggttggagtttcaccattattctttgttgtatttctagtaatcacactttcttttggtctgattacaccaccggtaggtgtctgcctgtatgcggcgcagaatgttacggatttaccgttggagaagattataaaagcatcaattccatggattgcactgattgcaattgcattatgtatattcattatattccctggaattataacgacacctgtaaaattgatattcggaagttaatcaggaggaagagctatgaaaattgtagtattagatggatatacagaaaaccctggagatctcagctggaactcgatccgtaaattcggagaggtggaaatctatgacagaacagcgtatgaagattcaccgctgatcgtagaacgcattggtgatgcagagattgtaatcgtaaataaaacaccaattacaaaagatacaattaataaatgccagaatattaagctgattgcggtacttgcgacaggatataatgttattgattatgaatacgcaaaagaaaaaggaatcatggtagtaaatgttccgacatatggaacgcagatcgttgggcagtatgcagttgggcttttgatggaaatctgttcccattatggatatcatgcagaaactgtaaagaatggaaaatgggccaataatccagactggtgctattgggactacccaatgatagagttgtatggtaagacagccggaatcattggacttggaagaattggacaggcaacagcgaaaatcttaaatgcattagatatgaatgtaattgcctatgatgcatatcagtctgaagcaggcaagaaagtagcggaatatgtagaattggatgagctgctggcgaagtcagatgttatcttcctgcattgtccactgttcccggaaacggacggaattattaataaagaaaatatcgccaagatgaaagatggagtgatcctaattaataacagcagaggacagcttgtagtagaacaggatctggcagatgctttaaatgaaggcaaagtatatgcagcaggactggatgtagtatcagcagagccgatcagagaagataatcctctgattaatgcaaaaaattgtctgatcacaccacatatttcatgggcggcaaaagagtcgagacaaagaattatggatattacggaaaataatattgaacaatttctgagaggcgatccggttaatgttgtaaataaatagtggaaagggctgaacattatggataataagcttacatttagcatttcaaatgcgaaaaattttattcaggatcatgaaatgtcatatataaaagaagggatagagtgtgcgaaagaaaaacttctgtccagacaaggggaaggaaatgacttcttgggttggatcgatctccctgttgcgtatgataaagaggaatttgaaagaataaaaaaagctgcaaataaaattcagaaagattcggatgttctgttggtaataggaatcggcggttcttatcttggtgcaagggctgcaattgattttctgcacagtactttttataacagcattggaaaagaagagagaaaaacaccggaaatctatttttgcggaaatagcatgagtggagattatctgaacagaattattaagataatagaagggaaagatttttcgataaatgtaatatcaaaatcaggtactacgacggaatctgcaattgcatttcgtgtatttaaagagattctggaaaagaaatatggaaaagaagaagcctcaaaaagaatttttgcgacaacagataaaaagaggggcgctctgaagaatctttcggatgaagagggatatgaaacttttgtagtgccagatgatgtcggaggacgtttttcagtgttgactgctgtagggttgttaccgattgccgtcagtggtgccaatattgatgagctgatggccggtgtggcagccgaaagagaacgggtaatacatacgccgtatgaagaaaatgagtctttacgctatgcagcagcacgtaatattctatttcgaaaaggaaaagtggtagaaatactggccaattatgaaccgagtcttcagtatatatcagaatggtggaaacagctctacggagagagcgaaggaaaagacaagaaagggttaatgccggcatcggttaacttaacaaccgatcttcattcgctgggacagtttattcaggatggatcaagaattatgcttgaaacggttgtagccgtagaagatcctcaatcggatattaccattcaaaaagaggaaaacgatctggatggtttgaattatctggcaggaaagacagtagactttgtcaataagagtgccatgaacggaacaatactggcacatgttgagggcggagtacctgtacttaaagtgagtatagaaaaacagaatgaattttcgcttggccaattattctatttctttgagttcgcatgtggaatcagtggttatctgatgggtgtgaatccatttaatcagcctggcgttgaaagctataagagcaatatgtttgcattgcttggaaaaccgggatatgaagaaaaacataaagaattaatggaaaaattataattgtattcagaaaagcggaggtgtcattgctagttacctctgcttttttgtttgtagttggggatggtgtttttgactttttaagaaatatttagcatatttatattataaaaagaaaaaatgaatattatttcaaaatccagtacataaccagtcgaaaaaagtatgctatactgctgatagatgtactacaaaaaaagcggtataaaaaccagaaatgaaatggagaaaagcatatgaaattaacaatattaggaaccggaaatgcaacggtaagtgaatgttataatacttgctatgcaatcagcgatgaagggaaacatttccttgtagatgcaggcggcgggaaccgtattctgaaagtattgaaagatacaggaattgacatgaatgatatccacgatatcttcgttacacacgagcatgtagaccacgtgcttggaattatctggctggtgcgtatgatcggacagagaatgaaccagggaaaatatgaaggtgatcttcgcatttactgccatgaggagctggcagagaagattcaggcaatcgcaaatatgacgatccagcagaaggtctgtaagcatatgggggagcgaatccagtttgatgtcgtgaaagacggagacagcagaacgattctcggatgtccagtgacattcttcgacattggttcgacaaaggcgaaacagttcggattcaccatgcagcttaagagcggtaagaaattcacctgtgttggtgacgagccgtacaatgaggtggattataaatatgtgaagggcagtgactggctgcttcatgaggcattctgcctgttcggtgaggcggataaattcaagccttatgagaagcatcatagtacagtaaaagaagcatgccagcttgcggaagaactcggtgtgccgaatctgttgttgtatcatacagaagagacacatctggcggagagaaagaagttgtatacggaggaaggacagcagtattatcatggcaatctgtatgtgccggatgatctggagacgtttgagctatagaaaagcaaaagaaaataaaatagattagaatgtaagaaaacctgccgacgggcaggttttcttgcgttcatttttgatccggaagggacaataaaaaagtcaaaaaccctgtccccatggctacccatggctaaaaaagatcgagcatattatccagataaatctcttccctgacatgcagttgatattccggcttcgtcatataataaagcagaaattcaagaatcagcgcacttccaagcccgcgtccttcaatcttaaaattagaaaatcccattggcatgtaaatattctgtatatcatccacactgatgaatccgggattttccattgccttggaaaagcggtaaccgttaccgccatccggcgaagcacagtgaaactccggggcaggatttccgagattcttccggctgacggattcataacaagtctttctgtccttacagccgaaccagcagcattcattgcataagaattctactttatctttctggtgctgcgacatcagatctaatttatcgaatactttgtttaaccggaagtccggcacaatataacggaaatcttctcggtttatttcagttaaaaaatcctgaaaatctgtcagaacttttgtggttgaagagataaggtagagatcaggataatttttttgtaaatagtttaataaaagctcggagtgcacgatcacgccattctggagttggtgtgtatgtggtgaattatcggcatcaggggcgtgttcgaacattttacaaagttcgttacatttcttatctgtaagatgttcttcccgtagcaacgaattactgaacgtcagtcgggccgagatgccgtattcccgcaccagatcaagcacgtcttccggatcagaatatccaaatgaagtacgcccgccgccccagatacaatccgaaggagcgccatagatcgagccaatctcacaccagtcgtaaaaatattccctgtgtttccggaataatggaaggaatatgcggtacaattcgtaaaattcaaacaggcctgggaggtggtaaaaggcagtaggattattattttgaatatttgctgtagttgctgtattcatgtggttacctctggaaaattttctatggttaatgataacacattatcccggcagtgaacacgtatatttccgtatatgatacaccacatatactgcgatcataggttccgtaagcggcattgcggaccacagacttccgggcaggcaatgtccttatagcatatttttaatttatgtcaaggttttacatgcatttcacttgcattatccacatacatgtgtataataaagtttgttcggtatttttgaaaaaaaagtatagtaatagaaaacttttgaaaatatggaggtgaaaatgtggatatcggaaagaagctgagagagcttagaaagcagaacgatctgacattggaagatctggcttcgcgcagtgagcttacgaaaggatttctgtcacaggtggagcgtaacctgacggcaccgagtattgcgacactggaggacattctggaagcacttggaagtaatctgtcggaattctttcatgaagaggaagaaaagcagatcgtgttcggaacagatgatttcttcgttgatgagaaagaagattaccaggtggaatggatcattccgaatgcgcagaagaaccagatggagccgattcttatgacactctatccgcataaaaagagtcatatccagacgtcgtatacgggcgaggaatttggctatgtactgaagggaaatattacgattatgcgcggcggtaaaaaatataaagtgaaggcgcatgagacgttttatatggatggtgcgaagagtcattatctttataatcacgggaatagcccggcaaagatattgtggatcacgacaccgccaatcttttaaaaataaaccagaggggacagtaaaaaagccggaaaacccgtccccatggaaaggagaaccatggaagagaaaaaactaatcgaatttcgcaatattgtgaaaagctttgattcgcaggttgtgttaaaagggatcaacctggacatatatgaaaatgaattcgtaaccctgcttggaccaagtggatgtggtaagactacactgctccgaatccttggaggatttctggatgcggatgaaggaaaggtgatctttgacaatgaagatatcaccggaaaaccaccgtatgaaagagaactgaataccgtattccagaaatatgcattattcccacatctgagcgtatatgaaaatatcgcatttggattaaagcttaaaaaaatgagtaaagatattattgaacagaaggttatgaagatgctgaaactgatcggtctggaaggctatgaggataagaatacgaccttactttccggtggtcagcagcagcgtgtggcaatcgcgagagcactggtcaatgagccgaaggtactgcttctggatgagccgctggcagcgctggacttaaagcttcggaaggaaatgcagtatgaactgaagcgcatccaacaggaggtcggcatcacatttatcttcgtaacacacgatcaggaagaggcacttacgatgtcggataagatcgtcgttatgcagaaaggtgagatccttcagatcggaaccccgcaggagatttacaatgagccgacaaaccgtttcgttgcaaacttcatcggagagagcaatatcatttccggaagaatgattgaggattacaaagttcgttttgatgatatcacgttcgactgtgtggatcagggctttaaggaaaatgagccggtggatgtcgtgatccgtccggaagacatcgatatcgtagatgtaaaagacggcaagatgacaggtgaggtattaagtgttctgttcaagggtgtgcactatgagatcatggtggagacggttcccggaacgagtgttacggtgaacatgcgtgtcatccgtaatcacgatgtgaccagcgaagacggaagcgagaagatcagtgccaacaacttctatgtagatctggaagatgtggagaatctggatgataaggaaattgtcgcactgtcgaatgcacaggcatgggagacagaaagtgatgagtacatttccattgcaaatattgaatatgaactggaagcaaaagaaggccagtatccggtaacattcagcacagcaaacggaaccagcatcgagagaaccatctttgtagttaaccagccgttcgttaagaatgagaaggcaaatgaaggtgttatggcattcaacttcttcaagacggtagatgagattacagaatcccaggcattggatacggatcttaagacatgggcaaatgcacagggatggaaactgacggatgaagaccagagcgtggacatcagtgtagactatgattttgatccggaagaagtaacagaaggcgtgtatgagattacattttccactacgggacgtgagttcaagatccatacaacggattattcggaggaaggacaggaggtcggcctgacattcttcccggaagatatccatgttatgccgaaggtggtattctaagatgaagaaattttcacagttagcatttccgtacattgtgtgggcggtactgatgctggtgttcccgatggttctgatcgcactttattcggtgacagaccaggggaataccatcctgtcgttcacatttacactggaacattatgccaaattttttaccgacccggatttcttattaatcctctggcgttccattgtgattgcggtaaagacaacagtgatctgcctgttgctgggctatccgatcgcatattatattgcgcgcagtgagcagaaaaagcagaatgcgctgattcttgtaatcacgatcccgatgtggatcaacatgctggtaagaacatatgcatggatcggactcttaagtgacggcggcctgatccagagaatcttacaactggtgggattgggaaaggggtctcttctttatacagaagaggcagtgcttttgggaatggtatataactttctgccatttatgatcctgcagatccagacgtcacttagtaagatggacaattccttgctggaagcgagtgcagaccttggggcaagcccggcgcagacatttaagcgtgtgacactgccgctttccgtgccgggaatcatcaacgggattacgctggtatttcttccggcagtcagttctttctttataccgaagctgctcggcggcggtcagtatttcctcatcggaaatatgatcgagaaccagttcattacggttggagagtggaacttcggaagtgccatttccatgatcatggcggtcatcatgatggtacttatgatggttgtccgtaagatcgagattcgtaaccagggtggaaagggggtataatcgttatgaataataagggaaaacgtccgatagggaagatccttatgatactggcggttgtgttcttctatcttccgatcctgtacatgatcatattctcatttaacgatgggaaatcactgacgagttttacaggattttcactccgctggtacaaacatatgctggattcatcagatatgatggatgcactgtcgacaacattcagtattgcattgcttgcgacctttatttcaacggtaacaggaacaattgcagcaatcggtatcagtaaatcaaagaagattgtgcgtgacctgatggagcagatcaacaaccttccgatcatgaatccggagattgtaacagcaatcggatttatgttattatttattacatttcatgtggaaaaaggttatgtaacgatgcttctggcacatattgcattctgtattccatatgttatgttatcggtcatgccaaagatcaaatcgctggatccgaaccttgccgatgcggcaatggatctgggggcaacaccgtggcaggcactgacgaaagttgttgtgccacagatcacgccgggaatcgtagccggtgcattgatcgcatttaccatgtcagtggatgattttattatctcttacttcgtaaccggacgtggtgtgaagaacttaagtatcatggtgtatacgatgagtaaacgtgtcaacccgagtattaatgcaatctcgacactggtggttgtgatcatcacgatcgtacttgtgatcatcaatgctgcaccggcactttttgcaaaacgtgcgaagagaaacagcatcggcagacgaaatgtactggtaccggcagttgcggttgtgtgtgtactggcgatcgtagccggagttgtgacatataataacaagaaagagccattgccatttgaggggcagacgcttcgtatctataactggggcgagtatgtaggtgaacatattattcaggattttcagaaagaaacaggagcaacggtacttcttgaaaattttgattcgaatgaacagatgtatattaaggtcgcaaatggagaagcttatgatattctcgtaccaagtgattatatgatccagagacttatttctgagggatatttacagaaattggataagtcgaaactgaactgtatggataaattagatgatgcgatcaaaggacttccgtatgatccggggaatgaatattctgttccgtatttctggggaacagccggaatcgtgtacgataagacaaaagtcgatatcaaagacctgaaaaaagaaggttataacattttcctggatcagaaatataaaggggacatctacctgtatgattcagagagagattctttcatgatggcgcttaaggcacttggatattcgatgaatacgtccgacgaaagccagatccaggaagcttataactggctggtacagtgtgtacagaccatgaagccggagatcgttaccgatgagatcattgataacatggcgcagggaagaaaggcacttggcctgatctattccggagatgcgacatatgtaatcaatgagaatgagaacatgggatactacctgccggaaggcggaacaaaccagtggtccgatgccatggtcattccgaagaatgcgaagaatccggaactcgcacatgcatttatcaattatgcgagcgattatgacggagcttatgacaattcaagttatgtaggttatacatcagcgaataagaaggttatggaagatctgtatggcaagggcggagagttcgaaggaattgatgcatatataccaagaacagataataagaatgatgaagtctttgaatataatgaggagacgaagaaagagatcagtaatctttggagtaaggtgaagattgcggctagtaatacgaattaaggggccaatgggccaatggggacggggaaaatggaattttccccgtccctgtttctatttaaacacatacttctggatcacatcaaacgacgccggcccaacatccagaaccgccttatgaaaccgcatctgcgtaaagttatcaccccacttatccactgcatttttcttaagttccagaaattctagatacccaatatagtatttcagataattagccggatcggcaatgatcagatcatagatatcctcaatggtcgcatcatccgttattccataagtgtggaaaaaggccgccgcatcggcaagcttccagccatcgtaatggattcccatatcggcaagtgcatatagtccaagaatgacagatgagttgcgttgaaataatgtagcctgctctttcgtcagtgtggaaaagtagtagctcatcatctcgctgtaagtggcccagccctcggtgtatccgccatagttcagtacacagcggattggatcgggatgaaggcttgcataatagacattctgatataaatgtccggggtagccttcgtgggcgagggtggtgaagagagagaggttgtcggtgaggtgcccgttgttgatgtagattacattttcagaagtgttgtcgatggccgggatcatgtagaaagccgggcttaagtagtcttccatggatttctggacgtatttaatctgtgtatgaatctgtggatatggtggaaaatcctttgtaatcttgtttgataatgtggataaaatcttttcaggatcagattcggtgagtagtgtaccctgggggctgaaaatatcagaagttatggaggatgaggcggaagaggaatcaccagtcagcacctgttgcataactgtaagatccgaaagtatctgtgtatttgcaagattttgcagctctgcaatactgcggggggaaccggtctcacttcttaccagatattcgtaataagtccggccattcggaagatagcacagcccgttattgtttttgccggaactgcggagttcggacaagccggaaataagttgttcataggccggaaaaatatatttttttatgtaaacgttgttttgccgggtataggcttcccgctgtttttcggtaaggacaccgtctttggcagaagcaagttcttccagccgttccacgaaagaagaatagagataattgctttcttttaaattaacaaaatcccggcattctttgatgatggagtcggcagtataggatgccataaaaaggccggattcggattttgtgtgttcaaaattcaggatagatcggaagtattccggcgtcctggtaaggagtttcaggtaattatcgatgtcggaaattttataaaagcggtattcggataagataacaggaagctgtgactgagttccggtgagtggcgcaagcggttcttcgtaaagtgtatagggagccagattataagcagaagtcagatagttatccagcacatcataggtgagacggttgtctttggaaagagaagttctgttatgagactgaagtctggtgcgttccgcatcgacacttgaccggacgagtccgggggcggtagtgcattgtccataagaaatgggtgtattatttatgccatagttttcgggatttttcagggtgtagtggagagtgatcgtgttcccgctgatttcctgacggaaaagttcggatgtatatttagaaaatgcctgatctgcgtcctggtgaaagtgaagaaacaggacggaaagaatcagaaatgcagcggcagatgggaggagcatgaacagaggcttctgccggaattttttcagaaatttttgcataaaaatccccatataaatcatttgtagtatttatatggggatttcctgtaaatatgtattatccttataatccggtaattagttcaacgataaagacgccgagacatgcgaacaaagataccttcagcagactctttccccggtaagccaggaatacagcaatgataaatccggcaagtgcagaccagatatttgcggtggcactaaggattgccgggaatgtcatagccgcaagcgtcacgtaagggacatagtataaaaatgatttaatatacgtgcttttaatctctttgcggatcagtgtcagcggaagcatacggatcaggtaggtgactgccgccattacaaatatgtaaatgtaaatattatgattcatggtgtgcctcctttaccgggaagaaataagccgcaattccggcaatgatcagagtaatgatgataatacggaatccggatgaaatgttccgaagtcccggtgtcttatcaaataataagctggctgccatggaaatgacaacaacacccgcaagcacacggttattacgtgccggcggaataatgatcgcgaggaacatgccgtaaagagcaacgcttaatgcgctgacaacacgcgctggcaatatatttccggacaggatgccaagaaatgtaccgaacacccatccgaatacagagataaatataaccccgtaagaataaaaaggactcagcttcccacccttacagactgtgacaccgaagatctcatcggttacaccataagcaatgaaaaaccggtggatcagtggtgcttccggatcaatcttctgcgaaagtgcgcaagacatcagacagtatcttaagttgatgataagctgtgtgatggccatctctatataagaagcagtcgatgcgatcagcgacagccctgcaaactgtccggcgctggtcacatttgtcagagagatcagaaccgcatcaaagatcgaaattccgactttttttgccatgatcccaaatgtaaatgaaaccgctatgtatccaagacagatcggtattccgtccttgaaaccggcggtgaaatattgtcttctggtcataataaattccccaatcttatgtgtagtttctgtaaataacgagaatattataagcgctctgattggttgcgtcaatgatgtgaaaagtggaagatgggagatattgagaacaaagataacagtatactatgtaaacgaatataaaaatgcatagaaacacttcgaaatagctgccgaattagtgaaaaacatacaaaacatataaaacctattgacaaggtagggtaaaagcagtatcatacgcatatcgaatctgagatacgaaaaacacacatagatggagtgatgagtatgataaaagtagaacacgcaaacaaaaccttctccggaaaatacggtaaggtacatgccttgcaggatgtaagcatccatgtagaaaagggagacatttacggaatcatcggattctccggagccggtaaatccacattgattcgtcttgtaaatggacttgaaacactggatagcggaactgtaacggttcatggagaagaacttggaagtctgaagaaaccgcagcttcgtaaattaagaagaaaaattggaatggtattccagcagttcaaccttctggaatccaaaacagtttatcataatatagcattgccgctgattcttgagaaagtaccgaaggctgagattgacaagaaagtcagagaagttcttcagtttgtagaactggaagacaagaaagacgtgtatgtcagccagctttccggtggacagaaacagagagtcggaattgcaagagcattgacaacaacaccggatatcctgctttgtgatgaggcaaccagtgccttggatccacagacaacagaggcaattctgaaactgcttaagaagattaatcgtgagatgggagttacaatccttctgatcacacatcagatgcaggtggttcagatgatctgtaataaagtagcagtcatggagaaaggtcaggtagtcgaggcgggaagtgtactggatgtattcggaaaaccgcaggcaccagttacaaagagatttgttcagactgttgtgaatgatcagatccctgaaagcatcataagtcttgtaaaagagcagaaagaacatttccgtgtagaacgactgaaatttatcggaagcagcgtaaaacgtccggttatctcagatatttgtcatgtagaaggaattgtagtaaatatcttaggagcaaccgttcaagaacttcaggacaacataatgtgtgtgttcattttacagttgctaggatctgaagagaagattctgaaagcagagaaacagattgacgaaaacggagtaatcagagaaagggtagaggtgatttaatggatcagcagtattttggagtttcactggagaaattactgaccagtggaggacagactttatatatggtggcatggtcattgatcatcggaaccatcataggaattattctggcattgatccttgtgctttgtcgcaagggcggacttgcagagaatcggattctctacaatatcgtaagtatctacattaacattgtaagaagcattccatttgtaatccttcttgtagcaatcatgccactgacaagaacaattgttggaactacgattggaagtacggcatcgttggtaccacttgttatttacatcagtccatatctggcacgattgatggagaacagtttgttggaaattaatccgggtattctggaagcagcagaagcgatgggagctacaacatggcagactattcgttacttccttcttcctgagacactgggatctattgttctggcactgacaactggtacaatcggacttctcggagcatctgcgatggcaggatatgtaggtggaggcggtgtcggagatttggcactgacttatggataccagagaatgaacacaccactgatgattttcacagttgtagtactggttatctttgtacagatccttcagtttgcaggaaatacaatttcaagaaaattaagacagcataaataaatatcagagttctgtaagaaacaaaaaagacaggacaacaagcctggtaataatagttgtgagtgtttacagtcactgtgtaacgacagccggacatgagatagataaaaagaatagggagatttagattatgaaaatgaaaaaatttattgcaagtgtattagtagcggcaacagcatttggtcttgtggcatgcggaaactcaggatcaggcgattctgcaaagagtgattcatcagcaaaaaacacagataagaaggaaatcgtctatggaaaatctcagggaccatatacagagctttttgaagatgccattgttccgattcttgaaaaagaaggatacacagtaaagggcgttgatctttctgatcttcagacagcagacgttgcattaaatgacggagatgttgatgttaacgttgagcagcatacagcttacatggaaaatttcaacaagagttataacggagatctggtagcaatcagcccgatcccgacagtgccggcaggtgtatattctaagaaatatgattcgatcgatgatattccgaacggtgcaaaagtggcagttccaaacgatgcatctaacacagcacggtgttatctgatgcttcagaagatcggctggatcaaactggatgagaatgcagatccatccgcaataacacaggatgatatcactgagaacccacataacattaagtttacagagatgaacagtatgacaatcccggctacaatggctgattttgattatgtagcaattacaggaagtgttgtatacaatgcaggaatcgatgcttctacagcacttgcgaacgaagatatccaagattaccttgtacttcaggttgtagtaaaaaaagagaacaaagatgcagcatgggcacaggcaatcgtagatgcatatcattctgatgaattcaaagaatatatgaaaaaaaataatgatggattatggtggatcccagaagaacttcagtaagtggttctgagcggagttaaagaaagcgaggtagaagccatggatcagacggaaaagttaattatagatataattgatcaacatagagatgaagttattgagtttgcaagagatatttatacacatgcggaacttggatataaagaatttcgtacctcacagaaatttgtaaataagatgaaagaattaggacttcacacagaaacaggatttgccatcacaggtgtaaaagcatacctgaatgaagagaagaaggagaatgcaagtcttgcacttttaggagagttggatgctctgagaatcccggaacatgcctatgtaaatactgaaacagatgcggctcactgttgcggacatcatgcacagatggcaggcatatttggtgcggcacttgcacttacagtacctgagattgcagaaaaactgggtggacaggtagtattttttgccacaccggcagaagagtatggtgagattgaatttaagaatcagctgcgtgagcagggcaagattcgctatggaggtggaaaatgcgaattgatccgtacaggagcgtttgatgatattgatctctgcctggcgcatcatattcagccgggagatgaaattcaagtcggaagcggaacaggaaatggatttgtatcaaaagtaatccgctatttaggaaaagcagctcatgcagccggagctcctgacaagggagtgaatgcactttccgcagcttctcttggccttcaggcattagggctcaaccgtgagacttttcgtgacgaagactgcgtccgtgttcatccgatcattacgaaaggtggaaatctggttaatgttattccggatgaaattgtgatcgagacactggtaagagcgaaaacaattgaagcatttacggatgcggcaaagaaaacagatcgttcttttcaggcaggtgcagtggcgatgggagcaaaagtagagattactacactgccgggataccttccgacacttgcagaacaggctttgccggagttgaagagagctgcagaacttgcagcaccggaagtacctgtaagagaggctgcgggacattccggcggttctacagatgtaggtgatgtgcagcatctgatgcctgtttatacattcaatacaggcggtgtaaaaggcggacttcatcagattaactttgaagtgacgaatgaagaagaggcttatattgatacagcgaaaatgtttgcattggcagcatatggattgctgaaagagaaagctgcaagaagtaaagaactggttaaaaattacaaaccagtattcaaagattctgcagaatatacaaaatttatggagcagtttgattctaaggaagtacttgattgatagttaaagaatttaattgcagaagattgatacgtacagcctgtagaccttgacatcccgcccgcttatatgctacgatttacattacgaatggatatatgacaaacgcattgatgaagagagtatgtaacaggaaatcttacagagaatcccgtgaactgtaggtgagaatactgcagtgtgatgctgagagggacaggtggaacgttacagaagatggcttactgagcggtgtggatgagcatggaaaatgtaagttcacgaagggttccgccctttacagcggagaggtggagtggtgacttcacccgcagagactgtcggttgcgagactgatagtgaatggaagtggtaacacggattttcgtcttccctgggatttacgaattgtaacagaagttatgaggagtgaatgcaggggagattttttatataacaggaaactgagtttcctgttatataaaaagcctccggcaggatgcgcattcgcgcgaagaagtaggatgtcgcaagcgaccgcgctcagcgcgagaatgtgccagggcacattctatatttcatatatccggtaaacatagaaggagagagaaaaaacatgtgtgaaaaatgtaataaaggaaaatattatattacaacagcaatcgcttatgcatcaggcaaaccgcacatcggtaacacgtatgagatcgtgctggcagatgccatcgcaagatataaaagaagtcagggatacgatgtattcttccagacaggaacagatgaacatggacagaagatcgagctgaaggcagacgaagcaggtgttacaccaaaggaattcgttgacaatgcagcaggcgagatcaagaggatctgggatctgatgaatacttcttatgacaaattcatccgtacaacagacgaagatcacgaagcacaggttaagaagattttcaaaaaactgtacgatcagggagacatttacaaaggatcttatgaaggaatgtactgtactccatgcgagtctttctggacagagtctcagttagtagacggtaaatgtccggactgcggacgtgagtgtaagcctgcgaaagaagaagcatatttcttcaagatgagcaaatacgcagacagactgatcaaccacatcaatgagcatccggaattcattcagccggtttcacgtaagaatgaaatgatgaacaacttcctgcttccgggacttcaggatctgtgtgtatccagaacatccttcaaatggggaatcccggtagacttcgatccaaaacatgtcgtatacgtatggctcgatgcgctgaccaactatatcacaggaatcggatatgactgcgacggtaacagcacagaactgtttaataagaactggcctgcagacctccacctgatcggaaaagatattatccgtttccataccatttactggccaatcttcctgatggcactggatctgccgcttccaaagcaggtattcggacatccatggcttctgcagggcgacggtaagatgagtaagtccaaaggaaatgtactttacgcagatgagctggttgatttcttcggagtagatgccgtacgttacttcgtacttcatgagatgccatttgaaaatgatggcgtgatctcatgggagctgatggtagagcgtatgaactctgaccttgcaaatacacttggaaacctggtaaacagaactatttccatgacaaataaatacttcggcggtgttgtaacagataagggtgttgccgagacagaagaagaaaaggctgtcgatgcagatcttaaggctgtcacagaagatactccgaagagagtcgatgcgaagatggatgaactgcgtgtcgcagatgcaatcacagagatcttcgtactgttcaaacgctgcaacaaatacatcgacgagacaatgccgtgggcacttgcaaaagatgaggcaaagaaagaccgtctggagaccgttctctacaacctgatcgagagcatcaaagcaggagcaaaacttctggaatccttcatgccggagacttcagagaagatccttgctcagcttggagacggaaaagtaacagaaaaaccggagatccttttcgcaagactggatgtcaatgaagtaatgaaaaaagtagaagaacttcacccacatgtagaagagaaggaagaggcaaaagaagaagctgacgaagcagtgatcgatatcgaagcaaagccggagatcacattcgatgacttcggaaagatgcagttccaggttggtgagatcattgcctgcgaagaagtgaaaaaatccaagaaacttctctgctcacaggttaagatcggaagcgaagtaaaacagatcgtatccggaattaagaaacattactctgcagaagagatggtaggcaagaaggttatggttcttgtgaacttaaaacctgcaaaacttgccggagtattatctgagggtatgttactgtgcgcagaagacgcagaaggtaatctggcacttatgacaccggagaagaatatgccggccggtgcagagatctgctaatgtaagtatagaaagatacaaagaaattggttgataatagttggctttgtatatgaaagaatgaaaatgaggacggaggatttttggaatcaccgtccttgtttgatatatatctccaatatccgacatctatatacagtatctgtcacacaagttatccacatgatgtggataagtatgtggaaaaccttgggataagggtgggataaccatgaaattccttgggataacgtgtggaaaagatgggataaatattgggatactggggacagaacatttttgatttgggacggaggatatatgatatttgatacacatgcacattatgacgatgagcagtttaatgaggacagagtagaattgctgaattctatggaagagcagggcgttggcacaattataaatgtcagtgcaacatacaattcatgcagaaaggttattgcacttgcaaaggaatatccatttgtatatgcggcagtcgggattcatccggatgaggtcggaagcctgaatgaagagacctttgcacagatgaaagagctgtttaaagaggggaaagtggttgcggtaggcgagatcggtctggattattactgggacaatgagccgagagaagtgcagaaaaaatggttcatacggcagctggaactggcaagagagttggatcttccggttctgatccacagccgggaggcagcggcagataccatggagattatgaaggagcatgcgaaaggactaagcggtgtgatccattgttattcgtattctaaagagatggcacaggaatatatcaagatgggattctatatcggcgttggcggagtggtaacgttcaagaatgcgaagaagctgaaagaagtagtggaaaatattccactgacgtcaattgtactcgagacggactgcccgtatatggcaccggaaccgaatcgtggaaagcgcaacaattctgcctatatccgttatgtggcagagaagattgcggaattaaagggtattacgtatgaagaggtagttgaacagacggagaaaaatgcaagagatatgtaccggttatagcaaaaagcaggggagatatcggaaaaacaacgatatcttccttgtttattaataagaaaacccttatgcataaaattctgcacaaagaaattgtgtcaaaacaaaatgtgataaaataatccaaaaatcgacaaaatttccatagcaagctataaattgaattcaatacattctcctcaatatcattccaggcaatcttcaatatgcagttcatggttggtggcttgccggaactatttggaccaagaagcccaaagatctccccttcctctacggagagactgatgatggaaagtccgatgaaaaagcagaaacaaaccagagcggcagtattcacgatgtttttcagataaatgatcattggagggaaaacaaacctctttttggcgtcccgtgaaattcgaatttcctattgtcatataaaactacttatgttaacctaatcttacgcagtcgtcaatctgacagactgcaaaagtatctatcaaccaatcggtaattatttctttcactctatattcagagtagataatccgatgaaagcaaaaaagaggaagatcgtttgaaaaaatgtttcaggcagctctaagaatctgaggtatttgcggagaacatttggtaaacttctgcttttctaagatatactcctgtgttaaaatatgattaggcagagaattctttacttcaaacgatactttatcttacaaaagaagggagaattctatgagaagaaaccagaaaaatgtaacagaagatgactttattatgcttccgacggtggatttttgtttcaaagaattgatgcaaaatgaaaatatccggaaaggaatcgtagcggctttgctaaagcttcacccggaagacgtagaaaaaacagacctcatgcctacaatattacaaaaacagtatgaggatgataaatacggaattttggatgttcgggtgaagttaaaaaacggtgtacagatagactttgagatgcaagtcgtctactacgactactgggcgaaccggtcggcgtattatcttggaaaaatgtatgtggatcagatcagagaaggcgacagttatgacaggctgcagaagtgcattcaggtaagcattctggatcatacttattttcaggatgatgaaaagtgctatcgtcggattgcattgtgtgacacagagacagggaaagagtatacagatctgttagagatgcacatactggaactgtccaagcttccgcctgagcagaaaaatgagacagatctgttacaatggatgcgctttctaggcggaaaatgcagggaggatttcaagaagatggcagagaataattctacttttgaagaggcatatgatgtattagacagactgagtgcggatgagaagaaacggctggaatacgaagcaaggcagaaagcaatcagagatcatgacattatgatgaagacagcaaaaagacttggactcgaggctggaattgcagagggaagagaaaagggaattgcagagggaagagaacaagaaaaacgcaatattattcgtgaaatgctgcaggatcacattcccgattataaaattaaacaatatacaggagcaacagataaagagatttccgaggaaaagagccggttgttttaaatgtctgcgcctattattgaaaggtagtgaaatatacagatcgtacatgataaaaattctcgataatctgttccgcatatgaaacagccagaaaagcccgaaaaatggggaaaaagaaagaaacagcctctgaaaacacagaaatt

SEQ ID NO: 2839 - DNA, 40457 bp, Unknown
  gut microbiota DNA sequence
gcctgtggagatagtaggttacgaggtctgcgaagcaggaagcccattggctttagacaatgggtagttcacaaatataatatagtataaattttacgaggaaactaagatgacattagaagaagtaagaaatgaaattgatgaaatagatacaaatatgaagccattgtttttaagaagaatgaaatgtggaaaacatgtagcagaagtaaaagctcagaccggaggagatgtatttgttctcgaaagagaacttgaaatcattgaaaaaagagccacggatgtggatccggagattcaggaagaatataaaacattcctgagacacttaatgagcctttgcagaaaatatgaatatgaattattaccagagatgcaggaaaaagttatgacggcagctctggcggcagcaggactgacagctgagaccgaacatacacaggtaaagattggatttacctgcccaaaagagacaagtgatctgaacctgttcgtgaacatgacaaagttaaatggaatccagattgatgctatgaatctgatgacagaaaatggaattcagaaagtaaccatgacactggatggtaagatcacggatgcgggaatgaggtgtctgttgtgccagatagggaaagaggcagaggagttcaggattttggaattgtttgggatttaattcataaatgagaagtaagaaagacattttacataaaattagaaataccctcttgcaatctggaaaaacatgtgctaacatttaaaacaaattttagtatagtaaagcgatgaaagagactctggactctggaacctgacaggaatgtggtgtcaccgactgagagcactgcttggggaatgaggacaatagggaacactctggagcagaccagctgaacaagtaaatatggtaaagttgaatgaaaagtaggttggtacgtagactgcacgttacgcacgaaaagaggaatcttagaaagcactatacagctttgagattcaatgcgggtggtaccgcggataacgatgatgatatccgtcccgggatacaagtatgtattccagggcggatttttatgtttataaccgttattcgtcccgggaagaaaaggaggataagaacatggagtatttaacaggtgtaaagccaaaagagacaaaagaaatcagtgaattactggaacagacagaagcaggaacaaaggtaaaagtcaacggagcagtgcatacgatccgtgatatgggaactgttgcatttgtgatcttaagaaaaagagaaggtctgcttcagtgtgtctatgaagaaggcagtgctgatttcgaactgaaagacatcaaagaagcagcaacagtcgaagtagaaggcgtcttagaagagaatgaaaaagcaccaaatggaattgaaatccgtatggagagcataaaaatcttaagtgagccggaagacgagatgattccgcttgcaatttccaaatggaaactgaacacatctctggaagcaaaactgaactatcgttccatttcccttagaaatatccgggagcgtgccaaattcagaattcaggaaggacttacaagagcattcagagatttcctttacagccaggaatttacagagatccatacaccgaagatcggagcgaaaggagccgagggaggagccaacattttcaaactggaatatttccacaaaccggcagtgctggcgcagagtccacagttctataagcagatgatggtcggcgtatttgacagactattcgagacagcgccggtattcagagcagagaaacataacacaaagcgtcacctgaacgaatataccagtcttgattttgaaatgggatatattgatggatttgaagacatcatggcaatggagacaggattcctccagtatgcgatggaattgctgaaaaaagattatgcaagagagttaaaagtattgggtgttgaacttcctgatgtgagtcagattccggcagtgaaatttgcagatatcaaagaaatcgttgcagagaaatacaatcacaagatgagaaatccattcgaccttgagccagaggaagaagtgctgatcggacgttatgcgaaagaagagtgggaaagtgattttgtatttgtcacacattatccttctaagaaacgtccgttctatgcaatggatgatccagaagatccaagatatacactaagctttgaccttctgttcagaggattggaaatcacgacaggcggacagcgtattcatgattacaagatgctgacagataagattgctgcaaggggaatgacagaagaaggaatggaacagtatcttgcaacattcaaacatggaatgccgccacacggaggactcggaataggactggaacgtctgacgatgcagttattaggagaagataacgtaagagagactacattattcccaagagatttaagcagactggaaccatagcggggagtaaggtataatagatatgatactggtgataacatgtcatgagagggaaatcatatgtttggaaaaagatgtagtttatgcggaggaaagttaaacagtagtggaatctgtacggaatgtgggcttgataacagcaagtcggataagaattaccggatcaaccggagtgactgtgacggaatgccgcttacacatgtacatgaggagaaagaaaaatacagaccggacaggaaagcagatcacagggaaataaatcacaaagagacaaatcataaaaaaagagattacggaaaacaaggctatcgtatgcatgagtctgatatgaccgggaaaaaacggagaaagcatgtgcagactccggatattacaaaccggagaagaccattgaaaatagtgattctggcaattatcgtgattgcagttttgggtaatctctatgaggaacataagtacgatatagaatatgcaattggagatgcagttcaaggtgtatttcaggatacgggggatcaaaagacaaatgatacggatgaaacagactatgatcattatcagtatgtgactcgggaaatcccgaaagagggagaacgtgcagactatgaactttcttccggcaattatgtggcaggtgtggagatcccggagggaatctatacagtgacaccgaaagacgactatgacaccgtgcagatcgatgatcctgagaacagcatctatctgtatgaatacaccgagggtaaaaaagacaagatagaggatatccgtctttataaaggtgcgcatcttacattaaattgtaagactacagtaaaactgcataccgataatgcacaggatgtagaggcaatggaaacggccggacagagtaatccgctcacagaatcagtggatatcaaaggtcagaaaacgttgacggccggaagagatctcgaaccgggaatatatgatctcagccgtgtatcaggggctggaaatgtggatgtaatcatttattcagacgaacaggaagaaataaattcatggagccagtgtctgtcggaagatggaatagacggagagacattccattatctggtaattccggaaaatgcaacaatggaagtgtcagaagacttgaaaataaggcttacaccgtcagaacagattgcatcaacagattattatggcttttataacagataagtttactgaatataaagtataggggaattgataacatcaggaaagaaggagcagaaagatggcaaacaaaatatcagatgagaccatagaatacgttggtattcttgcaaagctggaattatccggtcaggaaaaagaagatgccaaagcagatatggaaaaaatgttagattatatagatactttaaatgaactggatacggatggaatcgagccaatgtcacatgtatttccggtgaagaatgtattccgggaagatgtcgtgacaaatggagacggcagtgcggagacactggcgaatgcaccgttggaaaaagaccagagcttcaaagtaccaaagacgatcggataggaggaaaacggttatggatattacaagtcttacagcagtagagcttggaaagaagatcaaagcaaaagaaatatctgttgtggaagccgtgaaagcctccattgcacagattgaaaaagtagaaaaagatgtaaacagttttgtgacgttggataaagagggcgcattaaaacgcgcagaagaagtacagaaattaattgatgacggaaaactgacagggccattggcaggtgtgccggtagcaatcaaagataacatgtgtacgcaaggaatgctcacaacctgtagttcgaagatcctgggaaacttccggccgatgttcacggcagaagcagtcaagaatctggaagaagcaggagctgtgattctgggtaagacaaacatggatgaatttgccatgggaagtacaaccgagacttcttattacggaccgacaaagaatccatggaacttagagcatgttccgggaggatcttcaggaggaagttgtgcagcggttgcagcagaagaagcaccatatgcacttggatctgacacaggcgggtccatccgtcagccaagttctttctgcggtgtagtcggaatcaaaccaacatatggaacggtatctcgttacggactgatcgcttatggttcttccctggatcagatcgggccggttgcgaaagatgtgacggactgtgcaacaatcttagagacgattgcatcctatgatccaaaggacagtacatcgatcaaacgcgacagctatgattttacatctgcactggtagatgatgtgaagggcatgagaatcggtatcccgaaagattattttggagatggactggacgctgaggtgaaagaaaatattttacaggcagtgaaagtactggaagaaaaaggtgcggttgtagaagaatttgacttaagtcttgtaaaatatgcgatccctgcatattatgtcattgcatcagctgaggcaagctccaaccttgccagattcgatggcgtaaaatacggctatcgtaccgaggaatacgaaggacttcataatatgtataagaaatcccgttccgaaggtttcggaccggaagtaaagagaagaatcatgcttggttcattcgttctgagttccggatattatgatgcgtattatctgaaagcattgaaaacaaaagcgttaattaagaaagcatttgataaagcgtttgaaaaatatgatgtgatcgtggctccggcggctccgacaacagcaccggaacttggaaagagcttaagtgacccgatcaagatgtatctgggagatatttacacgatttccgtcaacctggcaggacttccgggaatcacaatcccggtaggaaaggattccaaaggacttccggtaggtatgcagctgattggaaattgtttcgaagaaaataaaatcattcagaccgcatatacatttgaacagacgaaagtatatgaagcaccagaacttgcaaaggaggacagatagtcatggcaaaacaatatgagacagtcattggacttgaggtccatgtagagcttgcaacaaagacgaagatcttctgcggatgcagcactgcattcggaggagcaccgaatacacatacatgcccggtttgtactggtatgcctggatcacttccggtattaaataaacaagttgtagaatatgcaatgggaatcggccttgcaacacattgcgatattacaagagtgtgcaaattcgaccgtaagaactatttttatccggataacccgcagaactaccagatttcacagctttatcagccaatcgccagaaacggctatgtggagattgcagtaggagatacaaagaaaaaagtccgtatccatgaaatgcatatggaggaagatgccggaaagctggtacatgatgaatgggatgacacatctctggtagactttaaccgaagcggtgtgccgcttgtagagatcgtatccgagccggatatgcgttcatcggaagaagtcattgcatatctggagaaattaagaacgattatccagtatctgggagcatctgattgtaagctccaggaaggttcgatgagagcggatgtcaacttatccgtaagagaagtgggaactcaggaattcggaaccagaactgagatgaagaacctgaactcgttcaaggcaatcgcaagagccattgaaggagagagagaacgtcagatcgaactcatcgaagagggaaaatccgttatccaggagacgagacgatgggatgacaataaagaatcatctcatgccatgcgttccaaagaagatgctcaggattatcgttatttcccggaaccggatcttgtaccagtcgtgatcgatgatgagtggatcgaaaagatcaaagaaaaacagccggaattccgcgatgaaaaactgggacgttataaaaaagaattcgatatcccgcagtatgatgcagaaatactcacagaatccaaacacatggcggatatctttgaagagacgacggcaatctgtgggaaaccgaagaaagtatccaactggctgatggtagaaaccatgcgtctgttaaaagaacacagcatggaaccggaagatatcagcttctcaccggctaatcttgcaaaactgatcgggcttacagaggacggaaccattaacagttccgttgcaaaagaagtattcgaacaggtatttgaaaagaatgtagatccggaaagttacgtagaagagcatggattaaagacagttaatgatgaaggtgcactggaagaagtgttaaaagaagtcattgcaaagaatccaaaagcaatcgccgattacaaaggcggtaaagaaaaagccctcggagcactggtcggacagacgatgaaagcaatgaaaggaaaggcaaatcccggaatggtgaatgagaaattgcgggagatgctaaattaaattgggatttaatttagaaggcatgactacccggacctgcataaaaagtaggaagccgttcctgttcaggttccgtcggtgggaaatactaaagcgtcaaaattatgctaaaaacgggcttccgaaatttgcaactcgccattcggctcaaacaggcaaatttcgaaaacccaacgcataattttgacgcttaactatttccaacaccttcttcacattcactggaacggcttcctactttttattccgtgggtatcgaatgccttacaaattaaatggcaattgcgtaaccgtagtggcttccaccgggttagacttccggcatttcatttattaacatccgcagccagtcacgacttgaaggaaacaatagataaggattattgtgaatgtggaatgccgttagaaacaattagagagtcagaagcaccgttaaaggaacgaagcgaacgtgtttgaggcgaacgccgagtttgagcgtagttcctttgcttttaggtgattctgactctcttagtgtttcttatggtatggaacctgaacaagaagccttatctattgtttccttcatggactgagaggccgcttccccgttaataaattaaatccaaaaaaatgtattgacattatgcagcgcagtgctataattaaaacaaacatatgaataactgttcatatattcaaacaatcaaatgaaaacaggaaaggaagtatttatcatgaaaaaaacttataaaatcgacgtagactgcgcaaactgtgcaaataagatggagcaggcagcgaagaacactgacggagtaaaggatgcaactgtgaattttatgatgttaaagatgatcgtagaatttgaagaaggcgcagatcctaagaaggtaatgaaagaggtacagaagaactgtaaagtagtagaagatgattgtgagatatttctgtaaaggttgggaaaaaatatgacaaaaaagcagaagaaatcgctgaccagaattattattgcagcactacttatgattatattgaagttcttacctgcggaaggatggctgcggttcgtactttatatgatcccgtatcttgttgtgggatatgacattttaaggaaagcattcaaaggaatcctgaataagcaggtattcgatgagaattttctgatggcagttgctaccataggagccattacccttggaaattatacagaaggtgtggcggttatgctcttctatcagattggagaactattccagagctatgcggttggaaagagccgcaggaatatcagtgaactgatggatatccgcccggattatgcgaatattgaaaaagacggagaactggaacaggtggatccggatgaagtggaagttggaactgtcattgtcgttcagccgggagaaaaagttccgatcgatggtgtgatcgaagaaggaagcagtacattgaataccagtgcactgaccggagaaagtgttccgagagaagcagcagccggtgaggaggtcataagtggatgtattaatctgacaggtcttctgaagattcgtacaacaaaagaattcggagaatctacggtatcaaagattctggatctggtggagaattcaagctctaagaagtcaagatcagagaattttatttcaaaatttgccagatattatacaccggcagtctgctacagtgcgcttgcacttgccatcctaccgccactggtaaggatgctggcaatgggactcgcaccggaatggggtgactgggtctatagagcactgaccttcctggttatcagctgcccatgtgcactggtgatcagtattccgctcagtttctttgcaggaattggcggggcgagtcatgaaggtgtgctggtcaaaggatcgaattatctggagacgatggcacggacaaagtatgtggtatttgataagaccggaacgatgacacaaggtgtatttgaggtgagtggagtgcaccacaatacgatgccggaagaacagttattagagtatgcggcacttgcggagtgttcctcatcccatccgatcagtaagagtctccagaaagcatatggaaaacagattcaccgggatcgagtgacagaaattgaagaactgagcggaaaaggtgtgacagcgaaggtcgatggtattccggtggcagccggtaacgcaaaacttatgaaatatctgaatgtggaatacagtgaatgtgaagaaacaggtacaatcgttcacgttgcggtggacggtaagtatgcgggacatatcctgatctcagataaattaaaaccacatgcgaaagaagctgtcagagatctgaaaaaagcaggcatcaccaagactgtaatgctgaccggtgatatgaaacgagtggcagataaggtcgcaaaagagttgggaatcggcgaagtatacagtgaactccttccggcagataaggttgcgaaagtagaggaacttctggaacagaaatcagagaaagaaaagctggcattcgtcggagacggaatcaatgatgcaccggtattgtcaagggcagatatcggaattgccatgggagcgcttggatcagatgcagcgattgaggcggcagatgttgtcctgatggatgatgatccgaagaagatcgcaaaagcaatcaggatttccagaaaatgtatgcgtatcgtatatgaaaatatatactttgcacttggaatcaaggcagtctgcctgatcctcggagcacttggaattgcaaatatgtggatggcaatctttgcagatgtcggtgtcatggttattgccgtattgaatgcaatccgtgcattattcgtaaaacacttatagaaaaggctggtgggcagatggcaaaaatagaagaaggaatggaagtatgtgactcatgtgaggtacatgagaatcttctgaagatcgtaaatgaaaagatgccggaagaaacggaattatatgatcttgcggagctgttcaaggtattcggtgattcgaccagaatgcgtatcctgttcgtgttatttgaagcagaggtgtgcgtgtgcgatcttgcagaggcactgaatatgacacagtctgcgatatcacatcagcttaggattctgaaacagaacaaactggtcaagagcagaagagagggaaaatccgtgttctattcactggcagacgatcatgtgcgtacaattgtggatcaaggaagagaacatatagaagaagatttatattgaaaagaagaaaactgtatcagacgataaaaagtctgatacggtttttttatatctccaatatacaagagaaacttttggaattgtagatgaattagactaaagtatgaaaaacagtctatttacttttaaattatcagaaattaataaaaaatataataaaatgcatttgatattacattttattatatttgtataaaaaaacttaatatttcccattgacaatttaataaccatcttttacactatggttacaaggtattcatttctaattaatttcgatatttgaatggaggtttgagttatggaacagaaacaagaaaaatttagtaccataggttacatagccgccgcgttaggtatgtgtattggtaccggtaatgtatggcggtttccgcgagtgtgtgcggcgaacggaggaggagcatttatcatagcatggacgattgcaatgctgatctttgctgtaccgcttctttctacagagatggcattcggtaaaaagacgagacttggatgtatcggtacattccgtgatgccggtggaaagaagtatacatggatgggattctttgttgcagcagtatgtttcttcctgatgagttattattgtgtacttcagggatattgtttgaaatacgcagttaattctgttacttcagcatttaaaccgaatctgtcaacagagacgacatcggcaatgtggacagcatttacagattcacaggcacaggttattttattccatgcgatcggatttgcacttgcatgtttcatcgtttatcagggaattgcaggtggaattgaaaaattctgtaaagtagcgataccggcactgtttatcatccttgtaggattagcaatttacgcagttacattaaatggagcaaatcagggacttcagtatctctttactgttaagaaagagtatattttaagcccgaatacatggattcaggcattcatccaggcagcatggagcaccggagccggatggggattcattattacatatgcgaactacgtaggagaagaggaagatgttccgacaagctgtctgatcatgggacttggtgataaccttggagcaatcctctcggcactggtagttatcccggcaatctgcgcactttcagctacaccggaagcagcgaatgaagcactcagtcagggaaacttcggacttacatttatttacatttatcagttatttacaacaatcccgggcggaagattcatttcctttatcttctttggattacttgcaattgcagcaatcacatcactgttctctatgatcgaagttggagtaaaatgtgttgttgaccttggattgccgcggaagaaagcggttgtcagtgtctgcttcgcaggattcttagtaggatgcttctcatgctggtcactggttaacattgataatcaggactgggtatggggaatcggacttctggtaagcggtgcctttattgcaatcctggcatggaaatatggtgtggaaaaattacgtacacaggaagtaaatgcaaaaggtgcagatgtacatcttccaaaagcatattataccggatgtatgtatctgataccggttctggtagtgatcatggtagtttactggttattacagacaaaagaatggttcccggatacatggctgaatccgtttattatacaggataatacaggaactgtattacttcagttcggagtagtgatcattgtaggtcttgcactttccaggttctttaatacaaagactgcaaagggagctatgaaagataacaaagctgcaaaataatagaaagaaggtatgaactatgacgatggatgcaattattatgatggtgattacactggttggatatattggcggatttagttatttcatgatacgtgtatttaaaaaagaaagaagtaaatccaaagagtaggtatcgaacggagaatgaataaaggatagtatggtaaattagacgacgttctgattgaaatgaatacatatcgaaaaggagcggagccgggattttgtcaggagtgacaggattccggctccgctcctttttatgcatgtgtattagatgccaagtgcggcatggtattcatctttattaaagccgggaaatattgttcatatccacggctgattcatttttttaataccatctcgtcataggaagattattattaattccctttgtcattaaaatctgatggatatcaataattccgttatggaaggtagcggcacatgcagagaggtacatatcccacatccttaagaaacgttcatcaaacattgtatgcgcttcttcaatatgatccttgaagtttttctcccagcagagaagcgtacggttatagtgaagacgtaagtcctcgatatcctgggtatggaagttatcttctgtcatgcagttcatgacttcacgaagactgggaacagatccgcccgggaagatgtatttcttgatccatggatcaccaggatgctcttttaatgcactgatgaagtggagcaggaacagaccgccgtctttcatgaccttgctgacacagtctaagtataactgataattctcacggccgacatgttcgagcataccgacgctgacaacgcggtcatacatcttgccgtcagaaggaagatcacggtagtccattagcttgacttccagatagtcggacaatccttcctctttgatacgtttctggcattctttgtattgttcttcacttaaggtgatgccggtacctttaattttatatttcttagcagcttcaatcagaaggaatccccagccgcatccgatatcaagaagagtcataccttctttcagatataacttttcaagaatgtaatcaactttattcttctgcgcctgatacagggtatcatcttcatgtttgaaatatccgcaggaataactcattgtttcatcgagccagagtttgtagaagtcatttccgatatcgtaatgactgctgacttcttttttctggtttttctttgatgaagatgggaacatgatagatttcaaatgatgttcatcagttgaaaatttacccatctgaccaagaaggttatcaagtgcctgataaaggtttccctcaatatcaagatcaccatccatgtaagcttctccaagtgcaagagaagtactggtgaccagatcctttaatgggatgacctttttgaaatttacggtaaatgtaggtgcgccttcgccgatcagatgttcgtgtccattaattttgaccaggaaagggtgttcatcgaatttttttaagaatgttatcatagcctgttcttccagcataatataacctccagttctgctatcattatttccttcagcaagaattatattccttataaattttgaaagtcaaataaaatagacattttttaaaaattgtattggaactaccaataaatgaaaacatatatcaagaacgcatatattccttgacttatgtgataataagaggtaaaatacatataccccgtaagggtatgaatatgaaaggagtatgcttatggaagacaagaatacagataatatggaaaacaaatcagaaaaagaatgctgttgtcactcgtccaagcatcgttcggataaagaatacaaggatctgatgaatcgtctgagccggattgagggtcaggtacgcggcatcaaaggaatgctggaaaaggacgcttattgtccggagattctggtacaggtatcagcggtgaatgcggcactgaacagctttaataaagtattgctggcgaatcacatccgtacctgtgtggcagatgacatccgggacggaaaagatgagacggttgatgaactggtaaaggtgttacagaagctgatgcggtaagtaaagtttatagatgtatagtctgctcggaaagcattttctgagtttactataaaggaataagaaaaataataatgacaggagggaacagacaacaatggaacaatatatagtaaccgggatgagctgtgcagcctgcagtgcaagagtcgaaaaagcagttttgaaagtgccgggtgtaacatcctgctcggtaagtctgcttaccaactctatgggagtagagggaactgcaagtgaacaggagatcattaaggcagtcgcagatgccggatacggagcatcgaaaaaaggagaaggagcggcaaagacacagtcgtcatcagcatctgccggagaagatatgttaaaagacagaacgacaccggcattaaagaagcgtctgattgcatcacttggattcctgatcgtcctgatgtatttctccatgggacatatgatgtggggatggccggtcccgggattcatgaaagacaatcatgtaatgatgggactattacagatgcttctgacgattacagtcatggtgatcaaccagaagtttttcatcagtggattcaaaggactgatccacagagcaccgaatatggataccctggtggcacttggatccggagcgtcttttgtatacagtacgtatgcactgtttgcaatgacagatgcgcagatgcatggggatatggatgcagtaatgtcttatatgcatgatttttattttgaatcagcagctatgatccttgcactgatcacggtcggaaagatgctggaggcaagatcaaaaggaaagacgaccgacgcattaaaaggattgatgaagcttgcgccaaagacagcggttgtgatccgtgctggaaaagaagttcaggtatcgattgaacaggtacaaaagggagactgctttgttgtaaagccgggagagaatattccggttgacggagaagtcatagaaggaaacagtgcggtcaatgaatctgctcttacaggtgaaagtattccggtagataaggctgtcggtgataaggtatcggccgcaactgtaaatcagtccggatatctgaagtgccgtgcgaccagagtcggcgaagatacgacactttcactgatcatccagatggtaagtgatgcggctgcaacaaaagcaccgatcgcaaagattgcggaccgtgtatccggagtatttgtgccaacggttatcacgattgcagtgatcacaattattgtatggctgatcgcaggacagagtattggctttgcattatccagaggaattgcggtgctggtgatcagctgtccatgtgcgctcggacttgcaacaccggtagcaattatggtcggaaatggaatgggcgccagaaatggtattatgttcaagacagcagtttcgctggaagagactggaaagatgcaaattgttgcgctggataagactggtacgatcacaagtggagaaccgaaagtgacagatatcattccggcagcgggagtgacagaagataccttattaaaatgtgcgtatgcactggagaataagagtgaacatccactggcaagagcaattcttgaaaatgcaaaagaggaaaatgccgacatcgaagaagttaccggattccaggctcttccgggtaacggtctgacagccatactggatgagcatacattatatggaggaaatcatacatttatcagcagtaaggtatccgttgatggagatatgcagaagaaagcagagaaacttgccgaagcaggtaagacaccattattcttcggaaatgaagaccgtttattaggtgtaatcgcagtggcggatgtcatcaaagaagacagcccgcaggcgatcaaagaattacagaacatgggaatccatgtagtcatgctgaccggagataacgaacgtactgcaaaagccatcgggcagcaggccggagtggatgaagtgattgcaggcgtacttccggaaggaaaagagcaggtgatctgtaagctgaaagaaaaaggaaaagttgcgatggtcggagacggtatcaacgatgcgccggcacttacaagagccgatatgggtattgcgatcggagccggaacggatgttgcgatcgatgcggcagatgttgttctgatgaagagccggttaagtgatgtgccggcagcaatccgcatgagccgtgcgacactccgtaatattcatgagaacctgttctgggcattcttctataatattatcggaatcccgcttgcggctggtgtatggtatccgctgttcgggtggaaattaaatccgatgttcggtgcggcagccatgagtttatcaagcttctgcgtagtatcgaacgcattgagattgaatctttttaagatgtatgatgcatcaaaagataaaaaattaaaagccaaaaaagaaaaaaagagatccaagaaggaggacaagacaatgaaaaaaataatgcatattgagggaatgatgtgtggacactgtgaggcagccgtaaagaaagcactggaagcacttccacaggtagatgaagcggttgtaagtcatgaggcaggaacagcagagctgacattaaatgcagagatcacagatgatgtgctgaagaagacagtagaagacaaggattatacagtgacatctgtggaataatctatgatttcttatatacagagtatactttttatttgaagcatccaaagaacactgctatacttaattataagtatcataacgaggaaggaacgaaagttaatgagaaagagtggaatgttaatgccggtctctgcacttccgggggcatatggaatcggatgtttttcaaaagaagcgtatgaatttgtagatatattaaaagaagcaggacagaaattgtggcagatcctgccgcttggacagacgggatacggcgattcaccgtatcagtctttttcaacatttgcggggaacccgtattttatcgatctggagacgctgatcgaggatgaacttctgacgaaagaagagtgtgaccaggcagatttcggagagaatgaagaagaaatcgattatgagaaaatatataatgcaagatttaaagtcttaaagcttgcatataaaagagccaaaaagaacggattgatggaaagtaaggcataccgtacttatctggaagaagaaaaagcatggcttgcggattatgcattgtatatggcagtgaaagattcatttgacggaaaaagctgggatcagtgggaggaagacatcaggctgcgtaagccggaagcaattgtggcatatcaggaacaattaagtgcagagattgatttttatgaatttctgcagtatttgttcgccggacagtgggccggactgaaaacatatgccaatgaacaaggcattgagattatcggggatatcccgatctatgtagcatttgacagtgcagatacctgggcgaatccgaagctgttccagttagatgaagagaatctgccggttgcggtagcgggatgtccgccggatgcattttcggcaaccgggcagctgtggggaaatccattgtatgcatgggattaccataagaagacaggctatgactggtggatgaagcgggtggcctgctgctttaaattgtatgacatcatccgtatcgatcatttccggggatttgatgaatattatgcaatcccatatggagatgagacggcagagaatggtgagtggatgccgggaccgggcatggatctgttccttaagatgaaggaaacattaggtgaccttccgatcattgcggaagatctgggattcctgacggatacggtgagacaattgttaaaagacagtggttatccgggaatgaaagtactggaattcgcatttgtggcaggagaggacagtgattatcttccgcataattatgataaaaactgtgtagtctatacgggaacccacgataacgatacccttcagggatggtatcagacactttccgaagaagataaagagatgacaaaggaatatctgaataatccatacactccggatgaagaagtacactgggatttcataagtctggcgatgagaagtgtggcagatacgtgcatcattccggtgcaggattatctgggacttggcaataaggcaagaattaatatgccatctacacttggcggtaactggatgtggagaatgaaaaaaggcgcatttacagatgaattgatcaagaagatcagaaaaatgacagaagtctgcgcaagataaacataacaggaaacaaaaagaaaacacaatattcaaacgaaggattctctgagaagggaatggaaagggtttggatattgtgtttttcttttcattctgtataagcaaaaagttctgatttttcataaaagtataatttttgacataaaacatataattttttgcataacagatatgatttttggtaaagaaaaagtataaaaaattatagaatgagactgtaatatgttaagatggtattaataaaaggtatgaggtgtactatggggttgttaaaactggtgatcgtagatgatgagccgatcctgctggagggtctggtgaagacgtatgactggaacggtatgggatatgaggtggttggttttgcgcagagcggagagcaggcgttaaaggtaatacgcgaaaaaaaaccacacgtagtactgacagatatcaggatgaaacagatttccggacttatggtaatggaagaaatcaagaaagagaacccggagtgtcagtttgtggtattaagtgcatacagggattttgaatatgcgaagaaggcatgtgatctgggggcattcgcatatcttctgaagccgattgaagatgaaaaattacaggcgacgatgacagatgtcggtaaaatctgtgaagatcagatcagaaatgaggaaaagtatgaccgctgggagagacttctgaaaaaggacggagatggatttttgcaggttgtcgtgcaaaaatatgtccagaaccggctgccggaagaaaaagtagatgaagtcttccatacgctgcaggatgtcatgaaggaaggagaccggtttattacagtatatgcagatcttgatctggcctataagattaccaatgaactggaatatgaagcctcgagattttccatggttagaatgattgaagaaaagatcgcagagagattcacatactggaaattcgaaagtgaagaaggacatcgtacatttattataaagacgcaggagaacacagcggtacatgagctgaaagaactactggaagaggtaaaaaaagaagagaacagcccggttattgcagcaatatccaaaccatataaagggatccgcggaatcagaagaagtttcgaagaagcgcagagattgttcgctgttacaaatgcatccggagcgggagtatttacaatcccggagactgttgaagaaaaagaggaaagcccatatccggcggaggcagagatgatggtggtcaacagcgtgcggaagaacgacgctgtacagttaaagcaggcatttgtacattttatttaccaactgccacacagagaagaactgcaatgccagtatatgcacaagatcatggtaaagacagaattcatgttaaaagacagttacgggatggacgaatcactgaaccagcaatttgaaaattattattcgaatatgagaaacttaaaggcggcaaaagcggtggatgtctgttacaagattctgggaactgctattgaaaaaagactgaaaaatgtagagaagaaagagaataagggatcaaaagaatatattgcagcggctgtggcatatatagatgaacatctggataatgaagatctttcgattgtatcagtggcgacacatgtatatctgaatccggtatattttggacgggtattcaagaatacctttcatatgacattcaaacaatatctgttgcagcgtagaatggagctggcaaagagactgctggaagacggaagaaccagcatcggtaatatctgcgagcaggtcggaatcagtaatccatcctatttttcacatttgtttaaagaatatacaggacagcttccgagagattacaaaagggaatatgaagtatgaaaaaaagtaaaatgtcaggaatccagaaaaagtatctgaagtatatgtgtacgcttctgatactggcactggttctttccagcatctgtgtatggacttatgtcagacggaatatgacagatgtgattgtggataagtatgaattcatgaatgagaagatggggatagccctggataatctctaccggaagacggatgccgtaacagcagagatcatcctggaaaatgatgtgcagaagagtctgaagaataaagaactgcaggaagtagagaagaatacactgagcaaatattttgcatatatagatctgaatcatgtcgctgattactgctacattgataataaaaaaaatgtttacgcaaaatcctattcccagattggttattcggattttcaaagcagtggtctgcgtgaaaaaatgggggatgagtatgcgaagacgcagtggatctggacccgggattacctgtttggtacgggggacgaagctttgtttatcggaagatatgtgaacagtatggattatgcacatgagcctggaatcgtgtatctgaagatgaatcaacagtttctggaaaatgtgatggataaagataagaagattgcaaaagatgttgcggtgggaatcataagcccggaaggaaagacctgtatccagcaggatccggaagatttcaatatcggaaaaaagacaatgaagaagattacggaactgaccagaacgaaaaaatccggcgtgatcgtgcaaggaaaaaagatagaaggcgggattttacaggcataccggcaggcagagacagggatggtgatctttacactggttccggatgcgatattgaatcagggactgacgcagatattgatcgtattactcactatctatgcggtgatcgcggtgctggcgtttgtattaagtctttatgcatcaaagacatttacccggccgatcagacagatcagtgatgccatgacaagttttgatggaaatgattttacacataccattcagatccatacggacacagaactggataagatcgggcatgcctataacgagatgttaaagaatatcgaagagttccagaacgaggtcaagaatcagcagaaagaactaagaatcagtgagatgaatacgctgatcagccagatcaatccgcattttctctataataccctggataccatctatatgctggcgcggatcaacggggaagaaaagacgatgaagatgatacaggcactgtcaaagtatctgcgcctgtcactgagcaaaggccgtgagattgtgacggtagaagatgaactggaaaatgtaaaaagttatatggagatccagcagatccgcaatgagaatctgttccattatgagatcgaatgtggagaagagctgaaaacaaggtggatattaaagctgatcttacagccgattgtggaaaatgcagtcaaatatggattttgtgatatcttcgaaggcggtctgataaggatcagtgtcactgaacaggccggacagcttacattcagtgtctataataacggaactccgatggaagagcagatggcggagaagttaaacggactgtcagagataccggtgtcaaaaatgaaagacagttttgaagaaaaaaaacatggttatggtgtgataaatattattacgcgactgcggttaaagtatggggaggatgtgagatttttctatgaatcggatacaaatggaaccgtctgtgttatccagatcccggatgatgggaaagaaaacagtgaacagtagacggattatggcagcagtgatggtgatcgtcttgctggcagcactgaccggctgtgtgggaaaagaggatacacagaccagaaaaaagaataaagtagtagagatcccaatgatccttaccgtagattccagtaccggtaataagaatgaagaggaagtggtggagcggttcaacagggcatacaaaggaaagtatcatatagatgtggactgggtgatggagacggaggaagaataccggaagaatctgaaacgtatgaatgtgacagatgaattaccggctattatcactgatctgcgcatgcttccgtctttctatcagatgatgatcaggaaaggcaggattgaggatctcacgccgtacattaacgaagatcaggaatggaaagatatgatcgaaccgtcagtaatggaatcggtccgggaagaggatggaaaaatttatctgggtccggtcagcacggcggcattcgcctgctcaggggttttctggaaccgggagttatatgaacgggcaggaatcagcagattccctgagacatgggaagaattctggaaatgttgtgagaaactaaaagcagcagggatcacgccgcttgccctgcatacggaaggaacggcatgggccccaatgctgcttgcaacggcagaagtagcaggaagtgaagaaggtgcggcattcatgaagcaattatatccggatacctatcagaatgagccggggcttaagatagccggtacattaaaaaaattattccaatatacgacccaggatgcgttacataatgattttgacatagcttatgataatttcgtggcagaaaatgcagcaatgatccccaatggttactggatgattgatcagattccggatgaaatgcagaaaaaagtatgtttttctacatttcctgaaaataaactgataggatcgccggagacgttcggctgggcagttgtatcaacttatagtgaaaaagtaaaaaaaggcgcagttgagttcctcaaattcagaacgaaattgaataaagaacagaaagaagaattgctgaacagcaggacaagacaggaaggaacgctgttggatgattatctgaaggcttatacgggaaatccacagatcgtaccgaattatcaggtgaagtggaattcactgctgcaggaggatgtactgggagaatgtctggcggacctggtacagggaaagataacggagcaggaattcacgcaggcagaagacgaaagcatccggcagtttgaagacgaacaatagatatgtttttttgtatatcaggttgttttattgatacagggtttgagcgcatttctgttaatataatgacaacaagagaaacgaaggtttcaaaaaaagaaaggcgagggaaatgaattatgaaaatgcgtaaagttgtatcagcaatgctggtagcagccatggcaacaggaatggttgcaggatgtggaagctcttctgacagcaagtcagacaagaaagacgcaaaaggaaaagtatactacttaaacttcaaaccagaacaggatgagcagtggcaggatctggcaaaagagtatacaaaagaaacaggagtggatgtaacagtacttacagcagcatccggagaatacgaaaagacattaaaatctgagatggctaagagcaatgctccgacactgttccaggtaaacggaccggttggacttgcaagctggaaagattactgctacgatctgaaagattctgatgttgcaaaacagctgacaagtgatgatttcgcactgatggacggcgacaagatgtcaggaatcgcatacgtaatagaaagctacggaatcatttacaacaaagaactgttaaagaaagcaggatactcagctgatgatatcactaactttgacagcttcaagaaagttgtagaagatatcacagcaaataaggacaaacttggattctcagcatttacatccgctggtatggacggatcatctgactggagattcaaaactcatctggcaaaccttccaatctactatgaatacaaagatgaaggaatcgataacacagatgctatcaaaggaacataccttgataactaccgtcagatctgggatctctacatcaacaatgctacctgcaaaccaacagaactttctacaaagacagctgacgatgcaacagcagatttcgtaacaggtgatgcagtattctaccagaatggtacatgggaatataacaacatcaaagacgtcggagatgacaatcttggaatccttccaatctacatcggtgtagaaggcgaagaagatcagggaatctgtacaggtacagagaactactggtgtgtaaactccaaagcatctgaagacgacattcaggcaacacttgatttcatgaactggtgtgtaacatctgatgatggtgtaaaggcaatgtgcaaagacatgggattcacaattccatttaagaagaacatgaaatcagacaacgtacttgttaacgaagcaaacaaatatacagaagacggaaagactcctgtatcttggaacttctcaacaatgccatcagaagagtggaagaacggagtgggttctgcactgacaagttacgcagcagatccgacagatgcaaactgggcaaaagttacaacagcattcgttgacggatgggcaaaagaagctgcagcagcaaaataaaaatgtaacaatcaaaatagttgtatgaagtgagtagtggcgggtggttgcaagaaacacccgccgcttttatgaaaaagtgcagggaaatgaagcggagattctctgcatggaaggaggaatttattatggaaaaatccatcaaacgttatatgccgattttcgtgcttccaacgttttttgcatttattcttggctttatcgttccttttattatgggaatctggctttcattttgtaaatttacaaccgtaacagacgcgaaattcgtaggattttcaaattacgtagaagcactgaaagatacggcattccgtcattcattctggtatacggtactgttcgcgattgcatctcttctgatcattaacatcatagcatttgcacttgcaatggcactgacaaaagaaatgcacggaacaaatgtcttccgtacgatcttcttcatgccgaacctgatcggtggtatcgtacttggatatatctggcagctgatctttaacggagtcctttccagatatggtaccgcacttgctctgaatgagtggtatggcttctgggggctgatcattctggtcagctggcagcagatcggttatatgatgatcatctatatcgctggtcttcagtccattcctggtgatgtcattgaagcagcagagattgacggagcaaataagatccagacattattcaaggtaacaatcccgatgatgatgccatcgatcacgatctgtatgttcctgtcaattacaaacggattcaagttattcgatcagaacctgtccctgacagccggtgaaccgtctaagatgtctgagatgatggcgcttaatatcttcaatacgttctacgggcgtaccggatgggaaggagtcggacaggcgaaggcagtcatcttctttgcaatcgtagttgtgatcggtatgatccagttacgtgcaacacgttctaaggaggtacagcagtaatgaagaaaaagacaagtaaattaagctggtttggaacaggtgcatttgcgatcatcggtattgtatatatcatgccgatcctgatcgtgctgatcaactcattcaaaaataaagtatttatcaacaaagaaccattcaaacttccgacaaagcagacatgggtaggaatcgataacttcctgtccgcaattgacaaatatgaactgctgagtgcagtcggctggactgtatttatcacagtttgttccgtacttgtgatccttgtatgtacttctatgtgtgcatggtatattacaagagtaaacagtaagtttacaaaactgttatatttactctgtgtattttccatggttgttccgttccagatggttatgttcaccttatcgctggtagctgaccgtacaggacttcgtacaccttggggaatcatcatcatttacctcggatttggtgcaggtctggcagtattcatgttctgcggatttgtaaaatccattccactggaaattgaggaagcagcaatgatcgacggatgtacaccacttcgaacctttttctccgttgtacttccgatcatgaagccgacatacatttccgtaggaatcctggagacgatgtggatctggaatgacttcctgcttccatacctggtactggatctgaataagtataagacaatctcaattgcgatccagtatatgaagggaagttacggacgtgtagatatgggtgcggttatggcagcgctgatcctggcggtaattccggtagtcatcttctatctggcttgtcagaagcatattatcaaaggtgttgcagccggagctgtaaaaggatagttggtgtttcgtttatcatgttggatagccggacctgaataaaaataaataaagtcttcctgtgctgaatgcgaatgcactggaaggctttatttttttgtgtgtatcgaatgaggaagagttgatgaatgaaatggagggtgtaagcttgggtgtttacagatccggtatcgcaggtatatccatttgttctggtggtgctgctgcaggggattggtgtaaaagtgattgagtggcatacaatcagaaaggtgaaaggaaagcatgaaagaaatcttaaaggtaaataatctgatcaaaaaattttcaaaagccggcagggagatggagaagttctaaataatcgtaagaaaaagttgattgactgtcacatacatgataatatactgatagggaaactaaagccgggcggctaagtctttgttataagattttcaagagtaaataaaaatagccgccaactactgggaatagttgacggactgttgaaataaatagttttaacttataccgggtagccgcttgcggtttccctcttgttatttttaatatagcatatttgataattgtatgcaagtgtgggattaaaaacatcatacagtttttgtgttatagtttacgatcacacaggcagcagaagggagcagacagaagatgaattctaatttcgaatattacaaaatattttattacgtagcaaagtatgagaatcttaccaaggcagcgacggcactgaagaccagccagccggcagtcacacgtaccattcataagctggaaggtgaactgggatgccggttatttaccagaagtaaaaccggtatgaagctgacaccggagggacggacattctatggttacgtggcggccggatgcgcccagtttttcaaaggggagaatgaccttagcaatcttatttccctggaaaatggtacgatctatatcagtgcgacggagactgctcttcactgttatctgtttcaggcgatggaagaattcaacagtctgtatccgaatgtaagattcaagattctgaataacagtacgacagaatctgtcaatgcagtgaaagaaggaaaggtggatctcgcttttgtatcggctaatcttcaggtagcgaagccgcttcggatgaagatattgagaaaatacagggatatactgatcgccggaatgcgatttgaagaattgaaagcggggaaagaggagttatcgcttaaggaactggtgtcgtatccatggattagtctgacggcagagacgatcacgcgccgttttttaaatgaatattttgaaaagaatggtctgacatttgcaccggatatggagcttgcgacgacggatatgatacttccggcagtaagacataatctgggactgggattcatcccggcggaatttgcggatgcggaacttaagtccggacaggtatttgaaatcaaggtaaaagaaaaactgccggaacgtaatatcatattgatttacgatatggaatatccgcagagtatcgcagcaaaggagttccagaaattcctgaaagagaagggcaattaatctgccaattataagaaatgagaaatataataaaaacccggaagcttacacaaattcggatgatcataacgatctgacaaagataaaaggtatcgaattggagtaaaatatggtaagctttcgggctttttattaaaacaaactaattagtaggaatttttatttatgccactcccagttacggatctcttcaagatcctgtccgtattcggcaatgtactgtttgtgctctaccagcttgtcgttcatcttctggatcaggaaggatcccttgttgccaagctgtggcaagtgcatgattgcatcttttaccaggttgaaacggtcgatctgattctgtacacgcatatcgaatggtgtagtgatcgttccttcttcctgatatccatgaacagaaatgttatggttgttacgttcatatgtaagttcatggatcagtgtcggatatccgtggaatgcgaagattaccggtttatcctttgtaaagattgcatcgtattctgcatcacttaatccgtgaggatgtttgtggtctgattcgagcttgaacaggtcaactacgttaacaacacggatcttaaggtctggcatctcatcacgaaggatggtaactgcagccattgtttccagtgtaggtgtatcaccacagcaagccataacaacatccggctcttcaccacagtcgttacttgcccactcccagataccgataccctgtgtacagtgcttaacagcctgttccatagataaccactggcagcttggatgcttagatgctacgatcgcatttacatagttcttactcttgatacagtgatcgaagcaagaaagtaagcagtttgtatccggtgggagatacatgcggacaacatctgctttcttattagcaatgtgatccaggaatcccgggtcctgatgtgtgaatccgttgtgatcctgctgccatacatttgatgtcagaatgaagttaagagaagcaattggctgtctccatgaaagctggttgcatacttttaaccattttgcatgctgagctgccatagagtcaacgatacggatgaatgcttcgtaacttgcgaagaatccgtgacgtcctgttaacagataaccttccagccatccttcacacatatgctcacttaacataccatccatgatacgtccgtttcttgcaagacaatcgtctgtgtcaagaagtccggcattccagtcacggttctgtgtttcaaatactttgtataaacggttagacatactttcgtcaggtccgaagatacggaagttcttgttctcttcgtttaattcgaagatgtcacggatatatccgccaagttcgatcatatcctgagcctttgtcttacctggttcaacttcgattccataagaacggaaatcaggaagtcttaagtcttttaataataaaccaccatttgcatgtgggttagctccgagacgggcatctcccttaggtgcaagttctgcaagttctgggatcaggcgtccgttttcgtcgaagagttcttccggatgatagctttccaaccactcttttaagagctccagatgttccggactttccattgtaagtggtacctggtgtgcacggaaagatccttcaatctgctgaccgtctacaacctttggtccggtccatccctttggagtacgaagaacgatcattggccacatcggacgttctggatcgttgttctcacgtgcatttttctggattgccttgatctcttcgataacagtatccattgtctctgccatcttcttgtgcatggtcatcggatcgtcaccttctacgaagtaaggtttccaaccgcatcctttgaagaagttttccacttcctcatgtgaaatacgtgagaagattgtagggttactgatcttatatccatttaaatgaagaattggaagtacagcaccgtctgtaaccgggttcaggaatttgttagactgccatgaagtagctaacggtccggtctcagcttcaccatcaccgacaacaactgttgcgatcagatccgggttgtcgaatacagcaccgaatgcatgtgcgatagaatatccaagctctccaccttcgttgatagatccaggtgtctctggtgcacagtgactcggaactccacatgggaatgagaactgcttgaacatcttcttcataccttcttcatcctggctgatgttcggatatacttcgctgtaagaaccttccagatatgtattggcaattaagaagtttccgccatgtccaggacctgataataagatcatatccagatcataacgtttgatctcacggttgcagtgtacatagataaagttctgtcctgggacagttccccagtgcccaacgattttcttcttgatctgatccattgtaagtggttcttttaataatggattgtcaagaaggtataactgaccggctgacagatagttggcagcacgccagtaggcattcatcttttcaagcatttcctgggataacggctgtttctcaagacatgtttttgtgtcttccatattcatacctctttcttaaaaataattttttgtgttatttttttaaccatctgtaggataacacaatgaaaagtgtgcgtaaaatagcaattatgcattgcaaatataagtttttggtatggatggaggaaaagactgggctggcagattgacccggtaggagtgcgttatgcgctggttacattatatgaacattatgaagtaccattatttatagtagaaaatggtttaggagcagttgatatcttgaaaaaagatcatacttgtgatgatgattaccgtattgcatacctgaaagaatattgctatttataagattaaatacaacttaggttgctgctttgtaaaaataatacaagtaagtgtaaaataaaagttgtattgtactataaagaaagtacgaaagaaatgaagaaaaatgcacaaaaaattcattctttgttcataattattgaaaccaagactgtcaaaacgcacaaaaaacggttttaacagatgaaaacgccatgaaaagtgctatgagacagtacaactttgttaaagaaaatggttgtattttattgcaaaacgataccagttaagtatataatctaatcatcaaataaatacagaaaacggaggaaacattatgaagagagttctcaaaaaagtaacagcagctcttttggcagcaacaatggtagtcggacttgctgcatgcggaaacggtggaagttctgatgacaagagcagcaagagcagtaaatcaggaaaggttaaaatcggagtttctatctggtcttcaacagacgtacttggatcacagtgtaaaaagatgctggatgcagcagcaaaagcactggatgtagatgttcagtatgttgaccagggacatgtatctgagaaagttacagcttctgtagagcagttagcagcagcaggatgtcagggaatcatcatctgtaactcatctgatacagagatgacatcagcaatcaagacatgtaatgataataaagtatatcttgcacagttcttccgtgtaatcagcaaagaaaacagtgcagatatctataaagcagcaaaagattccgcttactacatcggagcagttcatgaagatgagcctgcaaacggtgaagaacttgttaagatccttcttgacaaaggtgatcgtaacatcggtctgatcggctgggagcagggagatgctacatggctcggaagatgggaaggttacaaagccggagttgaaaaatggaacaaagaaaacccagacgacaaagcaaaactttctgagccacagtacgctggtacaacttcagaaggtggatcaaaagccgctgaagctttaatggcagcagatcctaagcttgatgcattgatcccagctggtggtggtggagatccacttcagggagcaatcgcagcagttgaacgagcaggaaagactcaggatatcgatatcgtttctacagacttccttccagaccttggagaaagacttcagaacggatcaatggccggtgaatccggtggacacttctgtgacccactgatcgcattcatgatggtttacaatgcagtcaaaggtaactacaaagacttcgctggtaaattcgaagatgttccattcccatacctgtatgtatcatcagcagatgactatgcagcatatgagaaatatttcgtagatcagcttccatacacagacgatgaattagtagctatgtctaaagaaagtctgaaagagctgaaagcaactgcagcaagcgtatctatcgctgatgcagaaagccgttctggcaaataaaccggacgcaagataacagaaaatgatttggggagggtgacgtcgcaagaaaggcgatgccaccttcccttttaaaaagatgattaagaagaggtagataatatgggcactactaaaaaactctcaggaaagacaatgggatatgtaatcctgatcggtcttgtaattgtttcctgggcaatctttaaaatattgacaccacataacttcggctcattttccaatatgctcaattactttcaggccagtctgattgccactgttggtgcggttggtttctatttcgtaatggtaatgggaatgttcgatttctctattggtgcaaacatcatgctttccgcaatcgttggatgcgtattggcaacaagattcaacttaggatatttcggactgatcgtcggaggtattcttacaggtacaatcgttggtttattaaacggaattttctatgtaaaattaagaattccatctatgatcgttacaacaggtctggcacttatctatgagtcgctggcaaactacatggcaggtggtgtggaacagacacttccggcacacttaagagcattcggacgtatgccatgggatatcatccttgcattggtagcatgcgttgttgcttacatattcttaaactacactaaaatcggaacttatacttatgcaatcggaagtgacgagttcgttgctaagaacatgggtattaatgttaataaatacaaggtacttgcattcatcttaagtggtgcgttccttggagtaatggcaattctgacaatcagttatggttcttcaatggtagcggttaccggtatggcatctatgagccgaaacttcgtaccgacaatgggatgcttcttcggtctggcatttaagaaatatggtatgccgctgcaggctattatcatcggtgaattcgtaatcaatattattttcttcggtttcatcgcacttggtgctcctacagcgatccaggacgttattacaggatttgcactgctgattatcgttactctgacaacaaaggttacaaaaggcgagattgtcaagtaatagaaggaggaagacagcaatgagtgaagtgagattacaggtaaaacatgtttctaaaaacttcggtatcacgaaggcattgaaagatgtgtcatttaatatcaataaaggtgaggttcacgcactgatcggtgaaaatggatccggtaaatcaacaatgacaaatatgttgacaggaatctatacactggaaagtggacagttcattctggatggaaaagaagttcatccgaagaaccaggtagaagcaaatgaagaaggtatttctatcatcgtacaggaacttggaactctttccggactgacggtagcagagaatatcttccttggacatgaagatcagttcgttcatctggggattaagaataccgcagcaatgaacaaaaaagcaaatgagcttttacaatcctatggatttgataagatcaaagcaggagatatgattgatgattataatttcgaagaccgtaaactggttgagattgtaaaagctacatattttaatcctaagatcgtcgttgtcgatgagacgacaactgctctttcgcaggaaggacgtgaagaactgtacaaacagatgaatcgtgtccgtgacaatggaaatacggttatctttatttcccatgaccttccggaaattcttgacaaatccgatacaatcacaatcctccgggatggtgtatatatcgatacggttaagagtgcagatgtgaacgaagatgatctgaagaagctgatggttggacgtgaggtaacaggtgattactatcgttcagactatggtgaaaaagtatcagatgaagttgtattatccgtaaagaatgttacagttccaggactgatcgaggatatcagctttgatttacacaaaggagagattcttggattcggtggtctgtcagaatcaggtatgcatgagatcggtaaagcaatcttcggtgcatcttatgacagagaaggtgaagttgttctggctgacggaacacacatcaacgatattcctacagcaattaagcacagcattgcttatacatccaaagaccgtgacaatgagtcggttgtgctgaatcagagtatcggtgacaatatctgcttaccatcattagatgaacttgctaataaagcacatatattaagcgataagaaacgtagagagtttgccgataaatatgcaaaacagatgtctgtaaagatgaatgatgtaaaccagttcgtttcaaatctgtccggtggtaacaaacagaaagttgttcttgcaagatggatcggaaaagattctgatatcgttgttctggacagtcctacccgaggaatcgatattaaggtaaaacaggacatctatcagttgatgaaccagatgagaaagaacggtaaatccatcatcatgatctcagaagagttgatggagctgattggtatgagtgatcgtatcattattatgaaagatggaaaaatcagtggagaacttgaacgtaatcagaacctggatgaaaatggtctgatttcgatgatggtataaggaggcaactatgggaagtcaagtaagtgcaaaaacaaacgataaggagcagcagcttaagaaagcgtctaagatggcgatggttcgtgcgctcctgccaatcgtaggattggttgttattttcctgctgttcaatgtcctgacagatttccgtatgatgggaaatatgtcactggcattttcgcaggtatatgttacaatgattgcagctatgggcgtgttcttcattatgacaatgggcggcctggacttttctcagggatctatccttggaattgcttcaatcgttgtatgtattctttcaaaacatggaattgcaattgcaattcttggtggtattgcatcaggtgcgatcatcggtgcgatcaacggattcttctatgtataccgtaagatcaaatcattcattgttacaatttgtaccatgttcttattccgtggatttatcaaatatatgacaacgaatgcacctgtttccggttctgcaacattgatcaattatgacagtacaggattcaaagtggcttgtacagtagttgttctggttattggatttatcgcattccgttatacaaaattcggaacatatttaaaagcgatcggagctggtgaaaaagcagcaatgttctcaggaatccgtacagacagaatgaaattcctcatgtatgtactggcaggtgcactgacaggatttgcggcatttatcaacgttatcaaggtcggatctgttacatcttccggtggtaaccagttagagacacagattctgatcgctctggtattaggtggtatgcctatttccggtggagccaaggtaagatttgaaaatatcgttgttggatctcttctttacgtcgtactgaacagtggattgacaatgatgggattctcaacacagatgatgcagctgatccagggagttgtattcctgatcttcgtagcagtattcgcagaccgtgaatcacttacagttatcaaataataaaattatttattcattacgggcaaaggcattctttgatgtttttgcccgtaattggtatatggagcatttatgaagaatacgaatcaggaaggcctgaaatatcaaaaattatataactgggcacacaccctgatcaccagtggtgtgatcaggaacatggataaatttccatcagagccgagcctgcagaaaaagttcggatattccaggcagacagtaagaacggctttgcagcagctggaagaagaagggctgatcacccgggtgagagggagtggaacatatgtgtcttatgaaggacagacgatagatgatgaccggccgagagtaggactgctgcttagctattattcggaatatctcttcccggaggtgtatgacggcatagaagcttccctgagtgaaaaggggtatcgtatcgatgtggcagttaccaagaaccgtctgaacgatgaagcggtttatctggagagtatgctgaagaataacgtctcgggtctgatcattgaaggttcacgttctgcatttccaaatccgaatctgcgtctgtttgaagaaattaagaagcggaatataccgacaatctttatacacaatcattatgaaaatatgtcttttgacagtgtagagatgtcggacaccagatcggcctatgaactgacaaagacgctgatcgaacatgggcacagaaaaatcggaggaattctgaaatatgatgatatgcaggggattgcacgttataaggggttgatccaatgcatgtcggattatggaattaaatatgacgatgactgcatcagatggtattctaccagagagatggaagacaagttcggtaagaaaggacttactcatatttaccgtcacaccagagagtgtacagcaatgatgatctataatgatgaagtggcgagagtgtatttggaatttctggatgagagagggatacacgttccggaagatgtgtcggtagtatcttttgatgatgcggagctgatggataatacagatgttaaattactgtccgctatacatccgaaaaacaagctgggatatattacagggaatcatctgttgcgtatgatggatgatgaagactggcagacaaaaaattatgcataccgttttccagtgagaataaatgatggtaattccgtgagaaaattgtagaagttaatcttgacaggaaatggaaaaaagagtattatacaaatatagtatgttacttgttagtaaacgatgaacgaggcattaactatgtgtaaattattaaatgtatttatgcagagttagtgccttttttgtgttaataagttgataaaaagggaagactatgcatagatacacgtacaaagaaaaggagaaaaatatgaaagacaaaatctttggcgtattgcaaagagtagggcgcagcttcatgctcccgatcgcaatcctcccggtagcaggattgcttctcggtcttggcagctcatttaccaatgccacaaccattgcaacttatggactgcagggaatcctgggagagggaacgatccttcattcgctgctgattattatgaataaggttggaagtgcgatcttcgataaccttccactgatttttgccgttggcgtagccatcggaatggcaaagaaggaaaaagaagttgcagcattatcagcattgatcgcatactttgttatgcatatttccattaacagtatgctggaaatcagcgggaagatcgcagctgacggaaccatttccaagaatgtccttgaaggaacgatcgcttctgtgtgtggaatcaatacactgcagatgggtgtattcggcggtattattgtaggacttggagttgcggcacttcataaccgtttccacaagattgtactgccaaatgcattatcattctttggcggttcaagattcgtaccgatcatttcaacaattacttatatgttcgtcggaatcgcaatgtatttcgtatggccggttgtgcagaacggtatctatgcactgggcggtctggtaacaggaaccggatatttcggaacactgatcttcggtattgtaaaacgtgcgctgatcccgttcggactgcatcatgtgttctaccttccgttctggcagactgctgtcggcggaacaatggaagttggcggaaaactgatccagggtggtcagaatatcttcttcgcacagcttgccgattctgccaatattacacatttcagcgcggatgcgacaagatatttctccggtgagttcatcttcatgattttcggacttccgggagcggcacttgctatgtaccgtacggcaaaaccagaaaagaaaaaagcggcaggcggactgcttctttccgcagcactgacatgtatgttaacaggtatcacagagcctctggagttctcgttcctgttcgtggcaccggttctgttcgcagtacaggttgtacttgcaggtagtgcatacatgattgcacatatcctgaatattgcagtaggactgacattctccggcggattcttagatcttctgttattcggtatccttcagggaaatgcgaagacaagctggatcagaatcattccggtaggaattatctatttcttcctgtattactttatcttctcattcctgatcaagaagttagatcttaagacaccgggtcgtgaagatgatgatgcagagacaaaactttatacaaaagcagatgtcaatgccaaaaaagcaggaaatacagaagcaggtacagaaggaacttccgaagattcgattagtgcggaaattacaagaggacttggaggctctgcgaatatcgaagacgtagactgctgtgcgacaagacttcgttgtacggtaagcaatgcagatctggtaaatgacggaattttgaaagcaacaggtgcatccggcgtggtccatcgcggacagggtgtacagatcatttacggaccgggtgtgacggttattaaggcgaacctggaagactatctggaacatgcgccaaaagagctgtatgagcctcagaaagacgcagaaagtactggtcagaacatatcagaagatgataaaatagaaaccaaagcagaagaaaagaaaattgtagatacaatcgtgatctcaagtccgatcacaggagttgcggcagacctttccacaacgccggacgaagcatttgccggacgtatgatgggtgacggtgctgttgtaacaccggaagatgcgatcgtaaaagcaccggaagatggagaagtatgcttcgtattcgataccaagcatgcaatcggattcatgacagagtccggagtgagccttctgatccatgtcggtattgataccgtaaaactggacggaaaaggattcgaatgcttcgttgagaacggacagacggtgaagaagggtgatccgatgctgaagctggatctggattacctgaaagcaaatgcaccatcggtagcatcaccggttctctgtacagagcttgaagataaccagaagatccgccttctgaatgaaggagagatcaaggcaggagatgagcttttcgcaattgatatctacgaagcgtaaaagaatgtaatgtggagatacaagtggggatatgatgtacaggatagagaaagttttaaatcataataccgtaatagccatccatcaggacgatcataaagaagtcctgatcatgggaaagggagtaggattcggcagaaaagttgcagaaagaatcgaagtaaggccagaagaccgtttatattctctccaaaaatataaagagcggggcggggcaaaagaaatcgtaaagtctatcgcaccggaatttctggaactgacgaatgctgtgctcaacgaggctgaaaaggtatttgggaagattgaccgtatggtactattcccacttgcagaccatattgcatttgcagtaaaacgtattcagaatcatgagcagatcagtaatccgctcacagaagacatccgtgtgttatttcatatggaattcaaggtggcggaaagtatccggcctcttttgaaaaagcagtttcagatcgatatagaagacgacgagatcggatatgtggcacttcatatccattcggcaatagaagatgagaaagtatcacaggcaatgcagatggcaagatctgtcagggaatgcatcagtatggtagaagaggcgatcggaaaaccgatcgatattgcatcattatcttacaaccgtctgatgaatcatatccgttatatggtggcaagagccttgagcggtgagaagctgaaggtgaatatgaacgactatatggaagtgaaattcccggaatcttttgggatggcacaagtcatctgcgaccgggtaggtacgagtctgggagtaaagctggaagaagtagagacaggatatctggcaatgcatattgaaagagttgccaatgacgaacgtgaaatagaagaatagtacacttcggaaaaaaggcggaaaatacacaaaaataattttttttgaaaaaaataaaaaaaattcaaaaaaacacttgcaaaagatattgcgttatgatattataaatctcggtcacgcaagagaaataaaaacacgaaacagtgactgagatatggctccatggtcaagcggttaagacatcgccctttcacggcggtaacacgggttcgattcccgttggagtca

SEQ ID NO: 2840 - DNA, 393 bp, Unknown
  gut microbiota DNA sequence
tacctaagtaattaggtaaaatgccgatgtggctcaattggcagagcagctgatttgtaatcagcaggttatcggttcgagtccgatcatcggcttagtccttacgggacttaaagattttggacctttagctcagttggttagagcaatcggctcataaccgatcggtcctgggttcgagtccccgaaggtccatgaaatggcccagtggctcagttggttagagcgccgccctgtcacggcggaggtcgagagttcgagtctcttctgggtcgcttgcttgtcacttttagtgagcaggcgataaacaattaaatatgggatcatagctcagctgggagagcatctgccttacaagcagagggtcataggttcgagccctattggtcccat

SEQ ID NO: 2841 - DNA, 78214 bp, Unknown
  gut microbiota DNA sequence
atgtaatatgaaaaaagcactgaaaaccgttggaatcaaggtttgcaaaaaaatctcaaaaaattagcactcacctcttgacagtgctaatattaggtgctatagtacagatagaacaaaggaagagagaaaaagaatcaaagatatgaagcagacagcattcatagatgattcgaaatctggaatcctgaagttttagtaaacaacacctcggaattctccgaacgtgcaaataatatattttttatcatttggaaggagatatgacttatgatgatgcctagtatttttggagaaaacttatttgatgactttatggatgatttttcattcccgacgtttccgaatgtcgacaaagaactgtatggaaaacatgctaagaatctgatgaagacagatgtaaaagagaccgaaaatgcatacgagattgatattgatcttccgggatttaagaaagatgagatccagatggaactgaaagacggtgtacttaccgtcagtgcagctaaaggactggataaagatgaggaagataagaaaggtaactatatcagaaaagaacgttatgcgggcagcatgagcagaagtttctatgtaggaaaacatgtaacggtagaggatgtacacccgaaatatgaaagtggaatcctttcattcagtgttccgaaagaggaagcaaaaccggtagaagagaagaaacattacatttcaattgaaggttaatgaaagctcatagacataaaaaagagtgatggtaccccacaggtattgagcctgtggggtatcatatcataaaaacacatatagaaaagcaaatgacgggagggagaacaatggcggcaaaaagagattattatgatgttcttggaatcagcaggagtgcagacaagggaacgatcaaaagagcatatcgtaaactggccaagaaataccacccggataccaatgccggaaatgcacaggcggaagagaagttcaaggaagcaacggaagcctataatgtgctgagtgatccggaaaaaaagaaattgtatgatcagtttggccacgcagcttttgacggcagtgccgggggcagtggagcctacggttatggaagtgaaccgggaggcggcacctacagctataacggaccaaatggcagctttcatgaatatcattttgaaggcggcgatatggatgacatcctgaagaatatattcggcggtggattctcggaaggagcaggaagcggctttcacggatttggaggattcggaaaaggatttagcggtggcggaaatttccggcaggatggttccgatgtgacagctgaaatagatgtaacatttgatgaggctgcattcggtggagataaagttatccggctgtcagatgcacagggcagcaatgtggcaggaaaatcattgaaagtgcatattccggcaggtatcagcgacggaaaaagcatccgtctgagaggaaaaggaatgccgggagtgtccggaggcaaagcaggagatctgttattaaaagtcagagtcggcaaacgtccgggattcgaacgaaaagatatggatgtatattcaaaagtcacgattccgtttactacggcagtgctgggaggagaagcagtggtacagacacttaccggaagagtggtctgcaagatcaatccgggaacgcagtccggaacgaagatccggttaaaaggcaaaggaatcgtgtctatgaaggatgcaggaagatatggagatcagtatgtgactgttcagatagatgtaccaaagaatctaagtaacgaagctaagagaaaattaaaagaatttgaagctgcatgcaggaacggaagccggggagcagcataaattttaaatataaatatagaataaatgcattgttttatcagaagaatccagcttggatccggaaaggtagaaggatgcatttttttctgtattgacgctctctttagaaagaattataataaaataattaggaaaaagaatctgtatttccatacaggttatgaaaatatatgctaaggagataagtaagatgagcaagattattttaacaggtgaccgcccgacaggacgtcttcatgttggtcattatgtaggttcattaaaagaacgtgtaaaattacagaattcaggagaatatgatgagatctatattatgatcgcagatgcgcaggcactgacagataacgccgaacatccggaaaaagtacgtcagaacatcatgaacgtagcactggattatctggcttgtggaatcgatcctgagaaatgtcacatttttatccagtcaatggttcctgagcttacagaattaacattctattatatgaatctggttacagtatccagagtgcagagaaaccctacggtaaaagcagagatccagcagagaaactttgaagcaagtatcccggtaggcttcttctgttacccgatcagccaggctgccgatattacagcattccgtgcaacaacagttccggttggagaagaccagatgccgatgatcgagcagtgtaaagagatcgtgcacaagttcaacagtgtatacggtgagacattaacagatccggaaatcgtacttccatctaacaagtcatgcttaagacttccgggaatcgatggaaaggccaagatgagtaaatcacttggcaactgtatctatctttctgacgaagaagatgttgtgaagaagaaagtgatgtctatgtttacagatccgaaccatcttcgtgtagaagatccgggacaggtagaaggtaatccggtattcatttatctcgatgcattctgcaaagatgaatattttgaagaattctggccggaatataagaatctggatgagttaaaagcacactatcagcgaggaggtcttggtgatgtcaaagttaagaagttcctgaacaaggtacttcaggcggagctggcaccaatccgtgcgagaagaaaagaatgggagcagaagcttccggaagtattcgcaatactgaaagaaggaagcaaagcagccgaggcaaaagcagcagagacactgcaggatgtaaaggctgctatgagaatcaactattttgatgatgcagatttcctgaattaagaatagcagagatattatagaatcctcgaaatatcagacgatacctggtattttgaggatttcttttattggaaattgttgtataataaaactatcagtaaaaaatggaaattgtatagataataatgggagtgaagaggcgtgatcatatgaaagagataacaaaagaagcacttctggaagctttaaaattaagagataccggagaacgtccggcgttccgggaatgtgaattcaaagacatggatctgagcggagcagatctgcataatatggactttacattaagttcgtttcagaatgtaaatctggagtatgtgaatttgaaaaacagcagtgtggaaaatgcattgtttgacgggaattccctgcatggtgcgaattttcagaatgcgaatatgaagacagcggcatttcgtgaatgcgatatgcgtgaatgcaatatcaggggagcgaacctttatggagcggtacttgagcatgcaaagttagacggcattcagtccgatcatacaacccagtggttccgtatgcactgcccggagaccggaccaatcctgggatataagaaatgtgtgaatgacagggtggtacagcttctgattcctgctgatgcaaagcgtacttcggcaacacttccatcctgccgttgcagtaaggcaaaggtgctttcgataaaaagttttgatgagacggaagaatttgaagaagcctggtcgctggtcgatgaaaattttgtatacagaaaaggacagtgggtcgaggtgaaagattttaatgaggacagatggatggattccacgacagggattcatttctggatggagagaaaagaggctcttggttattgatatctgacaggcagaaaagaaaaaaatggaggtgcaagagacaaatgaaagcagacatcagatggttagacgatccgcaggtattccgggtgaatcgtctggatgcacacagtgatcataagttttatgaaaataaagaagattatgaaaagaaagaacagcggttgaagcaatcgttaaatggaatctggaagttccgttattccgagaatgcaatggagcgtccggctgatttttatcagaagtggtttcagtgcaggagttttgatgaaatgaaagttccgcagcatattgaactggcaggttatgataagattcattacatcaatacaatgtatccgtgggaaggtcatatctacagaagaccggcgggaacaggaaaagaaaaaggaaaaggcatgttcagccaggcagagtataatccggtaggttcttatatccgaaagtttgatctgcaggatggattaaggggaaaaaggatcatattaagctttgaaggtgtagaacaggccttttatgtgtgggtgaatggagaatttgtcggttatgcagaagacagcttcacagtgtcagaatttgatatcacatcgtatgtaaaagagaaagacaatttgctggcggtagaagtacacaagagaagtacggctgcatttctggaggatcaggatttctttcgtttttttggaattttccgggatgtaaatctgtatggaattccggcagttcatatagaagatctgtggatacgtccaatctatcatccggaggacggaaaggcagaaatagaactggatatccgtttgtcacaaaaaaagaaagaaaaaaatatccagggaaaaataaaagtttcgctgaaagacaatgcagccgagacaaagacagtattactggatgagacggagaatttggatgatccggcaattcagacgaatctcccggtcgaaggatcggtgaataatgttctgcatttccggtatgagttaaaaaagacggtaaatgcgtggagtaatacggatccatatttgtatgaacttttgatagaagtacagaatgaaaaagacgaaacggtagaagttgtaccttatccgatcggattccgcaagattgagttaaaagatggaaagatgctgctgaatggcaagcgcctgatcatcaatggtgtgaatcggcacgaatggactgcccggagcggaagatgtattaccgaagccgacgagaaatgggacattgaatgcatccggcgcaatcatatcaatgcagtcagaacctgtcattatccagatcatatctcctggtattacaggtgtgatcaggctggaatttatctgatggcggagacaaatctggagacacatggatcatggcagaagatgggagcaacagagccgtcatggaatgttccgggaaatatagaatgttggagagcatgcactctggaccgtgccgtttcgaattttgagacatttaagaaccatacgtctgtgttattctggtcactgggaaatgaatcctatgcaggcaatgtattaagagagatgaaccaatattataaggaaaaagatccggacagactggtacattatgaaggggtctgccataaccgttcatatgaagatgtgatttcagatatggaaagccagatgtatacatcaccggagaatgtaaaggaatatctggagaataatccgaaaaaaccatttctcttgtgtgaatatatgcatgatatgggaaattccctgggaggaatggaatcttatatccggttactggatcaatatgataattatcaggggggattcatctgggattatatggatcaggcactttgggtgaaagatgaagtgacaggacgagaagttttgcgttatggcggtgattttgatgacagaccgtctgattatgaattttccggaaacggtattctatttgcagaccgaacagaaaagccggctatgcaggaggtgagacattactatggattacgcagatagagggaaattaaggattgtatatggagatgtgacaatcggggtgcacggagaagattttcatctgattttttcttatcagacaggaggactggagtccatggtgaagtccggaaaggaatggctataccgcactccaaagccgacattctggagggcaacaacagacaatgaccggggaaatggatttccgttccgatccggtatgtggctggccgcagatatgtttcaaaaatgtgtggatgtccaggtgcagatagacggaatcaggatagaaaaaccaattgcaccggtaaataataaatattcggataaagaaactgcggaacgtgtagaaattgtatttacatatgagacattaactgttccgtcaacacaggtaaaagtatcgtatctggtattttctgatggaaatgtcagagtgagagcacactattacggaaaagaaggccttccggaacttccggcattcggtatacgctttatcataccaacagaggcagatgggtttgtctatgaaggcttatcgggcgagacttatccggacagaaaagccggaggagttcatggtatctatgaggtggaaggtctgccggtcacaccatatctggttccgcaggaatgtggaatgcatgtggataccgaatgggtgaaagtaaaaagaagtaaggttctggataaccgaaaacgacacatggaacagagtgaactgacattccgtgccggaaatgagatcagccattcgaaatttgcattctcctgccttccgtatacttcagaagaactggaaaacgcaacgcatcaggaagagctgccgccggcaaggagaacggtactttgcatttatggtgcagtccggggtgtcggaggaatcgacagctggggatcggatgtggaagaggagtaccggattccgggaaacagggatatagaagtagaatttacaatgtagatatcggagcataagaaatcaggattcagaaacttgacatgaatacagcgatgcgatagattaatttatggattagagagtatgaaggagagaaacttatgaatttacatgaattctttatcgtatgcccgctggtatttcttgccggttttgtggatgcgattgccggaggaggaggcctgatttcattgccggcctatatgttcgcaggaattccggtacacaatgcaattgcgacgaataaattatcatcggcaacgggaacggcggtgtcaacatggcatcttgtgaagagcagatgtgtggatctgtttctggttccgggaacggtagcatgtgcgttcgttggttcgattgcaggggcgaacctggcactgatcatcagtgacaaagtattaaagacggtactggtctttgttcttccggttgtggcgttctgtgtgttacgtgacaaagatctgaaaccggtgatcccggaaggctttaccagaaagaaacagtatctgatcatggcggcttgttcattcgtgatcggcatctatgatggattttacggaccgggaaccgggacatttttactgcttacatttaccaaattaggaaagctcgatatggagaaagcaacaggaaacgtaaaagttgtcaatttgacatcaaatatatcggcgttaattacatttattctggcagggaagatcttatgggtactgggactttcggcatccatattcagcattgcaggacattatcttggtgcacacatggttgtgaagaacggggtaaaggtcatcaagccgattatcttacttgtgctcgtattactgatgatcaagattattctcggaatatagatggaataatttagcatattgcagtaaaagagcccgcagtgtataatgtacccataattttaggaaatgaggtataacatggaagattcaaatagaaactttaaattacagacatgtgaagattttatagaagtgcttgcaagtaaagcggctgttccgggaggtggcggagcggccgctttaaccggggctatcggaattgcgcttggcaatatggttggaagcctgacagtgggaaagaaaacatatgcagatgtagaagatgaaattatcgaatgcaagaaagaggcggatgagatcgcaaaagaattcttagaactgatggataaggatgcggaagcatttgagccgctcagtagagcatacggacttccgaagtctacgccggaagagattgcagaaaaagaagagatcatggagaatgcactgaatgtggcatgtggtgttccgatcgagatcatgaagacctgtgccagaggcattgaccttgtcgaagtatttgctgcaaagggcagccggatcgcattaagtgacgctggagtcggagcaacacttttaaaatctgccatgcagggcgcatcattgaatgtatacatcaatacgaaatcaatgaaagacagaaaaagagcggaagaactcaatcagctggcagattccctccgggaagaatatgaagcaaaagcagaccgtatatttgcggaagtaagcagccgcatccggtaaagacagtgcaagaaagaaaaagaaagtagaaagaaagcagcaggacaaataatggcaaaattactattaggaaaagaagtaaatgcttctattaatgaagaaatcaaggcaaaagtagaaaagttaaaagcacaggacattacaccgacgcttggaatcatccgtatcggtgaaagagaagatgatatcgcatacgaaaaaggcgcagcaaaacgatgtgagacgcttggcgtagcatatgagaaattccttctttcggcagatgtaaaagaagaagaggtattaaagacgatcagtcaggtaaataagaatgataaaatccatggcgttctgttgttcagacctcttccgaagcatctgaacgaggacaggatcgtcaatgcgctggcggtagaaaaagatgtagatggaattacggatctttctatggcaggagtattcatgggaaaagacatgggatacccaccatgtacgccaagtgcctgcatgaaggtgctggagcattacggaatagactgcacaggtaaaaaagtggtagttatcggaagaagtctggtagtcggaaaaccggcagccatgatgctgctgaagaagaatgcgaccgtaactgtctgccataccagaacagtggacatgccgtccgtggtaaaagaggcggatattgtagttgtagcggccggaaaagccggagttatcgatggaaactatctgagagaaggacagatcgtcattgatgtcggaattaatgtgaatgaagaaggaaaactctgtggagatgtgaattttgaggaagcagagaagattgtagacgcgatcacaccggttccgcgtggagtcggaggggtaacgacttccattctgctagagcatgtggtggatgctgcaattgtacagaacagatagggatttgagaggcagggaaaatgaagaggatagatttcgaaaatggaacagtaacagggaacattcttggagcggctcttccgatgcttgctgcccagctgttaaatctgctgtataacattgtagaccgtgtatacattgcacgtattccgcatgagggaacggcagcactcggggcagtcgggatctgttttccgttaattgtgatcattactgcttttgcaaatctcttcggtggcggtggtgcaccgttgttttcgatttacagaggaaagaaagaagagaagacggcagtcagaattatgaatacctcattttccatgatctgtgcaagtgcagtactgctgatgatcggaggattcctttttgcatatccggttttgattctgttcggaacttccaaagatgcaatggtctatgcatatccatatatgatgatctatctgatcggtacagtaccttcaatgatcgcggtgggaatgaatccgttcattaatgcacagggatactcgctgatagggatgtcttcggttgctgtcggagcagccgcaaatctgatcctggatccggtatttatttttatcctcggactcggtgtaagaggagcagcaatcgcaacagtattgtcacagacgatatccgcaatatttgtatatttcttcctttcaagaagagcagaattgaaagtccggcttttgcgaagggaagagattggagtatgtagcggatatgccagaaacattgtaagtcttggaatggcaggatttattatgcagcttacgaacagtctggtatcaatctgctgcaatcatgtactttccgttacaggaggagatatctacatttcggttatgacaattattagcagtgtgcgtcagcttgtggagacaccgatcagtgcgataaatgaaggtacatctccgatcctgagttataattacggcgcacgccgtcccggacgtgtgagaaaagctatggtagtgcttgcagttatgatccttctctatactgctgtgatgtgggggagtattattgtaattccggaagttcttatccgtattttcagttctgataagatgctgttaaaagatgcggtacctgcactcagacagtatttcgccgcatttattttcatggatctgcagtatatggggcagacagtattcaaatcattgaataaaaagaagcaggcaatctttttctcaatactccggaaagtggtaattgtagttccgctcacttatttcatgccgtatgcattgcatatgggaacggatggggtatttcttgcagaaccggtttcgaatgtgatcggtggaagtatctgctttatcacgatgctttgtacggtactgccggagctgaaaagaatggaagcaagagaataaaaatgatgtgatttttaggggagatatggataaaaagatttcaaaaataacaagaggactgatgacggttctgacagtcatattgattgcactgttcctgacgatcatgggtctggtgagtaagattcagggaacagcccgtgtcgtaaattatgccggactggtccgcggaaagacgcagcgtattatcaaacttgaggatgcaaaacaaccgcaggatgagatgattgaatcggtatcttcgtttatagaaggacttcggtatggaagtgatgaacagaatctggtccgtctggatgatcatgcatttcagaataagatgaaagaactggatgaacattttcaggagttgcaaaaagagatccggcaagtgcgtaaagagggatatgaaaatacggaaatcatagaaaaaagcgaggcgttcttcggaatctgtgatgaagcgaccgggcttgcggaaaagtatgcacagaagaaagcaactgcactggaacggctggaaaagattgtgatcgcagatattatcggtctggtgtgtcttctggcatatgaactgattaaggctgtaaaatacgcggcgcagaataaagcacttaagaaaaaagtctatctggacgaggcaaccggacttccgaataagaaccgctgtgaggagatcttagacggagaaatgccggaatgtacggatgggtcagtagcattgtgtgtattcgatctgaataatctgcgtattattaataacaggctcggacatgatcaaggggatgcgtatatccgctcatttgcggtgcagttaagaaaagcgctgccggaagaatattttgcagggcgggatggcggagatgagtttattgctgtacttgagtgtgtggatcatgaaaaagtacgggaaatattggggacaatacgttcggaaattgccagatattcccaggaacatccggagatgccgatcagttatgcggtaggatatgcactggcggaagattttgaaggatgtacgatgcgggaactcttccggcatgccgataagaatatgtatatagataagaatcaggcgaagataaaagaggcagcggaccgccgggcacttcatattcagatcctggatggaatcagacagcagggatttcaattttcggattgcctgtattgtgatgctttgcaggatcagtatacagttttacgtgcaagctcgaatttcttccttgcagaagatggaagttattcaggagcgatagaacagattgtgcagaaacttgcagatgattcatcaagaaaaagaatgtgggaacggctgcagatcccatatatcatttccaatctttcggaaaagaaagaagaaagtgcaagatatgaacttccttattgcaggaagaatggaaaagagatacagagaggccgtatgacatttctgcgtctggatgatacggcaactgggaagctgcatcactttattgttggatttgaagtgtttcatgacatggagcaggtcctggaagatgagaggctgcacttggaacagtattatgagcagatgaagcagtccattctggaaaatagtaattatatagaagcacttcttgaaacagcggaagctttgtatacagtgaacctgacacaggatcgtctggaacagatatttcatcatagaaagaaagaagagcgtatatttgactttcagggagaacttccatgttcgtatgatggatattgcaggaaaatacggcagcatattacagaagatacattggaaacgtataagatcatagatacatcaaagagtcttctggatcgtttttatgccggtgagaagcaggtgactgtggaatatcaggaaagcaacaaagacggaaaagaaatctggatccagaagacagtgctgatgtcgcaggatacagtctatgataacgagaaagaacgggagcatacagtggttcgcggaatcattatgttccggaatacttcggaattccacgaaaaggatcagaaagaaaaagaacaattgcagattgcctatgaaaaggcagatatggaaagtaagacaaagacagaattcatgaatcgtatgagtcatgatctgcgaaccccgatcaatggaatcctgggaatgatacatgtgatccgaaagagctggaacaatcaggagaagctggaagattcggtagataagatcgagatttcgacaagacatctgatggatctggtgaatgatgtacttgatatgagtaagcttgaatcgggacatctgacagtgcatgaagaaccgtttgatctggaagatcttatgaaagaagtggcagtactgatgcagggacagctggaagaaactggaattacacaccgcaagcacagggaaaatatgcaacatactatgctgaaaggggatgcgcttcagctacagagaattatgatgaatctgtttggcaacgcagtcaaatacaataaaaaaaatggaaccatagatacttatgtgacagagatttcgtgtgacggtaagaatgttttgtatgaattcaggattgcagacagtgggatcggtatgagcagggaatatatggaacatgaattgttccagccatttacgcaggaaaaggcagatgcaagaacgcagtataaaggaaccggacttggaatgtcgattgttaaaggtctgattgatagaatgaatggtacgatcagtgtccgcagtacccttggagaggggagtgaattcacattccggctggcatttcgtctggcagaagaggaaaggcagcaggcggctgataataaggaagacgcgaaagatgacctggcaggaatgcgtgtattattggtagaagataatgatatcaatatggaaattgcagaattctatctgacagatgcaggaatgatcgtagagaaagcatggaacggcaaagaggctgtagagaaatatgaagctgcaccaaaggggtattacagtgcaatactgatggatatcatgatgcctgtgatgaatggtatagaagccgcaaggaatatccggcgcaaggaaaagaatgggggaaaagaaatcccgatcattgcaatgaccgcacagtcggaaagagaaagtaaagaaagctgcagtctggcgggaatgaatgcatatatatccaaaccggtagatccggagaatctgatccgaatattgagaatgtatcagaagcgttaaaggaaagtgacaaaagaggaaggtgacagacatggtatcattaaatgattatctctattcaggagatacagtactccggattcttcataattacatcaaagacctgagaaaagatgccaaaatgacaggaaatgaaattgacatgattcattgtaatttccttttacagattcaggaattactggaacataatgacttcctgacagcccagtcgcagaagatgagagaattctacaaatacatggcacaggaatatccgtttatggcatttactttcaagggaagaatcaagtctctgatccgtgcagaagagaaattcaacggatatattgtggaattcatctatgattattatgaggaatatggggagtatccaagtgtagcagaactaaagaaacgattacgttgctttagagatttaattgcttacaggatcattatttctgttccgagatgtcatctgaacagtgaagaggacagggaagaacaggaacggaaatatctatatcagattgcaaatgtccttcctggtttcctggaggaacagggattcagtgcggaaccggctatggggattaaggagagtacatccccgcttctgaacgagtcggtgaaaccatattacagagattatatctgcagcagcagcctgaataattatcagtctcttcatatcaccttctatgataacagctccaggtgttatatggaggtacagctcaggacaaaaatgatggatgatgtggcagagatcggtacggcaaatcatattggatatgagaaagagcaggagcatgacagggcaaggagagacgcagtcccggagggtgaatgtcagtattttgatgaggcctatgagagaggaacgaaactgctgaatctggatcttgcagaactggatgtgaatatgttctctgcggttaataacagtctgattaatgatggatgtggactttaccggggacgtctgatcctgccgtatgagcacttgtccagatttcagaatgatctgatcgattagagaagaatcgcagaaaaagcgatgaaaatacagtttgaatttgcaatacaaagcaaaatatagtatgatatgattcagggctttaaagtgtagtgctttaaagtactgagaatttgaaaggatatttatactatgatagttaatttgatagaacggatatatggctttttgtggggagatttgttacagataccgcttccgggcggcggaagtgtcggaatctcactgctgatcatcctgctgatcccggcgggaatctactttacgatccgcacaaggggacttcccatccgcctgttcccggatatggtggtggcattgaccggtaaaaaggatgataataacagtctgtctactttccagacattgatcgtatcaacggcaacccgtgtcggtatgggtaatctggtaggtgtggttgcggcagtatcggccggaggcgcaggagctgtcttctggatgtgggtgacggcactgatcggatcgtcaactgcattcatagaggcaacgcttgcacagatgcataaagaaagagatcccctgtatggtggattccgcggaggtccggcatattatatccatgattatatagaaggcaggacaggaaaaaagaaaaaccatgtattggtatcggtgttatttgctgtctccggactgatctgctggtgtgggatcagccaggtgatcagtaattcggtagccgcttcttttgaaaatgcattttcgattccgccgctttacacgacgattgtgctggtaatccttgcggctgtcattgtacttcgtaaaaatgccacagtgaaagtgctggatctgatggttccgtttatggcggtatgttatttctttattacaatcttcatcatcgtaacgaatatcggaagtcttcctggagtatttgtaaggattatccaggaggcattcggagcccgtcaggtagtagcgggtggattcggagcagtgttgatgaatggagtaaagcgcggactgttttcaaatgaagccggatccggttccgcaccatgtgcggcagcggcagcagaatgtgacaaaccggtaaaggcaggatttacacaggcacttggggtatttatagatacgattgtgatctgcagctgtacggccatgatcatgcttctggtaccggaaaaactgctggcaggaaaagaaggaatggatcttttacagacagcgatgaagtatcatctgggagaatttggagtgatcttcattgcagtaactttattcctgttcagtttctcgacattcctgggaatcctcttctatgcaagaagtaatgtggcttatctgtttggtgataaatggtgttggcagacagcatataaagtgctcgcacttgtgatgctgttcatcggtggaattgcaacctatacatttgtatgggatctgggagatgtcggaatcgggctgatgaccattttcaatatcggagcactgtatctgatgggtggacaggcactggatgaattgaaagtgtatgaagcgtcaaaaaagaataagaaatcatgataaagattaaaaaagagcagcagatataccgttgaaataaaaatgcggcatatcatagtgctcttttttattatcatttatctgtcataatatttgccatatctgcaggcagcggagctgtaaatgacatccattctccggtaatcggatgggcaaattccatatgatgggaatgcagtgcctgtctgcttatgtgttccatatccgggttatacaagtaatctccaatcagtgggaaacccagatgtttcatatggatgcggatctgatgtgtccggccggtctcaagcttcagagagaccagactgtgtccgttggcttcttttacaagtcggtaatgtgtgatggcttcttcaccgtgttcaaaatcaaccgtgcgttcgatgatggtgccttcttttctggtaagcggagcacagatggttccggccgcaggtgtgacactgccctttactatggcaagatattcccggtgcacttcgcggttcttggtcatagtagaaagaatacttccactgaccagatgcttggatacgacagtcagaccggaagtgtcccggtccagacggttacagcaacggaagatgaaaggttttccctgttcctgataataccatgcgagcgcattggcaagggaattataataattgttcatggacggatgaatcggcataccggcaggtttgttgattacgatgatgtcctcgtcttcataaatgatgtccagtggaatctcaaccggcgggatcttttcggaattttttgtctcgcagatgataacctgaaggatatccccggcagtcagtatctggcgcatataataatgtacgccattgacaagaatacttttgggcatgcgtttgatttcagcaagattctgtccggaataccctctgcgtcttaaaaactgttcgatgcgcagtccactgtctttttctgtaattgtatattgtatcgtacggttcattgcaattctcctgtgatatagcgtataatgataatacatatgattgtagatatctatcatatcataatccatgtaagaaaataaaggcagaatatataggaaaggctgaagtggatgatatgtaagggaaaggagaaaagtgtgacaggactcagtacattatgttatatcgaaaaagatggaaaatatctgatgcttcaccgtacggtaaagaagaatgatgtaaataaggataaatggattggtgtcggcggacattttgaggcagatgaaagtccggaagaatgcattttaagagaagtaaaagaagagacaggatatacattgacgtcctatcggttctgcggaatcgttacatttgtatctggaaatggtgtgacggaatacatgcatttattcactgcagatggattcgagggagaaccgattgcatgtgacgaaggtgaactggaatgggtggatatcgataagattgaatcattacacatctgggaaggggacaagatcttcctccggctgctcgctgagaaagtaccgttcttttcgctgaagctggtctatgacggacatgacggtctgatatcggcggtgctgaacgggaaagagataaaaaaataaagaaaggaaagaatcggaacatgcagaaaaatacagaacagatgaaattggaaaatgatcagattgaagttatcgtgaattatcacggagcggaactccggtcattgaagaaaaaagcaacagatcaggaatacctctggaatgcagatgcgaaatactggggacgtacatcaccggtattatttccatttgtaggaggagtaaagaataaagtttacagatatgaggggaaagaatatccgatgaatcagcatggatttgccagagacatggagttttcactggtaaaccagagcgcagatgaagtatggtttgcactggaagatacagaagagacatataaagtatatccatttcactttcatctggagataggatatagactggaagatgcttcggtcagtgtgatgtggaaagttaagaatataaatgataaggagatgcattttgcaattggtgcacatcctgcattcttctgtccgcttcatgaaggtgagaaacagtctgagtattgtctgggattccgtaatggacaggggaaagtaccggaagcattggtgaataccgtatttggagaaggtggtgtcgttacgacgcagaaaaaagaatataagctgacagacggatgccttccgatggatgaacatctctttgacggagatgcactggtgatcgaagaccaccagattcagaaagtagtacttatggatccacagaagaaggaatatctggcagtggagtttgatgcaccgttagtcggaatctggtcaccgccgaaaaaacaggcaccgtttgtatgtattgaaccatggtatggacgctgtgacagtgagatatttgacggagaattaaaagacagagactgggaaaatacactggcagcaggagaggaattcgaggcatcctatagaatcattgttgaataatttttttagaatattttatagaatatatatggataactttggggaatcggttataataagcatgtagttacatgataacagtcattacgaaagagaggaaatagatatggcaattgtacatttgtcaaaagacaactttaaggaagaagtattagaatcaaaagtgccggtactggtagacttctgggcaacgtggtgcggaccatgccagacaatgggaccgctggtggaagagattgcagaagagcgcgcagatatcaaagtatgcaagcttgatgtagatcaggaaccggaacttgcaagacagtaccgtgtaatgtctatcccgacattccttgtgtttaaagaaggagaagttgtaaagagagacatgggtgtgatgtctaaagaagaagttgaaggacttgttggataatctataaagcggtttcaccggatggtgaagccgctttgtgtatacaaaagtattaaagtccgagtacgtccttaatagaatagaatccaggagctttcccgtcaagataagctgcacagtcacaggcacctctcgcaaagcattcccagttataggaatgatgtgtgatctcaagacgttctcccatgcctccgaagaataccgtatggctgcttggaatattacctgcacggagagaatgatagccgattgttccaggttcacgtggagattctccctcgcgtccgtagacggcaatgttgcttaattctttgccgagagcatgcgccatgatttcacccatttctttggaagttccgcttggagcatctttcttccactgatcatgcatttccagaatctcgatatcaatctcatcttttaatgttgtggttacgagttccagaagcttgttcatgatattgacaagcttagaagtattggcggcataaagcattgggatctgctttccggcatcctcaaatcgtttcatctcttcggcggagaatccggtagaaccgcataccagtgctttcttatgtgcgatggcaagatccaggacctccatagccatttcttttgttgaaaaatcaatgatgacgtcacaggagtcgatcacacctgccagatcatctgttacaggaacgccgagttctgatcctgtcattgcgacagttccgagatccattcctacatagtcacgtccttttggtgctatcccggcgacgagtttcatatcatcacggctggcagcgacctgtgtgattaattttcccattttccctctgggtccgattacaataactttcatatccattctcctttcgcagtccggtcgtatttttatagcggtatatccggaactgctataaactaagaccagtataacacagcaattatcttgtggatatgaagaaatctgaaaacggcaggaaacattgtataaataaaaaagaattcaagagaaagattcataagagtctgctcttgtaggaaaggcatgaaaatagtatactatgaaaaagtgattatgaaaaaagataatggaggcacgaatgaaaggaattatatttgacgtagacggaactttgtgggattcgacaagggaagttgcggttgcatggaataaagtattgcaggatgagatggaaggccacgagatcttaaccgcagaagggctgcagaaagaatttggaaagccgatggatgcgattgcagaaagtctctttccggaaatgtctgaaaaagacaggatggaacttctaggtaagatgatggcatatgaaaatgaactggtagcggttggtccatgtgtgatctacaatggtgtaccggagacaatcaaagcactgagtaaaaaatatccactgtatatagttagtaactgtcaggatggatatattgaagcgtttcttaagaattccggactgggcgggtatttcaaagattttacatgtccggcttatacaggcaggttaaagggtgaaaatatccgtatcattatggaaagaaacggactggatgaagcagtgtatgtaggagacacccagggggatgccaatgcatgtaaggaagcagaagtaccgatgatctttgcgtcatatgggtttggagaagtggaaggagaatatccgtcgatccaggcatttacagaactgcagaatatagattttgacagactataatcagaaaaatattgcattttatatgcaaaaatactataattctcttatattatttcgttgaaaaatactagaaaagcagaggtatagattatgaaaaaaagagttgtagttgcattaggacacagagcacttggtacgacattaccagaacagaaagaagcagttaagaagaccgcaaaagtaatcggtgatctgattgaaaagggatatcaggttgcggtcacacacagtaatgcgccgcaggtcggtatgatccatactgcaatgaatgaattcgcaaaagagcatgaagattacacggcagccccaatgtcggtatgttctgccatgagtcagggatatatcggatatgaccttcagaatgcaatccgcgaagaattaatggatcgtggaatctacagaacagtcagcacgatcctgacacaagtgatcgttgatccgtacgatgaagcattttatacaccgaccaaggtacttggacgttatatggatgtagaagaagcaagtgcagaacgcaagaagggaaactatgttgtagaagaacctggtaaaggattccgccgtatcgttgcagctccgaatccggtcagcatcgtagagattgatgcgatcaaagcattgctggatgcagatcaggttgtcattgcatgtggtggaggcggaattccggtattagagcaggatcaccgtctgaaaggtgcaagtgcagtaatcgaaaaagatctgacagccggaaagatggcagaagagacagatgcggattcactcatcattcttacaagtgttgaaaaagttaagatcaacatggacagaccggaggaagaagaactgagagagatcagtgttgatcaggcaaaagcctatatggaagaaggacatttcggaaaatataacatgtatccgaagttcagagcagctgtagaatttcttgaaaagagagaaggaagaagtgcactgatcacatcttttgataagctggatgaagcactcaaaggaaagacaggtacactgatcagataaaaagttacaagatcagaagaatcggctgccttcaaaagcaggataaaaacctgcacagacatagtgaaagctgtgaatgtgcgggtttttttgtattttaacagacaatcagaataaggagcaggtgcatatagtataaggaacagaaactttacaatgtggataagttatgctgtgtccgacagggaggtggaaaacagatgtccaaaatccggctgtgcgaactgtccaaaaaagaagtgatcaattgctgcgactgcaagaagcttggatatatcgatgacctgatcattgatgactgcaaaggctgtattgaagcacttgtagtcccggaaggtggaaaatggtgtaacttttttggagatggaacagagtatatcatacccttttcctgcatcaaaagaatcggccctgatttaattctggtagagatacatgaggaaaaataacaaaaaatagggcggaaatgtgtttgacttctctttttgaaaaagatatactgtatttgaactgctataaaggacagaaaggaacgaatcagatgaaatgcccatattgtaataatccggatacaagagtgattgattccagaccggcggaagacggaagctgtatcagacgccgccgttcttgtgatatatgtgggaaacgttttactacatatgaaaaagtagagacaattccgctgacagtaataaagaaggacaataccagagaacagtatgaccgccggaaagtagagaacggcgtggttcgtgcctgttataaacgacctgttgcaacggcagatatccagaaagttgtcgacagaatagaaacaaaagtatttagcatggaagaaaaagagattccgagcagtgcgatcggtgaggctgttatggatgaattaaaaatactcgatgaggttgcttatgtccgtttcgcatccgtttacagagaatttaaggatgtcagtacatttatggacgaattaaaaaagatattaaaataaatccgatatggaatgggaatgcagaatctgtcagactgaataatgaatattggatgaagaaggaattgcttataaagcaataaagtgataaaatatatgggagaagcaaaagtatttgcttctccctttttcaaaagagaatcagatttgttataaatagatgtgtatttaaaatagcttgttagaatagattgggtgaaataatatgagaacatataagttaactatttcctatgacggaagcaggtatcagggatggcagagacaggccacaacagacaatacgatacagtatattctggagtggagtattggtaaattagtcggataccgtgtgcatatagatggatcaggaagaacagatgcaggtgtacatgcgcgtggacaggtcgcaagtgtgaaactgtctaagttgtacgatacgaaagaactgaaagattcgctgaacagatatcttccggaagatatccgtattgtgaaagtagaactggcaaagaatggattccatgcgcgcaaaagtgcgaaaggtaagaaatatgaatattacatcgactgccgtgaaaagccggatgtattttcaagaagatattgttatcattatccagaaaaactggatatcgaagcaatgcgtgatgcgaccagatatctgatcggaccgaagaactttaccagctttacagatgacaaggaatgtaaagatccggttcggaagattacgaatattaagatcgtcaggagcggggaaaaggtaagaattacttattacggtaccggtttcctatatcacatggtaagaatcctgacgggaacgcttctggagataggtgccggcaagagggatgcgtccatgcttccggtcgtaattgcggcagaggacagaagccttgcaggatttctggctccggcaaggggattattcttaagaaaagtatattattaagaatagaataaaacagataagatatatgtcagaaaaagtaaaagtactgtccgcaaaaaaggacaggaaaaagccgggaggaatatatgaagtttatatcgtggaacgtcaatggaatccgtgcgtgtgtacagaagggatttatggatgtttttaatgaattagatgcagatattttctgtattcaggaatcaaagatgcaggcaggacagttagaactggatatgcccggatatcatcagtattggaattatgcagagaagaagggatattcgggtaccgggatttttacaaagaaagaaccggtatcagtaagttatggtctgggaatcgaagaacatgacaaagagggccgggtgatcacgctggaatttgaggagttctatttcattaccgtgtatacaccgaattcacagagtgagcttgcaagactggattacagaatgcggtgggaagatgcattccttacttatctaaaagaattggaaaagaagaaaccggtcattttttgtggggatttaaatgtagcacacaaagaaatagacttgaagaacccaaagacaaaccgtaaaaatgcaggattcacagatgaagaacgtgggaaatttacagatcttttaaatgcgggatttattgatacgttccgctacttctatccggaaaaggaaggaatatactcatggtggtcctacagattcagcgcaagaaagaagaatgcagggtggcgtattgattatttctgtgtatcagagagcctgcagccacgtctgaaagatgccgtcattcacacggagatcatgggatcggatcattgtccggtagaacttgatatagagtaatccgacagtgttataatcatatggaaaatatatggagctgccgcaaaagtagataaacaatctgtttttgcggcagctccatatatttaaaaagataaagagttttataaaaagcctccgtcaaccccgatgatctgtccggtcatatattccggagcatgtacaatattccataccatctgggcaatttccttaggagttccgtaacgtccggcaggaatttcatcttccagggcttttcgttcttccggtgtgagctgatcgttcatagaagtatcgatgacaccgcatgcaattgcattcacctggacattacttggtgcgagttctttcgccagagcttttgtgaatccgttgataccggatttggatgcggagtatgcaacttcgcaggaagcacccgagagcccccacattgaagaaatgttgatgatcttaccggaacgctttgataccatcggagggatggcctgccggcaacaataaaatacagaagaaagattggtctgaataatatgattccagtcttcatctgtcatatcggataagagattgatatgagaaattccggcattgttcacaagaacatcaaggtgtgaacagtcatgatagatacggttatatatggctcttacatggtcaggattgccgacatccccgacaacgatcgtgcaaggtgtgtggtattttttgcggatataggcgcggagctttttcagttcatctacagaagaagaacaatttaaaaatgtgtgatatccgcgcgatgcaaatcgtaaagcaatgcttttcccgataccccgggaagcccctgtgattaaaatagtcttttgttccataatttttctcccctgatcaattaacttttcttctattatatactgaaatcattgtcatttaaagtgttaggtgatattatttatataacaataaccagtcggatcgtagaagattggttccaaaagccagacgtgataaaagagaggtaccattatgattaataaggcaattgaatttgccacgagagcacatgcaggacagttcaggaaagggacaagcagaccatatattgtgcatccgatcgaagtgggagatattgtctcaacgatgacaaaggacgaggagattatcagtgcagcggttcttcatgatacaatagaagattgtgcaggagtatcaagagagcttctgacagaagaattttcagaacgggtagcgggaattgtggcacaggaaagcgaagacaaatccaagacatggatggaacggaaatcagcaacgatcgagcatatccgtactgcaccaaaagaagtgcagatggtaggacttgcagacaaactttcgaatatgagggatattgacagagattatccggtatacggagaagaattgtggaaccgtttcagaatgaaggaaaaagggattatcggctggtattatattggaatccgggatgcattgaaggagtcgtttgaaggtgtagaggcttatgaagaatataccagactggtgaataagatttttgaacaggaatgaatcataaagacagatcatatagcagaagatatccagggtgttgtgcaaaagcagtaccctgattcttatttacgcgaacaacgagcaaaagtctgtgcttgcacgagaccttggcgattgtcgcgataacctgagaaactcgcagagcgcgtttctaatagtttaggagaagatgagatggctgatgtaagaaaacacatgatatttcacggaagagtgcagggagtaggttttcgttatactgccaaatatctggcaagatcaatgaatctgaccggatgggtgaaaaatgaatatgacggaaccgtagtgatggaagtacaaggaagagaagcaatgatcttcgaactgatgaaaggactgaacaggaatcagtttatccagattgattggattgatacagaagagaaggaaacagaaacggaaagcagttttgaagtgaaatattaagtttacaggacgggaaaagtgattcggtatatacacttgaaagataaatatgttatactggaagtattcaagatgagggtggacgaggagaagaaaaatgacgatagaaactgaaaatcaaaagagcgtaaaaggaagaattgtagctgcggcgtggcagctgttctatgaaaaaggatataatggaacaacggtggatgatatcattgatctgtccggaacatccaagggttccttctattattactttaatacaaaggacgaacttctgaatacattgtctatgatcctggatgataattatgaaatattgaaagagaaaatggatccggatatgaacagttatgataagttactgtatctgaattatgaagcacattctatgatagaagaaaagatcaacattgatcttctggcatctctgtattctacacagcttgtggcacagggacacagatcattgctggatcagaaccggacatattataagctgatcagcagtgtgatcgatgaaggacaaaagcgtggcgagatatcggatgaagtctcggtgagcgatctggtcagatattattccatgtgcgaaagggcgctggtttcggactggtgtctgaataagggagagtattcactgagagagtattcgaaaaaatgtatgccggtcatgctggaacattttaaaagataaaacgataataaatacacagaacctgccaatggcaggttcttgttctgtagatcaatgcattttcaaagcagtgttgcgtccggtaccgaaatgatcatttttcagtatttcaaacgacttttcataatttcctttccgcatatatgcaaccattttcttgagattttcatttgtctttggaattctcattccgttacggatggaatattgtccgatacggatgagttcagacagattattttcatagatccggttgatccgttcattatccagaatactgataatctccatatgcattgcggtatccgcaatttcccattcgtacagatcaccggcaacggcgcacatgcgcacgatcttttcctctatgcggtaagaatattcctcataccggcctgacgtaaagataaggtgaaaagccgggccctctaataattctcttaactgatagatttcattgatatctttctctgtaatttctttcaccgtcatagatttataataatcagaaacgatcagcccttcgacctgcagcatctggatcgcagtacggaccgggctgcggctcatccccagttctttggtgagcatggcttcggtgagaaccatgcccggaggataggtaagattcataatattttctttgatcgtctcataagcctgtgtggcaagagacggactcttttctgccatgtcggattccccccttttggtatacgtcccagaaaaatggatgtgaagataaaagtatacatcttttatgtttgtatacaaattataacgtgtttttaaagaaaattcaaggttatgtgttgacttttttgaaaaggagtgttatagtcacagtagaaatgatttgtatacaaattaaaaaaacgtatacaaatagcacatgaagaatatccattacaaatcataaatcatcattcatgcgctggaacaattaataagacaatatcatattggaaaaggaaggtaattaaggatgaaattaggatttattggtacaggtaacatggcatcagcaatcatgggtggaattattaagaataatgtaattccggcagaagagatcatcggagcagatctttttgcacctggaagagaaagagcgcagaaagaatatggaatcaatgtaacagcagataataaagaagttgcttcaaaagcagagacaatcatcctctctgtaaaaccgcagttctatgcaagcgtaatcgcagatatcaaagatgtagtaacagataaccagattatcattacaattgcaccaggtaagacacttgcatggcttgcagaacagtttggaaaagaagtaaagattgtccgtacaatgcctaacacaccggctatggttggagcaggtatgacagccgtttgtccgaatgagcaccttacagaagacgagatcgcatatgtaaagagccttctggaaagcttcagccgtgcagagatcgttccggagcgtctgatggatgctgtgacagcagtaagcggaagctcgccggcatatgtattcatgctgatcgaagctatggcagacgcagcagtttctggaggaatgcctagaaaacaggcatatcagtttgcagcacaggcagttctcggaagcgcaaagatggttctggatacaggaaaacatcctggagaattaaaagacatggtttgctcaccggcaggaacaacaattgaagctgttcgtacattagaagaacttggattcagaagttctatcatcgaagcaatgaaagtctgcgaagagatgtccagaagcttataatcaataaaatttatgaaataataaaaatatctatatggagcaggaattacagagaagttgtagttcctgcttttgtgttgtatattcgtatttgggaagaattgtgttagaataacagttagaagaaaacaggacaggtgaataaaagatgaaaaaagaactggattattttatgattgatggagaatttggcggaaatcaggactggtttaccaatattgttatgaatgtcggaggatgcggggcagcaacggcctgcgacagttgtatctatctcgcaaaatacaaaggaatgaaagaactatatccatttgatctggaacagatagataaagaagcctataaaaaattcagccagcttatgaagccgtatatacggccgagagttcagggggtgaaaaagcctgagtggtacatcggaggattggaaaaatatatttcagacgtgaataaaagatgtggaacagattatcagatccatatggaaaaattcgacggaacaggggatgtagatgaggcagaacgtattatatgcggacagattgataaagaacttccggttccgtatctgatgctccgtcatttgaatactgaaaaatataaagattttatctggcactggtttctggtggtcggatatgaaaaagaggagcatgaaacatggattgatgtggctacttatggggaaaaagtccgtttgaacctgaaagatctgtggaaaaccgggtgtgaagaaaagggtggaatcgtagtgtatgagataaaagagcagaaaaagaattaaaagaattaaaatgatcaaatttcatattttttacacatgtttaagttataattattcataatcgtgaaaaagtaaaaaaaggtgggacagaaaaagtgaaaaagcgaatcatgactgcaggaatgttagctatgatacttgcggtgggaataacagcgtgcacaaaagcagataacacaaccaaaacagagaacacttccacttcggaatcagatgggaaaaaagaacagaagaaatcggataacgaaaaaaatgtaatgactacagaacagaaaaagatctacgaaaagatcaagctgacctataaagaggaagaacagaaaaaagttgcggaaaaattagagaaaaagaaagagtcacaggattataatctgaacaatatgctgattgaatataatccattcggaaccaatacacagtcactgtatgtatattttaaaacggatgcagcggtaaaggtatcctacacgatccatgtaaaagacgatggcatttctgatttcagcagagatgtatatcaggatgaggaatatcagacagaacatgaatttcaggtgattggcctgatcccggatacggagaatacaattaccttttatgtgacaaatgaagatgggtctacaaatacaaaggaaatcgtatacgaaatgggaagcctgtacggggaggaaaaggtacagcttgataccgatataaaacagagtgcggatcagctggaagacggactttatgtgatattaggtaatgacagcagttctatggatttcatgtattattatgataacagcggagtgttaagaggtgaggtgccgcttctggggtacagaagcaacaggctgatctttgacgataatttcatgtattacagtatttctgagaagaagatggcacaggtgaaccgtctcggacaggtgacaaaggtgtatagtcttggcgattacagtctgcatcatgattatgagtttgatgaaaatggcaatatgctgatcctggcaacggataccacacgggacagtgtggaggatatcgtgttgaagctggatgtgaattcaggtgaagtgacaaaggtactggatctgggagacttgcttggtgattataagaagacttgtgtgaagaattcctcggatgagctggactggatgcatattaatacgatccagtacatgggaaatggatccgtgctgttaagctccagagagacgtctacgatcattaaagtggacaacctttatgatgaaccgtcgatcgcttacatgatcggtgagaaggatttctgggaagatacatcctacataagttgtctgctgaataaaaaaggcgattttacaatccagggcggtcagcatacaattacatatgagacggatgaaagccttgcggatggacaatattatctgtatatgtttaataataatatcggaatcagcgagacaagaccagattatgactggtcttccatcggacttaagaccagttcggaagtggacggaaagaattccaaatattacaaatatctggtagacgaaaatgaaggaacatttgaactggtggattcatttaaagttccatattccggatacgtcagcagtgcgcaggatattggggataacgtgcttacagattccggactgaaaggaacgtttacggaatatgatgaggatcataaggcgatcgcaacatataagatggattatgaaaaattcatttaccgtgtatttaagtataattttgaaggattttattttggaaaaagtgaataatccataaaaatcatatggaagtctttacggataacgatttatccgctaaaatgaaagcgtcggtttttgccggcgctttttgaaaaagtagttaaattaagaaagaaaaggggaaaatagaatggcaaatccaatcgttacaattgagatggaaaacggagatattatgaaagcagaactgtatccggaagttgcaccgaatacagtaaataatttcgtttctttggtaaaaaaagggtattatgacggactgatcttccaccgtgttattaatgggttcatgatccagggtggatgcccggacggaaccggaatgggcggtccgggatattcgatcaaaggggaatttgctcagaacggttatgcaaatgaactggcacatacagaaggagtgctttctatggcaagggcaatgcatccggattcagcaggttcacagttctttattatgcataaagcggcaccacatctggatggtgcatatgctgcatttggtaagatcatcgaaggcatggatattgtgaataagatcgctgagacagatacagattacagtgacagaccactggatgaacagaagatgaagaaagtaactgttgatacaatgggaacagagtatccggaaccggagaaagcataaaacggcggcagacagtaaccgcacaggtataagcaggcagaatcatagcaatcaggcatacagcgatcagatacgtctgatcgctgtatgtaaatttccaacacatatgacgcggaggaaaacgacagatggaaatgatccagacagaaaaattggtatatgaatatgaaaaacgtgatgaagaaggcaatgtgattgggacatcgcgtgctattgatgaagtagatattgaagcaaaagaaggacagtttatagcaattctcggacataatggttccggaaaatcgactcttgccaagcatctgaatgcaattctgatgccaacagaaggttccgtatgggtgaatggaaagaatacgagtaatccggatgaactttggaatgtaagacagtcagcgggaatggtatttcagaatccggacaatcagatcattggcactgtagtagaagaagatgtggggtttggtccggagaacctgggcgttccgacggatgagatctggcagcgagtggaagaaagtctgaaagctgttgggatgatcgaataccggcatcattctccgaataagctttccggaggacaaaaacagagagtagcaatcgccggtgtcgtggcaatggaaccgaaatgcatcgttatggatgagccgactgcaatgcttgacccggttggaaggagagaagtcttaaagacggttcataaactcagaaagcagaagaaggtcactgtgatactgatcacacattacatggaagaagtagtagatgcagataagatattcgtgatggatcacggaaaagtcgtgatggaaggctcaccgaaagagatattctccaaagtagatgaattaaagagttaccggctggatgtgccgcaagtgacgattctggcagatgaactcagaaaacgcggactggatattccgaaagggattctgagaaaagaagaactggtagaggcagtggaacgtttgacaagtgaaaatggtgagaagaaatgacagacattgcaattaagatagaacatttgaattatatatacagtcccgggactgcatatgaaaaacatgcactcagagacatttgtctggaaatcccacatggagaatttgtggggataatcgggcatactggatcaggaaagtcgacactgatccaacatctgaacggcctggtaaaggcaacagatggtgcattatattataatggagaaaacatttaccaaaatgggtatgatatgcgtgcactccgtaatcaggtcggactggtatttcagtatccggagtaccagttgttcgagatcgatgtactgacagatgtgtgttttggtccgaagaatcagggactgagcaaagaagagtgtgaaaagcgtgcgctagaggcattgaaactggtagggttaaaagaaaaatattataaatcttctccatttgagctctcgggcggacagaaacgaagagtagcgattgccggagttctggcaatgcatcccaaggtcctggttcttgatgagccgacggcggggcttgatccgaagggcagagatgatattctggatcagattgcatatcttcataagcagagcgatatgacagtgattctggtgtcgcatagcatggaagacattgcgagatatgcggatcggatcgttgtgatgaacaagggggcagtgatgtataatggcacaccgaaagaggtgtttgcgcattatcaggagttggagaagattggtcttgcagctccgcaggtaacatatatcatgcacgacctgaaagaaaaaggtttaccagtaaaggtaaatgtgacgactgtgaaagaagcaacagatgagattatgcgggcactggagaagaagatatgataagagatataacaatcggacaatattatccggcaaagagtgtgttacacagattggatccaagagtaaagctggtgggaacgctgctctacctgatctcactgtttttattcaacagtattccgggatacgtgatgacgacgttgtttctgatccttgttatcaggatatcaaaagtaccgttttcttttattgtaagagggttaaaaccggtcatcatgcttttgatgatcacggtgttgttcaacttatttctgacgagggatggagcagtgttgttccatgcatggattttcacgatcacagaaggcggtctcaggacagcggtatatatggcaatccggctgatctatctgatcatcggttcgtcacttatgacatttacaacgaccccgaatgaactgacagatggaattgaagaattactcggaccactgaacaagattcgtgttccagtacatgagattgcaatgatcatgtcaatcgcactccgcttcatcccaatcctcctggaagagacggataagatcatgaaagcgcagatcgcaagaggtgccgatcttgaaagcggcaatatgatccagaaagcaaagagtatgattccgattttggttcctttgtttgtgtctgcgttccggagagcgaatgatctggcgatggcaatggaggcaagatgttaccatggtggtgagggacgtacgaagatgaagccgttaaaatactgcaggaaagacagaatagcttatattactgtaattgcgtatgtggttctcgttgttttaatcggaagatttgtaccactgcatatatggatattttagaggataagcgacagttatgcatcagaaaatgggacggggaaaactccgtccctgatttattccgggatatgatcacgtgaaaggaaagaaaaatatcatgagaagaatcagaatctttgtagcatatgacgggacgaattactgcggctggcagatccagccgaatggaattacaatagaagaaaaactgaataaagcgttaaacagacttaccggagaagacatccgggttatcggggcaagccgtacggattccggagtgcatgcgcttggcaatgtggcagtatttgatacagaatctccgattccgccggaaagattttcctatgcattaaatcagaggcttccggaagatattgtggtagtaaagtcagatgaagtgccgcttgactggcatccgagatatcaggataatatttctaaaacatatgagtaccatatttacaatgcacaaatgccgaatccattaaagacacgatattgtacatttgtatcgtttccgctggatatcggtgcaatgagagaaggagccaaatatctgatcggagcgcatgattttgtgagtttttgtaatatccgaaccaatacacaggatacagtgagaacagtatatgatctgacgattgaaaaaaaagatgatgagattgtgctgagaatcacaggaaatggatttttgtacaacatggtccgcattatcgcaggtgtcctgatccgggtcggcagagggttctatactccggaaaaagtaaaagagattctggaagccaaagtccatacttcagaaggggccacagcattgccaaacggactggtattggtaaaaatagattataaataatcaatgaatagtcggcattttagacaatatacagaaaaaaatcggaataacatacaaaaataaaaaaaaccgccataaaaagacaagaatatgttaaaatacatctgtccggcataaagttgagaaagctggacggaaggagaaaaattatggaaatgttattgtatctcgttccggtatttggaatccttggactgctctttgcagcttatctggcagcaagagtaggaagacaggatgccggaaacgacagaatgaaagaaatcgccgcagcgatcagtgatggtgcgcaggcatttctgacggcagagtacaagattctggttattttcgttgcggtattattcgtacttatcggattcggaatcggtaactggattactgctgtatgctttgtagtaggagctttattctcaacgcttgcaggtttctgcgggatgaaagttgctacaaaggcaaatgtaagaactgcgaatgcagcaaaagaaaaaggaatgaacaaagcactctcaattgcattctccggtggagctgtaatgggtatgtgtgtagccggttttggggtatttggtgtcagcatcatttacatcctgactaaaaatgttgatattattacaggctttagtttaggagcttcttccattgctctgtttgcacgtgttggtggtggtatctacacaaaagctgccgatgtaggagccgatcttgttggtaaggtagaagcaggtattccggaagatgatccgcgtaacccggctgttatcgccgataatgtaggggataacgtaggtgatgttgcaggtatgggagcagacctttttgagtcttatgtaggagcccttgtatcggcactgacacttggaatcgtatattataaagctgagggagctatcttcccactcctgatcgcaggacttggacttgtagcttctatcctcggaacattttttgtaaagggtgacgagaattccaatccacataaagcattaaagacaggttcttatgtagcaagtgtattggtactgatcgtatcttgcgtattcagtaaagtattctttggagattttaaagcagcgattgctatcgtagccggtctgatcgtgggacttctgatcggtatcattacagaagtatatacatccggagactacaaatcagtgaaagaaattgcagaacagtcagagacgggatctgcaacaaccatcatcagtggtcttgcagtaggtatgaagtctacagcaattccgattcttctgatctgtgtcggtatctttgttgcataccagacatgcggactttacggtatcgcacttgctgctgtaggaatgctttctactaccgctattacagtagctgtagatgcttacggaccaatcgctgacaatgccggtggtattgcagagatgtctgaactggatccacatgttcgtcagatcactgataaactggatgccgttggtaacacaacagcagctatgggtaaaggtttcgctatcggatctgcagccctgacagcgcttgccctgtttgtatcttatgcagaggcagtacatctgaagacaattgatatccttgactcacgtgtaatcatcggaatgctgatcggtggaatgcttccattcttattctcagctatgacaatgtcatctgtatcaagagcagcatatcagatgattgaagaagtaagacgtcagttcaagacaatgcctggaatcatgaagggtacagaaaagccggattataaatcatgcgttgcaatctcaacaacagcagcattaaaagagatgctggttcctggtgttatggcagtgcttgcaccactggtagtgggaatccttcttggaccttccgcacttggcggacttcttgcaggagcactcgtaacaggtgttatgatggcaatcttcatgtccaatgcaggtggagcatgggataatgctaagaaatatatcgaagacggtaaccacggtggaaaaggaagtgaagctcataaagcagctgtagtcggagacactgttggtgatccattcaaagatacgtcaggaccttctattaacatcctgatcaaattgatgacagttgtatcactggtgttcgcaccattgttcctgtcaattggcggattgttataggaagaagcataaaaatgaaaagaggtatctgtaccaaagtgatgtgtacagatatctcttttcgttttatgtattcggaagaatttttatggatgatttatagaaagttgagaaaaataatagaattgagggactggcaacccccagctgtttgtgataatatatgtgtcgggacttttattaatgtttgaaaatagatagaaaagaggcaataaagatgacaaaagtagatattatttcaggattcctcggagcaggaaaaactacatttatcaaaaagctgctcggcgatgtatgggcaggagagaaacttgtactgattgaaaatgaatttggtgagatcggtattgatggaggattcctgaaagatgcaggaatcgagattacagagatgaactcaggatgtatctgctgcaccctggtaggtgatttcagcaaagcactggtaaaagtattggacgagtatcatccagatcgtgttatcatcgagccgtcgggagtaggtaaattatccgatgtagccagagcaatcgaggcagtagagaaagatgcagatatcgagatcgatggaagaatcactgttgtagatggtaaaaaagcgaagatgtacatgaagaactttggagaattcttcaaagatcaggtagagcatgcatctacaattgttgtgagccgtacacagatgatgactgatgaaaaggtagaagagtgcgtgcacacacttcgtgaggaaaatgcagaagcaaccatcatctccactccatgggatgaacttggaagagaggcgatcagccatgcactgacaaagggagctgagattgagagcctgtttgaagaacatggagatcaccacgaccatgactgctgtgatcatgatcatcacgaccatgaccatcatgatcatgaccactgctgtgaccacgatcatcacgaccatgaccatcatgaccatgatgactgctgtgaccacgatcatcacgatcatgaccaccatgaccacgctcatgactgctgctgcggacatgatcacgagcatgatcaccaccatcatcatgcagatgatgtgtttacaagctggggcaaagagactgttcataaatatacagaagaagaattggattatctgctgaaagcgttgtcggagaccacttcgtatggaacaatccttcgttcaaaaggtatcattcagatgacagacggaggatggaaacagtttgatttagtaccggaagaatacgaagtaagagaaggtcagccggattatacaggacgtatctgcgtaatcggaacagatctgaaggaagaagaacttctgaagttattccacgtataagacaggaaatagagaaagaaaaggaaagaggtgcgggtatggcaacacctatgtttatcgtcacgggattcttggacagtggtaaaaccaccatgataaaagataccctgatggaacaggaatggatcgaaccgggacttacactgctgcttctctgtgaagaaggagaagaagagtatccggaagaatatttgaaagaaaagaatatggcagttctgaaaattgaagaattcgaacagctgaacactgtatttttcaaaaactgtgaaagaaattatcatccggcacagatcgttattgaatataacgggatgtggaaactggaagatctgctttcaatcagatatccaagaagcttcgagctgcagggcgtatattcaaccgttaatggtatgacattggatatgtatctgatgaatatgagaaatatgctgatggaacagctgacagaatcagaactgatcgttgtaaaccgctgtgcagacggcgttaacagatcaggattcagacgggcactgaaagtgcagaacccgatggcacagctcctttttgaagatatgcagggtaagatcatagaaccgtctgaagaagatcttccatatgacgtaaaaggtgataagattgtgctggacgatgttgactttggagtatggtatgtggatgcatatgatcatccggaattatatcttcataaagagattgattttaaaggacagatctttcggccaaaggggatgccggacaatatgttcgttccggtcagagagatcatgacctgctgtgcggacgatgtacgttattacggatatccatgtaaggcagaaatgaaaattgatgcaaagacaaaatcctggatgcagatccgtgcaagattcgagtacgaggcagtaagttcctttggaaacaaacagccggtattgtatctgatcgatatggaaccagccgcagagccggaagataaggttgtgtatttagggtaattgggatttaatttattaactgggaagcggcctctcagtccttgaaggaaacagtagataaggcttcttgttcaggttccataccataagaaacactaagagagtcagaatcacctaaaagcaaaggaactacgctcaaactcggcgttcgcctcaaacacgttcgcttcgttcctttaacggtgcttctgactctctaattgtttctaacggcattccacattcacaataatccttatctattgtttccttcaagtcgtgactggcagcgaatgttaataaataaaatgcccggaagtgtaacccggtggaggcctctacggttacgcaattgccattcattcgtaaggcattcgacacccacggaataaaaagtagaaagccgttccagtgaatgtgaagaaggtgttggaaatagttaagcgtcaaaattatgcgttgggtttttgaaatttgcctgtttgagccgaatggcgagttgcaaatttcggaagcccgtttttagcataattttgacgctttagtatttcccaccgatggaacctgaacaggaacggctttctactttttatgcaggtccgggtcgtcgtgccttcctgaattaaatcccaagcttattttatatcagaatatacgacgtttcctccgcagatcgtatatttcaccttaccggtaagttcctttccggtaaatggtgagtttgatgatttggaagcatattctttcgggatccatgtttcatcagggtcaaatataacaaagtctgcatctgcaccttcctgaattgttccataaggcaggtgatatagctttgcagggttcactgtcattttttccagaagttgtatcatggtcagatatccgggctttacaaggttggtgataccgagtgcaagggaggtctcgagaccgataatgccgcttggggcttctgtgatcggtttggatttttcttctgtgctgtgtggggcatgatccgtagcaatcaggtcaatagttccatcagcgagtcctgcaataatctgctggcggtcattttccgtacgaagcggcggattcatctttgccagcgtgccatgttccaaaacagcgtcttctgttaaggagaagtggtgcggtgttgcctcagcgtgtaattttgcccccagttttttgtatgtacggatcagatcaatcgatacaccggaactgatatgctggattacaacatctgcaccggaacggagcgccagaagacagtctcttgccaccagtgcttcttcggcaatggatggagaaccgtagatgccgagtgcatcggatactttgccatgattgattccattgttgcggataaaagccgggtcttcttcgtgaagactgatcggaacgtttaactttgcggcatttttcatcgcttgatagcagaactcagcattcagaagagggatgccgtcatcggtaaatccgcatgccccggcttcttttaatgcaagcatgtctacttcgtcccggccctttaatgaacgggagattgcagcagcctggaagatacggatatcttctttggaagcacgtgcaagagtatcttttagggtatctgtattgtcgaccgtaggggatgtattcgccatacagattacagtagtaaacccgccttttgcagatgcctttgctcctgtatggatatcttctttatatgtaaatcccggatcacggaaatgtacatgtgtatcgatgagtcccggtccgacaacgagtcctccggcttctagaatatcctcggaatcttctgaaatttcaggtgcgattcttgcaatttttccgttcttcaccagtatatccatatgctcggacagaccagatgcaggatctaccacaagtccatgtttgatgatcatgataaatttcctccttaaaaatctgatgttaaaatacagtaaatattataaatgtagtataatgtattggaaatgggcttgtcaattaggagacatggaacaggaaagctgaatatatgagaaataaaaggagcacgtagaacagaaatgggatttaaacgtttggaaaaaaatttgatcgatattataaaagaagaacaggcaaaacttggatttcgaaaagaagagatccgtttgtattatccattgatttccctcaatcatttctttgaggcggatgacgatgtggatgagatgcagacacgtctggaacagttcccggaagaagtgaagaaaaaactcggagatatctgtgtgacgcacaaaaaagacagattctgcctgcatattccagaacagggaagtgtctatgtacatgaacatacggcagaaaatgaattcatcaaaaagctggtggaactgatgatgaatcacggaatcaaaaaagaagatatccttgcgatatttcagaaagaggcaaaagatatcagggtgggagatatgcacaacggagaatttgacttttgggtaagatttccggaagaaaatgaggacgaatactattactgctttaaggacgaagggtgtcatatgatctatcaccgttttttgccggaagattatgcagatttcggattctgaaaggtagtcggaaaagaataaaaatacagatgcagacaggaattataattataacttataaatgctgcctgcatttttaattataaaatatcttgctatatgtaaagattcatgataagctatcctacatcgtgctaaagcaaagacgtgctaaagcgatttgggtgaggatttattctcaaaataatgacaattactttgacgaatttgctgcaatgcgattacgttatcataaaaaactcaggagagtcttttcgtaatgaaatgaaaagcgccgaaggtgtaagcagaaaacagatctgcaaatctctcaggcaaaaggatggaggaatgaattatgggaatttttggacgtattgacacttttatcacatggtttgacggagtcgtatggggacttccgttaatcatcttaattctggtcacaggaatttttctgactgtgcgcttgggccttcttcaggtaaggtatcttgggaaagcgttaaaattcatggtgaaaaatgaagaagatggacacggagaagtaaccagctttggagctctttgtaccgcattatcggcaacaatcggtaccggtaatatcgtcggtgtggcaaccgcaatttctgcaggtggaccgggagcattattctggatgatcttgacggcatttttaggaatggcaacgaagtattcggaaggtcttctggcagtaaaataccgtacgatcgatgaagacgggcatgtacttggcggaccgttttattacattgagaatggaatgggcgtaaagttcagatggcttgcaaagatatttgcattctttggagcaggagttggcttgttcggaatcggtacatttacacaggtgaatggtatctcatctgcagtccgtaacttttttgatccggacatggcgcatacagtagcattatttggaaatgattattcatgggcaactgtaatatcctgtctggtactgacggtatgtgtcggaatggttgtattaggtggaatcaagagaattgcaaaagtatctgagatcgtcgttccgttcatggcggttctgtatgtagtattggcagtcattatcatggtgacaaatattaccgcaattccggcagctattgtaacaattgtaaaatcagcatttaccggaagcgcactggccggtggtgcaatgggaagtatgatcgtagcaatgcagaaaggtattgccagaggaatcttctcgaatgaatccggacttggaagcgcaccgatcgcagcggctgcggcacagaccaaagagcctgcaagacagggactggtgtcaatgacaggtacatttattgatacgatcgtaatctgtacgatgacaggactttctattgtcattacaggaacatggaatacgggactggaaggtgtggaaattacgacagcggccttccagaagggacttccgttcccgccggttgtggcatcctttgcattgatgatttgtctggtattttttgcatttacaacgattcttggatgggattattacggagaacgatgcctggaatatctgtttaataagaatatgaaagcggtaaaagcatatagatggctttatattatatgtgtattcatcggaccatatatgacggttgcggcagtatggaatatcgcagatatcttcaatgcattgatggcaatcccgaatctgatagccttgcttgcactcagcaaagtcatagtaaaagaaacgaaagcatttacggaaaagctgaatgtggaagagaagaatcagagaattctcaaaggaatgaatgcagagaatgtataatagaatataagttctgtagagcatatggtgataaaatacagggattttggtataagaagcagaatccctgtatttatttttgtccttttattttgatagaaaaattatgctggatgcagaatttataaaaggtcatacttttctttaaaagtccgtattatttctaaaataaaacaaaatacatacaatgtttgtgtaaatttgtgcaaaatgtgttaaaatgtaagaaaacaaaggacaggtgcaaaaatgaagaaacaaaagaaagatccattgtataaaagcttcggttatgcatttgccggaatatttgcagtggtaacgaaggaacggaatatgaagattcattgtgtggcaatggtttgtgtggtgatcgcaggattcgtatttcatattacaccggtagagtggtgtatctgcctgacattgtttggtctggtcatggcattggaaatggtgaatacggcggtagaagcagtggtcgatctggtcacggaagagagaaagccgcttgcaaagcttgccaaagatgcggcggcaggagcagtactgatcgcggcaatcatggcagcaattgcaggaatgatcatatttattccaaagcttttggaaagcctgtctatatagacaacgaaaggagaacgacctatggaaaaattaggaagcggattaaagaaagtattacttgcaggaatcggagcagttgcagtcacaggagagaaatcaaaagaacttctggatgagatggtgaaaaagggtgagctgactgttgaacagggcaaagcactgaatgaagaacttaagcataacatcaagtcgacagtaaaagaaaaagtgaatgtaaaagtaaaaacatcttcaccggaagaactggatgagcttttggataagatgactccggaacagatggcattgttgaaacagagaattgatgagatggagaaaaaacaggaagaatttgaagctgcagagacggtagaagatgtggcagacgaatccgtatgcgaagatgcggcagagaaagcaacggaagaagagacagctgagaacgaagatatttaaagaggaacaggttcatgagtaagggagaatccaaagaataccgtaccaggttaaaggagattacatccgtacttcataaatatggaatcaccaggggaattacgcctcagaaactccggatgatactggaggatctggggcctacttatattaaaatcggtcagattatgtcactgcattcagacattttaccgaaaaggtattgtgatgaactgatgtgtctgcgttcagaagtaactccgatgaaatttccggaagtaaaagaagtgatcgaacaggcatatggttgtccgtggaatgaaatatttgcatttatttccgatacaccactgggatcggcatccattgcacaggtccacagagcagaactgctcagcggtgaacaggttgttatcaaggttcaacgaacaggtatttatgaaattatggcaagagatatcggactccttcggaaggcagtaaagctgatgccgccgatcagtctgaaaggaatggctgacttcgaccaggtactggatgaactttggaatgtgacacgggaagagatgaattttctcaccgaagcatcgaatatggaagagtttgccagacggaatgtggatgtcgtatatgtaagaacaccgaaactatatcaggaatatacaaccatgcatgtgctggtcatggaatacatcgaagggcctgcgattgatgataaagagaaacttctggcaggcggatacgatctggaagagatagggatcaagctgatcgataattatatcaaacaggtgatggaagacggtttcttccatgcagatccccacccgggaaatgtaaagatccaggatggcaagattgtatggatcgatatgggaatgatgggaagactgaccgaacgggataaagaactgatcggaaaagcaatccgcggcattgcagaaaatgatatcggcatgatccaggaagcagtcatggcactgggtgaatttaaagagaaaccagatcagagcgtattgtatgaagatatcagtgaactgatgtcgaagtatgggtccttagatatgggagagatcgatgttgcagaagtgatgatggatcttatggaagtgatgaaggaaaataagatccgtatgccgcatggtctgacgatgctggcaagaggattgactaacatggaaggcgtgcttgcagacattgctccacagatcaatatgattgagatcgcatccagacatatttcagagagtatgtggaaagatctggattggaaaaaagaattaaaacatgcaggaaagaatctttaccgttcgatgcataaagcagtggaagtcccgggacttgcagcggatgcactgcatggtctgatgaaaggtcagacaagagtcaacctggatctgcatgcatccaacgatctggcacagttactgaggcgtctggtgcggaatgtggtaatgggattgtgggtgatggcattgctgatcagttcaagcattatctgtactaccaatatgagcccgaagatctgcgggatcccggcaattggtgcgattgggtatttatttgcatttgcgattgtgatgtatgtgcttattaagcatattctttccaaatgaatttgagatttattctcggttttatgggcaaatatgccgacaaaatgatacgagaatctgtatttgtaccaaaaaatgaacaaaataacagtcggaatcgctagacttttgatgatacaggagatataataaaaccatacacgtcaatatatgatttgtactattatcaaggaggaacaacgaaaatggcaagaaaaatgaagaccatggatggtaaccaggccgcagctcatgcttcatatgcatatacagaagttgcagcaatttaccctattacaccatcatccgttatgccggaacatgtagatgaatgggctacagaaggaagaaagaacatatttggacagactgttcaggtaacagagatgcagtcagaagctggtgctgcaggagcagtacacggatctctttctgctggtgctctgacaacaacatttacagcatcacagggacttctgttaatgattcctaacttatataaagtagcaggagaacagcttcctggagtatttaacgtatccgctcgtgcgcttgcaagccacgcactgaatatcttcggagatcactctgatgtttacgcctgtcgtcagactggtgcagcaatgctttgcgaatccagcgtacaggaagttatggacttaacaccagttgcacactgcgcagcattaaaaggaaaacttccatttatcaatttcttcgatggattccgtacatcacacgagattcagaagattgagacatgggattacgaagatctgaaagatctggtagatatggacgcaatcgatgcattcagaaatcatgcactgaatccaaatcacccatgccagagaggttcagctcagaacccggacattttcttccaggcaagagaagcatgtaacccatactacgatgctatgccggctatcgtacaggagtacatggacaaagttaacgagaagatcggaacagattacaaactcttcaactactacggagcagcagacgcagagaaagttatcattgctatgggttctgtatgtgacacaatcgaagagacaatcgattacttaacagcagctggggaaaaagttggtgttgttaaggttcgtctttacagaccattctgtgcacaggcattaattgatgcaattcctgacacagtaaaatacatcaacgtacttgacagaacaaaagaaccaggagctcagggagagccattattcctggatgttgtttctgcattaaagggatctaagttcgacgcagtaccggttaacggcggacgttacggattaggatctaaagatacaacacctgcacagatcgttgcagtattcaacaacgcagacaaagaaagattcacaatcggtatcaacgatgatgttacaaatctttcacttgaagttggtgcaccactggttacaacaccagaaggaacaatcaactgtaagttctggggacttggagctgacggtactgtaggagctaacaagaactctatcaagatcatcggtgacaatactgacatgtatgcacaggcttacttcgactatgactctaagaagtctggtggtgttacaatgtctcacctgcgtttcggtaagaagccaatcaaatctacttacctgatccacaaggctaactttgtagcatgtcacaacccatcttatgtaaacaaatacaacatggttcaggaattagttgacggaggaacattccttctgaactgctcttgggacatggaaggtcttgagaaacatttaccaggacaggtaaaagcattcatcgctgatcacaacatcaagttctacacaattgatggtattaagatcggtaaagagatcggacttggcggacgtatcaatacagtccttcagtcagcattcttcaaactggcatctatcattccggaagaagaagcaatcgatctgatgaagaaagctgcaaaagctacttacggaagaaaaggtgacaagatcgtacagatgaactacgatgctatcgatgccggtgctaaacaggtagttgagatcgaagttccggaatcttggaaatcttgtgaagacgaaggattattcacaccagaagttaagggtggaaaagacgatgttgtagcattcgttaagaacatccagtctaaggttaatgctcaggaaggaaatactctgccagtatctacatttactgactatgcagatggatctacaccatcaggtagtgcagcatatgagaaacgtggtatcgcagtagatatccctgtatggcagtcagaaaactgtatccagtgtaaccgttgtgcatacgtttgcccacatgcagttatccgtccggtagcacttacagaggacgagcttgcaaaagctccagaaggaacaaaagctatcgatatgatcggtatgccgggaatgaaattcactatgactgtatcagcttatgactgtacaggatgtggatcttgtgtaaacgtttgcccaggtaagaagggtgaaaaagctcttgttatggcaaacatggaagaaaatgcagcagagcaggatatctttgatttcggacgtgagatcgaggttaaaccagaagttgttgctaaattcaaaccagagacagttaagggaagccagttcaaacagccattacttgagttctcaggagcttgtgcaggttgtggagaaacaccttatgcaaaactgatcacacagttattcggtgacagaatgtacatcgctaatgcaacaggatgttcttcaatctggggtaactcttcaccgtctacaccatacacaatgaactctaagggacagggacctgcatggtctaactcactgttcgaagacaacgcagagtttggatatggtatgttacttgctcagaaagcaatcagaaagagactgaaagaagaagttgaaactgttgcagcatcagagcaggcttcagcagaggttaaggcagcttgccaggaatacctcgatacattcgcatgtggtattacaaacggagatgctacagataaattagttgcagcattagacggatgtgactgcgatacatgcaaagacatcgttaagaacaaagacttcctcgctaagaaatctcagtggatcttcggtggtgacggatgggcttacgatatcggattcggtggagttgaccacgtattagcaagtggtgaagacatcaacatcatggtattcgatacagaggtttactctaacacaggtggacagtcttctaaggctactaagactggtgctacagctcagttcgcagcaggcggaaaagagacgaagaagaaagaccttgcaagcatggctatgagctatggatatgtatacgttgcacagatcgctatgggtggagacttcaaccagactgtaaaagcaattgcagaggctgaggcttatccgggaccatctctgatcatcgcatacgctccatgtatcaaccatggtatcaagaagggtatgagcaaagctcagacagaggaacagttagcagtagaatgcggatactggaacaacttcagattcaatcctgcagctgaaaagggaagcaagttcactcttgacagcaaacagcctaaggaagaagattaccaggcattccttgacggagaagttcgttacaatgctcttaagagagctaatccggaaaaggctgcaagactcttcgctaagaatgaggcagaggctatggaaagatacgattacctgtcaaaactgacagacctttacaaagtagaggagtaatcatatctgattagcaatagaatagtataaatcatgactcccgcagattcgaaaggatctgcgggagttttgcgttgtcatgcatttgccatattgtattgacaaaatagatcaaagatgataaaaatattattatatgaataatgagactagatagaggcgcaggtttcatcagtaaggcagaacaacagataaagggaaatcatttctgcctgaaagggaaaactgccgaaggaagatatcatcccttattatattcgagatatacttcctgggacgtagcagaatatgctgcggactgtcacttcagtaagtggagcgctatcggagtatatagaagatataagagtttaattatgtaatttgtatttagagttatatagaggacataaatgaagtgttgaatgatctgaaaatacggatgtcctgcttataagatgatatatgccatgagcaatccacgcagaggaaattgttcatggtatttttttggaaaaaaacgaaggagagagttatgagaaaaagaaaaaaattactctttgccgtactcacctgcctcatgatctttgcatgcggtgcaattaccgtatttgcggcagatggaggaaaagagtatgtaccaaagatgtattcatcattctgggcactggtacccccaattgtggcaattggtcttgcactgatcacgaaagaagtgtatagttccttgtttgtcggaattgcgatcggaggaatcttctggtctaatttccattttgaaaaggcagtattgcatatatttgaagatggaatcgtaggagtactgacagatagctataatatgggaatcctggtattcctggttattcttggaattatggtctgcatgatgaataatgcaggaggttcggcagcatttgggcgttgggctagtattcacatcaagacaagagttggggcacagcttgcaacgatcgtgcttggaatcctgatctttattgatgattattttaactgcctgacagttggaagtgttatgcgtccgatcacagataagcacaatgtatcacgtgcgaaactggcgtatctgatcgatgcgacagcggcaccggtatgtatcatcgctccaatctcatcatgggcagcggctgtaacaggatttgtaaaaggtgaagatggattttctatttttatgcgtgcgattccgtataactattatgctttactcacaattcttgcaatggttttgatcgtagtgcttaagattgattatggcccgatgaaattacatgaagataatgctgtaaagggtgatatctatactacaccggacaggccatatgcaaatgctgagaatgagatcgtagaagaaaagggaaaagtgatcgatctggtattcccgatagtggtcctgatcattttctgcatctgcggtatgctttatacaggaggcttctttagtggaacaggctttgttaaagcattttcggcaagtgatgcatcggtaggtctgatgcttggaagtttcttcgcattggttgttacggttgtattctatgcacttagaaaagtacttaagttccgtgaatctatggaatgtgttccggaaggattcaaggctatggtacctgcaatcctgatcctgacatttgcatggacattaaaagcaatgacagacagtcttggcgcagcagagtatgtggctaatgttatgcagtccgcagctggaggattattaaacttcctgcctgcaattatcttcctcgtaggatgcttccttgcatttgcaactggaacatcatggggaacattcggaatcctgatcccgattgtagtagcggtattccagggaacgaacgagactatgatgatcatctctatctcagcttgtatggcgggagctgtatgtggagatcattgttcgcctatttcggatacaacgatcatggcatccgcgggagcgcagtgtaatcatgtcaaccatgtaacaacacagttaccgtatgcggcaaccgttgcagttgtttcctgcattacttatgtaattgccggatttgttcagaatgcattgatctgtcttccgatcggtatggtacttctggcagcagctttactgttcatgaagaagagaacagaaagccattcataaatgatttgttaaaaaattaaaattagcagagacttcaaagactctttgccttgcataaaagtatgtggcgcaaaagttgctttggagtctttttttgataggtgcagaataataagaaaggtgttataatatcttgcatgagtggcaattattccagtagatatattgcggggcagaagaatcttctgctttggggaaatggaagattgcagacgaaaggagaatatagaaattcatgagtgtaaaagacttaagtgcttacgaattagtaaaggaagaagatttaaaagggatcaaatcccacggaatgctgttaaagcataagaagagcggggcaaggatcttactgatagaaaatgatgatgacaacaaggtattcaatatcggattccgtacaccgccgtcagacagtaccggagtaccacatatcatggaacattccgtactgtgtggatctaagaatttcccggcgaaggatccgttcgtagaactggtaaagggttcactgaatacatttttaaatgcaatgacttatccggataagacggtttacccggtagcaagctgtaatgataaggatttccaaaatctgatgcatgtatatatggatgcggtattctatccgaatatttatcagcatgaagagatcttccgtcaggaaggctggagctacaagatggattctctggaagatgatctggcttacaacggtgttgtatataatgagatgaagggagcattctcttcaccggaaggtgtgctggacagagtggtattgaatacactgttcccggatacctcatatgcgaacgaatctggcggggatccggaagtgattccggaacttacgtatgagcagttcctggatttccacagaagatattatcatccgtcaaacagttacatttacctgtatggaaatatggacatggaagaaaaattaaactggctggatcaggaatatctgagcaaattcgactatgcgccggtagattccaagatccgctatcaggaaccatttgataaagtaatcgaaaaagagatgccatattccatagcaagcgatgaatcagaagaggataatacttacatttcttacaataaagtcattggaacaagcctggatgagaagctgtatctggcatttgaagtattggattatgcattgttatctgcaccgggagcaccgcttaagagagcacttacggatgccggaatcggaaaagacattatgggatcgtatgacaacggaatttaccagccgatcttttctgtcattgcgaagaatgcgaatgtagaacagaaagaagcatttgtgaaagtaatcgaggatacattaaaagatattgttgaaaatggaatggataagaaagctctcgaagccggaatcaattataatgagttccgttacagagaggcggatttcggaggttatccgaagggactgatgtacggactgcagattatggacagctggttatacgatgacgaaaaaccatttatccatatcgaagcgctggatacattcgagttcttaaaggcacaggtcggaacaggatattatgaagaactgatccgcaaatatctgttagagaatacgcacggtgcgattgtgctgatcaagccggaaaaaggacgtactgcaagaatggacaaagaacttcaggagaagttacaggcatacaaagaaagtcttacagaagaagaaagaaaagaactggtagagcgttccaatgcattagaggcatatcagtcagcaccggatgcagtagaaaatcttgagaagatcccggttctttcaagagaagatatttcaaaagagattgagccgatcatcaatgaagaaaaaagaatcgcagatgtaccggtagtttaccatgagattgagacaaatggcatcggatacgtggatgtgttattcgatatgtcaggtgtggaagaagcagatcttccgtatgtcggaatcctgcagggagtacttggagtcattgataccgagaattataagtacggagaactctttaatgagatcaacgtgcataccggcggtatcggaacatcactggaactgtatacagacatttccaaagtgccggaaaaagaattcaaagcaacatttgaaatcaaaggaaaggcattatatcagaagctgccagtcgtattccggatgatggaggagatcctgacacgttcgaaactgggagataccaagagaatcagagagattcttgcaatgcagaagtcaagacttcttatgaaattccagtcttccggacatacaacagcagtgcttcgtgcgatgtcttatgcatctccgtcatctaagttaaaagacatgacaagcggtatcgagttctatgataagatcgcttatatcgaggaacattttgaagaagaaaaagacgtattggtacagaagcttcagatgctggctcataagctgttccgtgcagacaatatgatgatcagttacacggctgcaaaagagggcctgaacggcatggaagagctggtagaaggtctgaaggaagcaatgttcgaagatccggtggaagataccagatgcatactgcactgtgagatgaagaatgaaggattcaagactgcttccaaagttcagtatgtggcaagagtcggcaactttattgataacggggcagattatacaggtgcattgcagatcttaaaggtgatcttaagctatgattacctgtggcagaatatccgtgtcaaaggcggcgcttatggctgcatgagcggattcagccgtaccggagaaggatattttgtatcttaccgtgatccgaacctggaaagaacaatggaagtctatgaaggcatcgcagattatctgagaaactttactgtcagtgaccgtgacatgaacaaatatattatcggaaccatgagtaacattgaccagccgatgacaccgtctgcaaaaggagaccgttcgtttaatctgtacatgaataaagtcagtgcagagacaatcaagaaagagcgtctgcagatccttgaggcaggacaggaagatatccggaaactggcggatgtcgtagaggcagtgatgaaagccgaacaggtctgcgtgatcggaagcgaagagaagatagaagaagcaaaagatatgtttaaaaatgtgacgacattttagttgtcttcaacagataaaagaacaggagaaaatatgaaaaaggattataaatcaggattcgtaacattgatcggtcgtccaaacgttggaaaatcaactctgatgaaccagctgatcggacagaagatcgcgattacatcgaataaaccacagacgacacgtaaccgtatccagaccgtacttacaacagatgacggtcagattgtgttcgtggatacaccgggaatccataaagcaaagaacaagcttggggagtatatggtcaatgtggcagaacgtacattgaatgaagttgacgtggtgctctggctggtagagccgacaacatttatcggagcaggtgaacagcatatcatcagccagcttaagaaagtaacgacaccggttgtactggtcatcaataagatagacagtgtaaagaaggaagatgttcttccggccatcgctgcgtacaaagatgtctatgactttgcagaaatcgttccggtatctgcgagaaacggtgacaataccgatgagcttgtaaaagtgatcatgaaataccttccgtacggaccacagttctatgatgaagataccattacagatcagccggagcgtcagattgtggccgaactgatccgtgaaaaagcactgcactgcctgcaggaagagattccgcacggtatcgcagttgccattgacagtatgaaagtcagaaataaagtgatgcacatcgatgcaacaattatctgtgagcgcgattcacacaaggggataattattggtaaaaaaggaagtatgttgaaaaagatcggaagtactgcacgttatgagatcgagaaaatgctggatcagcaggtcaatctcaagctctgggtcaaagtaaagaaagactggagagacagtgaattcctgatgaaaaattttggataccgcgaagatgaataaaaagcagtgcccatgggagaacctaatcttagagcattaaaaaatatgccctggcaaaggatgaggtgatcatatggaagagtactgggacagattcgtcgcatcaggtaagatagaagattatctgtattataaaggtatgagtatctgtgaggagacgataaacagatacaaagaaggagatacaattggtaaatcagattacactgactggcatgatactgacagcagcaccgataggtgaatatgacagacgagtggtaatactgaccagagaaagagggaaaatctcggcatttgcacgtggtgcaagaagaccgaacagtgcactgatgggagtgacgagccctttttcatttggagagtttactgtatatgaggggcggacatcttatacgctggtgtcggcctctgtttccaattatttccaggaattgcgtacggatgtggaaggtgcctattacggattctattttatggatctggccgggtattatgcaagagaagcgaacgatgagaccgagatgctgaagcttctgtatcagacgctccgggcactgacgaacatacatatcccgaatgaactgatacggtgcatttacgaattgaagaccattaccgtgaacggggaaggtccgcaggtgatggaatgtatcatgtgcggggataaggagcgggaaaaagtatttagtatacggagaggcggcgtgatatgcacgcagtgtgccggccatatttccgatggaatccggctgcttccgtcgacattatatacattgcagtacatcgtatgttccccggttgagaaattatatactttcgttgtaaaagaagatgtgcttggagaactaaagaacctgacgaaagcgtatctggatgaatatctgggaaaacgcttcaaatcattggagatattggaaacaattgtacgataaggcttgaaaacaaagagggcagacgctataattaaattcaattacgaatattttgagaaggtgaggatgaaaaaatggcagaaaagactatggataagatcgtttcattggcgaaagcaagaggatttgtatatccgggatctgagatctatggcgggcttgcgaatacatgggattatggtaatctcggagtagaattgaaaaacaatgtaaaaaaagcatggtggaagaaattcattcaggaatctccgttcaatgtaggtgtggactgtgcgatccttatgaacccacagacatggatcgcaagtggacatctcggaggattcagtgaccctctgatggattgtaaacaatgtcacgagcgtttccgtgcggataaagtcatcgaagattattgtgcagagaataacatcgaactggatggtgcggtagatgcatggacacaggagcagatgaagaactttatcgatgagaatcagattccatgtccgacatgtggaaagcatgactttacagatatccgtcagttcaacctgatgttcaagacattccagggagtaacagaggatgcgaagaatacggtatatctccgtccggagactgcacagggaatcttcgtaaacttcaagaatgtacagcgtacctccagaaagaaactgccatttggtatcggacagatcggtaaatcattccgtaatgagatcacacctggtaacttcacattccgtaccagagagttcgaacagatggaactggaattcttctgcaaaccggacacagaccttgaatggtttgattattggaagaagttctgtctgaactggctgtctgcattaggactgaaagatgatgaagtacgttaccgtgatcatgataaagaagagctttctttctacagtaaagcaacaacagacgttgagttcttattcccattcggatggggagaactgtggggaatcgctgaccgtacagattacgacttaacacagcatcagaatgtatccggacaggatctgacatactttgatgatgagacaaaggaaaaatacatcccatacgttatcgagccgtcactcggtgcagaccgtatggtacttgcattcctttgcagcgcttatgatgaagaagagatcggaacagaggagaagcctgatacacgtacagttcttcacttccatccggcactggcaccggttaagatcggtgtgcttccgctttctaagaagctgaatgaaggcgcagagaaagtatttgcacagttaagcaagaaatacaactgcgaatatgatgaccgaggaaatatcggaaaacgttaccgtcgtcaggacgagatcggaacaccattctgtgtaacatacgatttcgattctgaagaagacggagcagtaactgtccgtgacagagataccatggaacaggaaagaatcaagattgaagatctggatgcttactttgagaagaaattcgagtggtaagaatcagaaaattgaagcataagagataaaacaagagaccgtggaatcggctatgtatgccaaagtgcatgcatggcggtttcacggtcttttttatatatgcaggtatgtagaaattgatttgtgcataatgtacaaaaaaataaaatataaaataaaatattgatttaaaataaatgaaagagtatatttatagaaaacacttaattcatcattcataaaatctataagtaaggaggaaagactttggataaactgaataatatcgtattactgattcagcattatctggcagattatattttgatcattctgctgttaggaggaggtgttatatttacgattcggctcggatttatccagatacggggatttaaggccgggtggaaaagaacgtttggcggactgttttcgaaaaaaggaacggcgggaaaagacggtatgtcatcatttcaggcacttgcaacggctattgcagcacaggtaggaacggggaatattgcaggagcggcaacagcattggcaataggcggaccgggagcgattttctggatgtggattgcggcatttcttggaatggcgaccattttcggagaagctattatggctcagaaatataagcatgtaggaaaagacgggcatgtaacaggcggaccggtttattatatccaggcggctttcaaaggtacttttggaaaaatcctggcagctgtcttttctgttctgatcatttttgcactgggatttatgggaaatgcggtacagtccaactcgatagcgtcagcatttcatactgcatttggtataccacagatagtggtggggatcattatagcggttatcgcattgtttgtatttgttggaggaatttccagaattgcaaaagttacagagacgattgttccaatcatggcatgtttttatattatcggatcactgattgtaatctttgcaaactttaaagaaatcccatatgcattttattctatcgttgtaggtgcttttaaaccgtctgcagtcagtggcggagcagtgggagcaacggtaaagcttgcactcacaaaaggtgtggcaagaggactgttctcgaatgaagcaggtatgggatcgacgcctcatgcacatgcggtagcgaaagtagaacatccggtagagcagggatttgtagcaatgatcggtgtattcattgatacctttgtaattctgaatctgacggcactggtgattattacaacacagtcgattccgacagggcttacaggtacagcgctcagccagtatgcattttcgagtgtattcggaaaattcggtaatgtatttattgcaatctgtatgttctttttcgcattttcgacgattatcggatggtatttctttgggcaggccaatgtgaaatatttatttggaaaaaatgcagtaaagccgtatgcggttctggtttcgctctgtgtattgttaggttcacttgcacaggttgatttggtatggaatatggcagactgtttcaattcattgatggtaattcctaatattcttgcattgttcttcctgagcagccagatgaaagaattgcatgacgattactatcataatttcttaaaaaataaaaaagtaaaataaagaaaaaagactttgtgaataatgaataagtgaaaacgaaaaacggagggaaaatagaaaaatatacaaaaagcagattacataattgttcaaaacaactaaaaaaagataaaaaaagataaagtattgcaatataagtaacaatgatgtaatatagaggaagaaaataaatgatataaaaattttctataactgaaaagaagagtgggatgatatttctcaagagagagctgccagggcagccgccgaagaggcaaaccggtatcgaaaaaatagggaaaaaccggacgaaactttcaggcaaaaggacggagaaagggactacattctgaatcttgtactgtaagaggaattagatttaacaggacgaaagacagaaaaggacgtttgaacgcagtaattggcgtgggacgtcctttttattttctaaggctggttgaaataacataagagaggatggacatgaatgagtaagtatatggtgatcacaaataatccgcttgtacgatccaggctggatgatacacatgaggtaatctatctggaactctcttatgaagaacttctgaaggtagtaagggacagaatttacgaaggtcacagattattgacacatccattatcaggaagtgtaaaaccaaaggaaacaccgtacaaatctgtgctgatatctgagagaaaggagaaggtggatggggaatctgtcagattgattgaaaatgcgattctggtatgtcagaaatttcaagataaaagtaagtattacaaagaagaagtttataaggattttcaattggttgactggactttattagagagcggactggcgtctgcggatgtctggtagaagacagtgataaaagaggttgtaaaacgggcagcgttttataaaagaagatgaaaagaggaggaaaagatcgtgagattagaaatggggaatatttacattaaggatatccagtttgcggatacatcaaagattgaagatggaatcctgtatgtagataaaggagctgtaaaagcggtagcattggaagatgagcatatcaaaacagtcacttttgatattgcgaaaccaggagaatcagtaagaatcacaccggtaaaagatgtgatcgaaccaagagtaaaagttgagggaaaaggcggggtattcccgggaattatttcaaaagttgataccgttggttccggaaagacatatgcattaaaaggaatggctgttgtaacagcaggaagaatcgtcggtttccaggaaggtatcattgacatgacaggacctggagcagattacacaccattttcaaagacattgaatctggttatggtatgtgaacctgtagaaggtatcaagcagcatgagtatgaaaaagcagtccggtttgccggattccgggtagcagcttacattggggaattagcgcgtgagcttacaccggatgagacaaaagtatatgagacatgcggtatcaaagaaggaatcacacagtatccggatcttccgagagtcgcatatgtccagatgcttcaaagccagggactcttacatgacacttatgtatacggagtggatgcaaagaagacacttcctacaatcttaagtcctacagagatcatggacggagcaatcgtctccggtaactgtgtatctgcatgtgataagaatcctacatatgtacatgagaataatccggttgttcatgatctgtttgaagaacatggaaagacactgaactttgtatgtcagatcattacaaatgaaaatgtataccttgcagataaagaaagatcttctgactggacagcaaaactgtgtaagatgttagatctggatggcgttatcgtatcacaggaaggatttggtaatccggatacagaccttattatgaactgtaagaagatcgaagcagaaggcatcaagactgtaattattacagatgagtatgccggacgtgatggaaaatcacagtctcttgcggacgcagatgtggcagcagatgcggttgtaacaggtggtaatgcaaatgaagttgttatcctgccaaaacttgataaagtaattggaactttagattatgtgacaaagatcgccggagcaagtgaagatacacttcgcgaagatggatctcttgaagtagaacttcaggtcatcacaggtgcaacaaatgagacaggtttcaataagctgagtgcaagatagaagagggaggataagaatatgtctaagataaaagtagttcattatatcaaccagttctttgcacagattggtggagaggaaaaagcagactatcctgcagaaattcgtgttggggaagttgtaggacctggtttggcactgacacagaattttaaagatgaagcagagattattgcaacagttatttgcggagattcttacttcaatgagaaccttgaaaaagcaaaagcagatattcttgcaatggtaaaagagcaggcaccggatgtatttattgcaggaccggcattcaatgcaggacgttatggtgtggcttgcggtacaattgcggcagctgttcaggaggaacttggaattcctgcagttacaggtatgtatgtagaaaaccctggagcagatatgttcaagaatgatgtctacatgatctcaacaaagaacagtgcggcaggtatgagggatgcagtgaagaaacttgctccgttggcagtgaaactggcaaaaggagaaaaaatcggttcatctgcagaagaaggatatatcccaaatggtgtacgtgtaaacttcttcgaaaaagaaagaggatccaaacgtgccgttaagatgctgatcgagaaattgaatgacaagccatatgtaacagaatatccgatgccgaattttgacagagtagaaccaaatccggcagtgaaggatcttgcacatgcgaagattgccctggttacttccggtggtatcgttccaaagggaaacccggaccacatagaaagttcaagtgcttctcactatggagagtatgatattacaggagttacagatcttacagaagagacatatgagactgcacatggcggatatgatccggtatatgcgaatgaagatccggaccgtgtacttccggtagatgttcttcgcgatatggaaaaagaaggtgtgatcggatcgcttcatcatctgttctatacaactgtaggaaatggaacatctgtagcatccgcaaaagcatttgcagcagagtattcgcagaaattaaaggctgacggagtagatgccgttatcctgacctccacctgaggtacctgtactcgttgcggtgcaacgatggtaaaagaaatcgaaagagcaggaattcctgttgtacatatctgtacagttactccgatttctatgacagttggtgcaaatagaatcgtaccggcgatcgctattccacatccactcggtaatccggcactggatcaggaagaagaaaagaaattacgccgtggaatcgtagaaaaagctctggaagctttgactacggaagttgacggacagaaagtttttgaatagtacatgtgaatatagaaggagatataacgtaaaatgagtgagatttatgacgttatcattctaggtgcaggtcctgccggtctggcggcggggctgtatgcaggaagaagccggctcaatgttctgatcatcgaaaaaggtcaggatggaggtcagatcgcaattactgacgagattgaaaattatccgggtcagattgtagaaggggaatccggaccatccctgatcgcaagaatgacagagcaggcagaaaaattcggggcaaaaagggtatccgatatgatcaaagaagtagaacttgaaggagaggtcaaggttcttaagagcgaaaagaatgaatatcgcggaaaaaatgtggtcattgcaacgggcgcacatgcaagaccgatcggatgcaaaggagaaggacagttcaggggaaaaggtgtttcttattgtgcaacatgtgatgcgaacttctttgaagattttgaagtatacgtagtcggcggtggggattccgcggtagaagaggctatgtatctgacaaaattcgcaagaaaagttacgattattcacagaagagatgaactgcgggctgcaaaatcaattcaggaaaaagcatttaagaatccgaagcttttctttatgtgggacagtgtcgtagaagaactggaaggtgacgacatccttcaggcaatgtatgtgaagaatgttaagaccggagaagtaacaaaggtcgaagcagatccggaagacggaatgttcgggttgttcggatttatcggaacggttccgaatacgaagatctttgaaggaatcattgatatggatgaaagagggtacattaagacggatgctgatatgcataccaatattccgggggtatatgcagccggagatgtacgtgtaaagagcctgcgtcaggtggtaacagcggcagcagatggtgcgatcgcagctgttcaggtcgaacgcagcatgtcagattatttttaggagaaactccggaatttaaccgggtcattataataaaaaggaggagaaatgacatgatagatgtagataagactacgtttgaagaagaagtattaaaagcagaaggttatgtatttgttgacttttatggagatggatgtgttccttgtcaggcactgatgccgaaggtacatgaatttgcagatacttatgggaacaagctcaaattcacatcgttaaatacaacaaaagcacgccgtcttgcaattgcccagaaagttcttggacttcctgtgatggcaatctataaagacggggaaaaagtagaagagctggtaaaagatgactgtacagctgaagcaattgaagcaatgattaagaaatatatctgattcccgagaggtaatttctaaatcatagatgaatgaccttgataaggtttaaataaaaagaaaggagatagtaattatggctattttagaagggaaaaaagcaataattatcggagaccgtgatggaattccgggaccggctatcgcagaatgtgtaaaaactgcaggtgctgagatcgtattctcatctacggaatgtttcgtctgaacgagcgcaggcgcaatggatctggaaaaccagaagagagtaaaagaattcgctgaagaatatggtgcagagaacttggtagtagttcttggtgcagcagaaggagaggctgcaggtcttgcagctgagactgtaactttaggcgatcctactttcgcaggtccattgacaggggtccagcttggactcacggtatatcacgtatgcgaaccagagatgaaagaagagtttgacgaagcggtttatgatgagcaggtaagcatgatggaaatggtattagatgttgatgatatcatttctgagatgcaggctatcagagatcagttatagtccgaagtttctcatacgaatgaaaaggacaggtccgttgtgttcctacagggactgtcctttttctaaatttcagggtatttattttgaggtaaatggaaaggtggataaccaatgaacagtgtaattaaaggggcaagttatgtattagtacatacaccagatatggttttatacaacggaacaacacagacaacagaaagagttgtgaatccggattcggaatatttaaaagcagtaccggagcatctccgttcttatgaagaggcagtgtcttactggccaaaccagacttatatcggtaatgcgcatccggatgaacttgccgaaatagaattcccgtattatgacaagaaaaaagaaggggcagaacgttacggaaaatatggagagatcatgccggaagaagaattcttacttctggtacaggcatgtgatatgttcgaagtagtgagactggacaaagcatttgttgaaaaatataaagaagcatttgccaaagatccggtaatctctgatgacatagttgaaaaaatccatgaaggggtggaactttctgagatcgaaacgctgatcagcgaagatcatgcggaaccattatattttgagcatcagttagtgggctgtgtaaaaccggcacatgacattgatgtgaacctgtcttctcatgttatgcatgaaaatcttatgagcaaggcttccagtgtacttgcccttctctatgctgtgaagaatgcaggaattgagaaatcagatgttgaatatgtaattgactgtgcggaagaagcttgtggagatatgaaccagagaggcggcggtaactttgcgaaggcggcagcagaggtggcaggtcttgtcaatgcaaccggatcagatgccagaggattctgtgcagcaccgacacatgcactgatcgaggcagccgcactggtaaaagcaggcgcgtataagacggttgtcgttacagcaggaggctgtactgcaaaacttggtatgaacggaaaagatcatgtaaagaaaggccttccgatcctggaagactgcctgggaggatttgcagttgttgtatctgagaatgacggagcaaatccggagatcgatctcggaatgcttggacgccacagtgttggaaccggttctgcaccacagaacgtaatcggaagcctggtagcagacccgcttgaccgtgcaggaatgaaaattacggatatcgataaattctcaccggagatgcagaatccggatatcacaaaaccggcaggagcaggagatgtaccgcttgccaattataagatgatcggtgcactggctgttaagagaggcgagctggacagaaaagaacttgcaaactttacaaaagaacatggcctgaccggatgggcaccgacacagggtcatattccttccggtgtcccatatgtaggatttgcaagagaagacattctggatggaaagattaagaatgcaatgatcatcggaaaaggaagcctgttccttggacgtatgacgaaccttttcgatggggtatcattcgttattcatggcaatacagcagctgtacaggaagaagctgccggtgtatctgaggaagaagtaaagggactgatcgcaaaggcgatgaaagaatttgcagcaaccctgatggctgaatagggggtgtgcaggatggcagataagattgaaaaaatcattgcagacacatttctgcagatggcagaaggtctggagaccggaaactttggaaagaaaccgaggattgcactgaccggaatgggtagcgaacatggagaagagaatgccatggaagccgcaaagatggcagcaaaagatggaattgacgtatattatatcggaacactggaagcagatggcattactaccgtgaaggtggcagatgatgaagaaggccataagaagatggaagaattacttgcatcgcatgaaatagacggtgcggtaacgatgcatttcccattcccaatcggggtatcgacggttggacgtgttgtgactccggcgaagggaagagagatgttcattgccaatacaaccggaacttccagttcagaccgtatagaaggaatgatcaaaaatacaatctatggaatcatagctgcaaaggcgtgtggtaaggagcatccgacagtgggaatcctgaatgtggatggtgcacgccagacggagatggcattaaaagaacttgagaaaaacggatacgacattacgtttgccgaatcagcaagagctgacgggggttgtgtaatgcgtggaaatgatgtactgcagggaacaccggacattatggtatgtgattcgctgaccggaaatatcatggtgaagatgttatcttcttacacaacaggaggcagctttgaagcatccggatatggttatggccctggtgtcggggaaggttatgaacagttggttatgattgtatccagggcatcaggagcaccggtgatcgcaggcgcaatccgttatgcggcggagctggtaaaaagtaaagtatttgagatcgcaaagaaagaatttgtagcagcagacaaagccggtttaaaagatatcctggcggcaagaaaacagatgtcgaaaccggcatcggaagccatagaagtaaaggctccgccaaaagagatcgtgacatcccagattgcgggaatagaagttatggatctggaagatgcggtgaaagtactgtggaagcagaacatctatgcagagagcggaatgggctgtacaggaccgattatccgtgtgtctgatgcgaatcttgcaaaggcagaagaggagcttaaaaaggcaggatatatcaattaaaggataacggaaaccaatggtttgagtgaaaaaataagaataaatacgggagtggaagaatcaatagaaagattcttccactcccggtattttttaatatggaatagaagctgccagtggcagcttctatgtattatttccgaccgcgaagtctcttttcacggatatcagcaatggctgtataaagtacatcggatgaagaattgaggcctgtctcacaggaatcctggataactccgatgataaatccaacaccgacagcctgcatggcaacgtcattcggtacaccgaagagactgcaggccatagggatcagaagtaaagatccaccggcaactccagaagcacctgcggcacttaaagctgcaaggacacagaggatgatcgatgtaaggaaatctacatggatatccagtgtatgagcggtagacaatgccataacagagattgtgatcgcagcccctgccatgttgatcgtagctccgagcggaatggagatagagtaggtatcctcgtccagaccgagttttttacaaagttccatattaaccggaatattggcagcagaacttctggtgaagaatgctgtaataaagctttctttcagacaggtaaataccagtggaaatggattctgttttgtgaaaataaatacaatgaccgggttgataatgaagataacaacagccatacttccaaccaggacgaggattaattttccataagaaagtaatgcatccagtccctgttctgagatcgtagagaagatcagacccatgataccgaacggagcacagttgatgatccactgcactgcggtcgccgttgcatcggaaatgttctccagtgcatcttttgttcccttgttcgcgtgttttaatgcaattccaaaaataactgcccagaaaagaataccgatataattagcattgacaatggaatcaaccggattcttaacgagattgttcaaaaggttggtgagcacttctgcaattccgctcggcggagtgatatcggtagcagaaacagagtctgtaaaggtcagtgttaccgggaataaccggcaggcaataacggctacaaaggcagatacaaggttaccaaccatgtacaaaatgatgataaattttaaattggtcttctgaccagacttcatgtgacagagtgcactcataaccaggaagaataccaaaagcggagcaattcctttcagtgctccgacgaacatggttccaagaatcgagattacggatgcctgaggaacaaccagaccaagaaccagaccaatgatcaatccacagatgatccgtttgatcaggctgatgctgttccattttttgattaaatctttcattgtttttttggcaggatttttttgaatcccgcacccctctcttttgtttttttgcttttcgcaagtatgagtatgattatacaggaaaagagcaggaaagtaaatattatttttggtacaaaatgacaagaaaaagaaaaaagtatgtgaaaaaaatgtcatattaaacaaaaaaatatcgtttagaggttgtgcatatgcagtaagagtgttataataatcactgttagtaaagagattgccatctggggagatggcgtttttgggaggttatataatatgcaattaaataatgatggtctgatgtgggcactggtaaaggaaaaaccggaggaagggctgtggatgaagcgcgttccgattccagaagtgggaccgaatgatgtgaagatcaagatccacaagacagcgatctgtggaacagatgtacatatctaccagtggaatgactgggcacagcatacgatcccggtcggccttacagctggtcatgagtatgttggagagatcgtagaaataggggaaggtgtacggggattcaagatcggtgatctggtatccggtgaaggacatattacatgtggaaaatgccgtaactgcctggaaggacacaaagagaactgtaaggatgcaaaaggtgtcggcgtgaaccgtaacggagcatttgcggaatatcttgtgattccgtcaagtaacgtatggccatgtaatccgaacattccggaagagatgtatgcaatctttgatccattcggaaatgcaacacatacagcactttcttttgaggcactgggagaggatgtgttgatcgccggagcaggtccgatcggatgtatggcagcagcaatcgtgaagttctcgggtgccagacatgttgtggtaacagatatgaatccatacagactggaacttgcgaagaagctgggagcaacaagaacagttaacttaaaagaagagaatctgagagatgttatgaaagagatcggaatgacagaaggatttgatgtcggtcttgagatgtccggatcacaggtggcattggatgatatgatccacaatatgaaacacggcggacacattgcactgttaggattacagagaacagatgccaaagtagatcttgagacagtaatcttcaacggattacatctgaaaggaatctatggacgtaaagtatgggatacatggtacaagatgtctacaatgttgcaggcaggacttgatatctcagatatcatcacacatcattttgacatcaaagatttccagaaaggatttgacgctatgatctccggtaattcaggaaaagtcattctggactgggcacatgtaaatgactaggaagagtgcacggaataaagtgggaaaaaggaagaaaaagacagaaaaaacgaagacagaataaaatggagaggttgagaaaatggcacgtaaagacgatattttaagcatttatacaaaagaagtagaaggaatcaaagaagctgggcttttcaaaggagaggcaccttttgtatccccgcagggagcaagagtgaagatggaagacggaagagaacttctttgcatgtgtgcgaataactaccttggactgggagataacccgagactgatcgaggcggctaagagaacatatgatgaaaaaggatacggagttgcatctgtacgttttatctgcggaacacaggatattcataagaaactggagaaaaagatctccggattcctgggaacagacgatacgatcctttattcttcatgctttgatgcaaacggaggattattcgagacgattctgacagcagaagatgcagtcatcagtgatgaactgaatcatgcttctatcattgacggagtacgtctgtgtaaagcaaaacgtttccgctataagaataacgatatggaagatctggaagcaaaattaaaagaggcagatgaagccggagcaagaatcaagctgatcgctacagatggcgtattttctatggatggaatcatctgtaatttaaaaggtgtatgtgatctggctgataaatataacgcactggttatggttgatgacagccatgcagtcggatttgtaggaaagaccggacgcggaacagcagagtattgtggtgtggaaggccgtgtggatatcattaccggaacattgggaaaagcacttggaggagcatctggcggatatacatccggacggaaagagatcattgatctgttaagacagagaagccgtccgtacctgttctctaattctctggcaccggcaattgcaggagccagcctggaactgtttgatatgctggaggagagtacagaactccgtgatcacctggaagaggtaactgcatactacagaaaacagctggtagataacggatttgatattattccgggaacacatccttgtgtacctgttatgctttatgatgagaagacagcagcagaattcgcaaaacgtatgatggaaaaaggtgtatatgttgtagcattctcttatccggtggtgccgaagggaaaagcaagaatccgtacacaggtatgtgcaagccatacaaaagaagacattgatttcatcgtaaaatgctttattgaagtaagagaagagatgggattgaataaataaccggataaaaataaataaaagatgagaaaaaatggtacgtagcatttatgaaaagtggtgcgtaccattttcttttttgtgttatactaaacacagcgtaaactagaaaggagagactgataatggaaagaagaaatgcatggaagacatacacacaggaacagttaaaagaactggatcagatcaatgacagatataaagtatgcctggatgaaggaaagacggagagagaatgtatccgtctgactgtgaaagagcttgaaaagcaagggtaccgtaacctgaatgacatcaaaggaagtttaaagaccggagataaagtctatgcagtatgcatgggaaaaagtattgccatgttccggatcggaaaagaaccattggagaatggtatgaacatactgggagcacatattgattcaccaagaattgacgtgaaacaaaatcctttatatgaaaacgaagaacttgcctatctggatacgcattactatggcggcattaagaaatatcagtgggtgacattgcctcttgctctgcatggagtgattgttaagactgatggaacagtacaggaagtaagtatcggagagaaagaagaggatccggtatttgtagtgacagatcttctgatccatctggcaggaaaacagatggaaaagaaagcaagtgcagtgatcgatggagagaaactcgaccttctgatcggaagccgtcctcttgagaaagaagaaaggctggatgagagtgagaaagaagcagtaaaagccaacgtcatgcggattctgacagattactatgatatggaagaggaagattttctgtcggcagaactggaaatcgtacctgcaggaaaggccagagattgtggaattgacagaagtatgatactggcttacggacaggatgacagagtgtgtgcatttacctcattattcgccatgctggatgtcaaagaagcggtgcgtacttcgtgctgcatcctggttgacaaagaagaaatcggaagtgttggcgcaactggtatgcattcccgcttctttgaaaatgttgtggcagaactggtagctcttacagaaggggaatcagaattgaaagtacgtcgtgcacttcagaattccagaatgctttcttcagatgtgagcgcagcttatgatccgatgtatgcggaagcctttgaaaaaaggagtgcggcatttttcggaaaagggctggtattcaataaatttaccggagcaagaggaaagagcggttccaatgatgccaatgcagaatatctggcagaaatacgtcgtgcgatgaatacagaagatatatcgtatcagttcgctgaacttggaaaggtcgacattggaggcggtggaacaattgcttatatcatggcaaattatggcatggaagttattgacagtggtgtggcagttttaagtatgcatgcaccatgggaagtaacaagtaaggcagatgtatacgaggcttacagaggatataagtcgtttttgcgtaatatctgaaaaaggaagtcgtatatttgcacttaaatgtacggaaataagcacaattgtgcacaataactgaaaaacacaggaaaaatcagcagatttattggtgaaagtcttgacgaaaactggcaaaaacagtaaaatatgaagtgcgacttagaaaatttagttttaggaggtcatgacaaatggcaaaatgggtttatatgtttacagaaggtaacgcaaccatgagaaaccttctcggtggaaaaggtgcaaaccttgctgaaatgacaaacttaggtcttccggtaccacagggctttactgtaacaacagaagcttgtacacagtactacgaagacggcagacagatcaatgacgaaattatgggtcagatcatggaagccatcgataaaatggaaggaattacaggaaagaaattcggagataagaagaatccacttctcgtttcggttcgttccggagcaagagcttctatgcctggtatgatggatacaatcctgaaccttggattaaatgaagaagtagttgagacacttgctgaagcttcaggaaatcctcgttgggcttgggactgctacagaagattcatccagatgttctctgacgtagttatggaagttggaaagaaatatttcgaagagctgatcgacaagatgaaagctgacagaggtgttaagcaggacgttgaacttactgcagaagacctgaaagagctggctaaccagttcaaggctgaatacaaagagaagattggttctgatttcccatctgatccgaaggaacagttaatggaagcagtaaaagctgtattccgttcatgggacaacccaagagctaacgtatatcgtcgtgacaatgatatcccatattcatggggaacagctgttaacgtacagatgatggcatttggtaacatgggagatgactgtggtacaggtgttgcatttacacgtgacccggctacaggagagaacggtctgttcggagaattccttacaaatgcacagggagaagacgttgttgccggtgttcgtacaccaatgcacatttcagagatggaagaaaaattcccagaagcattcgtacagttcaaacaggtttgtgaaactcttgaaaaacactatagagatatgcaggacatggagtttactgtagagcatggtaaactgtatatgttacagacacgtaatggtaagagaacagcaaaagctgctctgaaaatcgcttgtgatcttgttgatgaaggaatgagaacagaggaagaggctgttgcaatgatcgaccctcgtaaccttgactctctgcttcacccacagttcgatgcaaaagccctgaaagaggctacaccacttgcaaaagcacttggagcatctccgggagctgcttgcggtaagatcgtattcacagctgacgatgctgtagaatgggctgaaagaggagaaaaagttgttcttgtacgtcttgagacatcaccagaagatatcacaggtatgaagtctgcacagggtatcctgacagttcgtggtggtatgacatctcacgcagccgtagttgctcgtggtatgggtacatgctgtgtatctggttgcggtgacatcgcaatggacgaagctaataagaaatttacacttgccggaaaagaatatcatgaaggagactgcatctcacttgatggttctacaggtaatatctatgatggtatcatcccaacagttgatgcaacaatcgctggtgaattcggaagaattatgggatgggctgacaaatacagaacaatgaaagttcgtacaaacgctgatacaccacacgatgctgtaaaagcacgcgaacttggtgcagaaggtatcggactttgccgtacagagcatatgttcttcgaaggaaacagaatcgatgcattccgtgaaatgatctgctctgagacagaagaagaaagagaagcagcacttgctaagattcttccagaacagcagggagacttcgaaaaactgtatgaagcactggaaggtaacccggttactatccgtttccttgatccaccgcttcatgagttcgttcctacagaagaggaagacattaagaaacttgctgacgctcagggtaaaactgttgagcagatcaagacaatcatcgacagccttcatgagttcaacccaatgatgggacaccgtggatgccgtcttgcagtaacatatccagagattgctaagatgcagacaagcgctgttatccgtgcagcaatcaatgtaaagaaagctcacccagactggaacgtaaaaccagagatcatgatcccacttgttggagacatcaaagagcttaaatatgttaagaaattcgtagtagagacagcagacgctgagattgcagcagcaaacagcgatcttgagtacgaagttggaacaatgatcgagatcccaagagcagctcttacagctgatcagatcgcttcagaagctgacttcttctgcttcggtacaaacgacttaacacagatgacatacggattctctcgtgacgatgctggtaagttcttagacgcttactatgatgctaagatcttcgagaacgatccatttgctaagcttgaccagacaggtgttggtaaattaatggaaatggctatcgaattaggtaagtcggttaatccaagccttcacgttggtatctgtggagagcacggtggagatccatcttcagttgaattctgcaacaagatcggtcttgactatgtatcttgctcaccattccgtgtaccaatcgctcgtcttgcagcagcacaggcagcaattaaccagaaatagtacactgtaggtgactaacatagaacgttaattagcttatatagaaaaccccttacatcaattatggtgtgaggggttttttacgtgaaaaatgtacaaaagttcttagatatggtaatatgatgattaagataaataggaattgttttaatatgtcttggatgcgg

SEQ ID NO: 2842 - DNA, 150 bp, Unknown
  gut microbiota DNA sequence
cttatctattgtttccttcaagtcgtgactggcagcggatgttaataaataaaatgcccggaagtgtaacccggtggaagccactacggttacgcaattgctgtttaattcttaaggcatttgatacacacggaataaaacttggaaagg

SEQ ID NO: 2843 - DNA, 8324 bp, Unknown
  gut microbiota DNA sequence
tgccactcttcctgtatcttttatacaaaaaaacctcacacatgattgtgtgaggttttcaatacttttattgacttctaactatacaagttcaatcagaacttccatagctgcatcacctttacgctgaccgatcttaacgattcttgtgtatccaccgttacgatctgcatacttaggagcgatctcatcgaataattttgctacaagatcaacttcttttgtatttttcttctttccagcctgtgcagttggaacttcctttacaggataaagaaccttcagcatctgacgacgagcatgcagtctgcttggcatatcctttttgattgttttatcaacttcgtcatatacagtaactttcttaccatctacaacttcttttactctcttgccatctttatctttgcgggcaactttagcttttacagtaacttcttcgaagttatctttttctttaacagctaatgcgataagtccttcagcgatcttgcggatctctttagccttagcttctgttgtaacgatcttaccattgttcagaagtgctgttacctgatttcttaataatgcttttctctggcttgatgttctgccaagttttctatattttgccattttatatatcctccattataacacttggttatgcttcttcgggcttactagccaaatgctctgccatgcacttacgggcttactgacagattattcttcacctttactgaggcttaagcctaactcatctaattttgcaagtacttcttccagggacttacgtccaaggttacgtactttcatcatgtcttccggtgttctgtttgtcagttcttcaactgtattgataccagctctctttaaacaattgtatgaacgaacagaaagttcaagttcatcaatgctcatctcaagaactttttctttttcatcgtcttctttttcgatcataacttcagcagcctgtgccacttccgacagatcaataaagagtttcagatgttcactaagtacctttgcagccagacttacagcttcatccggaagcagtgtgccgttcgtgtatacatccagtgtaagtttatcaaagtctgtaatctgtccgacacgggtattctctactgtaaggttcactcgttccactggagtgtagatagaatcaattggaatcactgcgattggcagttcgtcattcttattcttatcagcactcacgtagcctcttccatttgtaatggtaagttccatatacaatttgctgtctgcaccgccgtttaatgtagcgattacagtctccggattcatgatttcaatatcctgatccacctgaatgtcagctgctgttacaactccttcgccttcgaactcaatataagcagtcttaggctcatcagattcagatgtgtttttgattgccaaagatttcaggttcatgatgatctctgtgacatcttccttaacacccggaatagaactgaattcatgaagtacaccatcgatcttaacctggctgattgctgaaccaggcaaagatgaaagcataattcttctaagagaattacctaatgttgtaccataacctctttcaagaggttctacaacgaatctaccatatttcttatcatctgaaatatcagttatttcaatattgggtttattaaaatcaaacactaagtccacctcctgtgggttacggtttattatttagaatacaactcgacgattaacatctcatctacaggaacatcgattgcttcacgttttggaagttcttttactgttcctttcagaccttccagatcagcttctaaccattctggaacaagacgtccgcctgtaacctcaacgatctctttgtatcttggtgagtttttcttagcttctttgatttctacaacatctcctgcctttacaaggtatgaagggatgttgatctgttttccgtttacaagcacatgcttgtggtcaacgatctgtcttgcttcacgtcttgttctggcaagtccaagacggaatacaacgttgtcaagtcttgactctaagagtaccatcaggttttcacctgtcataccattcatcttagatgctttcttgaagtagttcaggaaaggtttctctaatacaccatagatgaattttgctttctgtttctcacgtaactggagaccatactcgctcatttttctattcgctctttttaactgtctgttagactttttatcaattcctaaataaactggatccattccgagggatctgcatcttttaagaaccggaactctatttactgccatgtttttgttttcctcctatataattcggacacatacaatccgttaacgtagtgaataataatagtactagactcttctgcgttttggtggacggcaaccattgtgtggtactggtgtaacgtctctgatacttgttacatcgattccgcatgcctgcagagcacgaattgctgcttctctacctgaacctggtcctttaaccattacgtcaactgattttaaaccatgtactaatgctgctttagctgctgtttcagctgccatctgagctgcataaggggtagattttcttgaacctctgaatccgagaccgcctgcacttgcccatgacagagcatttccctgtgcatctgttaatgttacgattgtgttattaaaagatgactggatgtgagcctgtccgtgttcaacgtttttcttgacacgtttctttgtcactttttttgtaactttctttgccataataaaactaacctactctttcctcaaataaattatttcttcttgtttgctactgttctcttaggaccttttcttgttcttgcatttgtcttagtcttctgaccacgaaccggaagtccttttctgtgacggattcctctatagcatccgatttcctgtaatctcttgatgttgagagcgatttctctacgaagatcaccttctactgtctgtgtctcatcgattacagcactgattttctttacatcatcgtctgtaagatctctacaacgaatatcaggattaactcctgcctctgtcaagatacgagttgcgcttgttctaccgattccgtagatataagtcagtccgatctcaacacgtttgtctcttggtaagtctacacctgctatacgagccatgtgaatttcctccattttctttcattgttaattgtctttaataggggacctgtatttttgtcccaggcatgttcggtatcatgccctttccggccaccgctcatagtgttggaagctatgcggtaatgacgagccggcattagaagcaatatacgaggatcatcaccggtctttcgggtgcgccttgtatatttgaaatagtatccacaccacctggcgtgtccactatcagccgcctaaatacatcaaacattcttcagaaattaaccctgacgctgtttgtgttttggattttcgcagataatgcgaatgcttccttttcttttaattactttgcatttttcgcaaattggttttactgatgatctaaccttcacggggatcctcctttcatccattgctatgcctttgttgctacacatttccatttgaaatcgcaactcagagattccagtgcataaacatgcctagaaaacgtgcttatatagtatagcatctatttgcaatataagtcaatagtttttttgaatttatttatctctccagataattcttccttttgaaaggtcatatggagacagttctaatgttactttatctcccggcaggatcttgatgaagttcattctcagtttaccgctgatatgagctaatacctgatgtccattctcaagttctacctgaaacattgcgtttggcagtttttctactacagttccttcaatttcaataacgtcagcctttgacattctatcttcctcctacttttcttctttcatccaatccttaattaactttcttatgcctgcatcatcaagttctttcatattatatgtgccatgaacgatctgcacatgtttttttttcttttttttaggatggacgagtgttctgattcgtccatccaccagatatacatatgtatcgtccacttcttttatgatatacatctttgctttatcatgtccggcttttgatcttgcaagcatgcctgcttcatacatcaccatatctgtttcctcttacttatataagtctattcattctcacaggttaaggacagaattctaggttcgccttcggtgatcaatatcgtattctcataatgtgccgataaagaaccatctcttgttacaactgtccagtcatcgtccagccagtcaacttcatgtgttcctatattgatcatcggctcgatggcaagtgtcatacctggtcttaatctcacacctttacgtcccacttcataattcggaatttcaggtgcctcatgaagtgctgttccgattccatgtccacatagatctcttacaacaccataacctctttcttctgcatatctgccgatcgcaccggatatatcaaataaatgattccctgctttggcaaattttattccttcgaagaagctttctttggtaacctgaatcaatttttttgcttcctcactgacttcaccgaccgcatgcgttcttgccgcatctgaatgatagcccttataaataactcctgcgtccagactgacaatatcgccttcctgaatgatcctgtgtttatccggaattccatgaacaacttcctgattcactgatacacagatggatgccggatatccattataattcaaaaaagaaggaatgcatccataacttctgataatctcctcacccagagtatcaatatctttcgtactcattcccggacgaagtgctttctccagttcattatgaacccgttcaagtatcttaccggcttccgccattaattcgatttctctttcggacttaattgtaattgccatgatcttatgctccaagtatctctacgattgctgcaaatacatcattaatatcaactgttccgtcaacagtttttaaaataccagcttttgtataataatcaatcaacggctgtgtctgctcatgatatacattcagtctcttctgaactgtctctggtttatcatcatctcttaagatcagttcttttccgcaaacatcacagattccctctgtctttgtcggtgcatataccaggtgataagttgctccacatcctacgcatgcgcgtcgtccacccatacggtttacaatgttctcatccgggacatttacatcgattgcatagtcaaccttgtctcccagtgctgcaagtgccttatccagtgcttctgcctgtggaattgttcttggaaaaccatctaaaacatatccgttcttgcaatcatcctgctgtacacggtctactacgagatctactaccagttcatccggaactaacaaaccctgatccatgtatgtttttgccttatttcccagttctgtaccattcttgatattggctctgaagatatctcctgtggaaatgtgtgggatatcatattttgctgcaattttttttgcctgggttcctttgcccgctcctggggcacctaacataataattttcatttggcggttcctccttatagcattttaacccgcgaaaaaaacttcccgcgagtcaaaatattaactatttaaaaatcccttgtatgttcttacaagtgtcattgaatcaatttgcttaagtgtttccaatactacactgacaataatgatcagagaagtaccaccaaaggatacttttgctccaagccatccgttgaataatatcggaacaatctgtaccagaatcaatccgcatgcaccaacaaaaataatataattcaagatttttgtcaaatattctactgttggtcttcccggacgaattcccggtataaatccaccgctcttcttcatattatttgcaatctccaatggattaaatgtaattgaagtgtaaaaatatgcaaagaatacagtcaggacaatatatagtaccagtccccacgaatacttaatctgttccggattacaccagttgctctggtttaatccacgaagaatctcacttccgattccactaccattatcttttccaagaaaagttgcaattacgattggaaactgcatcaaagatgatgaaaagataatagggataacgcctgccgtgttaaccttcagcggaatattagtggactgtccaccatatgatcttcttccaaccactttctgggaatactgtacagcaattcttctttctccatcctgcaggattacggtaaaaacaaccaatgctaagatgattgcaatgattacacatactgcaagaccagcggaagcaatcgcttttcctttcacgaactggtcaaataacgtcgtcatatcactcggaatacgagagataatgttgatcaccaggacaatagatataccattgcccacacctttttctgtaattctctcaccaatccacatcaggaaagcggatcctgccgtgagtgttaatacgacaattgctgcattaacaaaattatacttcaccagaagtccctgacgtccgaatccaactgccatagcgccggattcaattaaagcaagaccaacggtaagatatcttgtaatagcaacaatcttctttcttccagtctcgccgtcacgctgcatctcttctaactgcggaattgcaattgtaagcagctgaactatgattgatgaagtaatataaggtgtaatacttaaggcaaatacagacatttgctcaaaagagccaccggtgaaggcgttaaacaaattgaacgcctctccagtgttttgagcaaagaaattcttaatatattcaccatttacgcctggtgttggcaactgcgatccaattcgtattacgattaacatcaaaaatgtatatccgatcttctttcgaatatcctttatcttgaatgcctttcgaaatgcttctaacattagatcacctctgcttttccacctaacgcctcgatcttagctacagctcctgcactaaatgcatctgcctgaactgtaagcttcttagtaagttcgccatttccaagaatcttaactccatcctttggatttgtaacgataccctgttcgattaatgtatctacagtaacaactgtatcattttcaaatacttcaagagcacttacgttgataccaacgattgtcttagtgtttctgttagtgaaacctctctttggtattcttctatataatggcatctgaccaccttcgaaaccaggtcttgtaccgcctgaacgagctttctgacctttatgtcccttaccagctgtcttaccatttccagaaccgtgtccacgtcctcttctgaaattatcactctgctttgatccgtcagcaggtcttaagttagataaatccattgtgacacctccttatccgaataaatgaattatacttcttctacttttaccaggtgagaaacctgtttaaccatacctcttgttgctgcattatctggaagtacaacagttttgttcagcttcttaagtcctaatgcttcaacagttttcttatgcttaggtacagcaccgattgtagattttactaatgtgatttttaaatctgccattttgttctacctccttagccaaagatctcttcaacagatttaccgcgaagcttagctacttcttccggagttttaatctggcgtaatccttcgattgtagcaagtacaacgttctgtttgttgttagaaccaagagattttgtacggatattcttgattcctgccatctcgattacggcacgtgctggaccaccagcgataactccagtaccttctggagccttcttaagtaatacagaagcgcctccgaatttaccgatataatcatgtgttacactgtcattttcatctaatgctacagagatgagatttttagctgcatcttcttttcctttgcggattgcttccggaatttctgtagcttttcctaaacctgcaccaacatggccatttccgtcaccaacaactactaaagctgtgaatctcatattacggccacccttaacaactttggttacacgtttaattgatactactttttcgtttaattctaatgaattagcatcaatacgttcctgtctcatgtgtgctcctccttctagaaattcaacccagcttctctagctgcgtctgctaatgcctgtactttaccctgataaataaatccgcctctgtcgaagacaacgtctttaatacctttttcaagggccttttctgcgattacttttcctaaatatgctgctgcatcaacgtt

SEQ ID NO: 2844 - DNA, 5856 bp, Unknown
  gut microbiota DNA sequence
ggaaaataatcttggcgtagaatgtacagaagaaggaacgacattccgcctgtggtcaccacaggcggaatgcattagtttaaacctgtatcagacaggagatggaggaaatgcatacgagcagattccgatgaaaaaagaagaaaagggtgtgtggagttggaagagtaaagaagaacttcacggcgtttattatgattatctgattacacgcaatggcgaagaagtccgatcagcagacccatatgcaaaggcatgcggagttaatggattgcgcagcatggcagtgaatctgaaaaagaccaatccaaaaggatgggaaaaagatcagacaccagaagaaggaccggagagaatcgtctatgaacttcatgtaaaagaattttcatgggataaagcaggtggttttccagaggaatatcgtgggaaatacaaagcatttacatgcagacatacaacgttaaatgggaatggaattcatccaaccggtttggattatttaaaagaactcggggtgacacatattcagatcatgccaatgtatgattatggttctgtaaatgaagcaggggaagatacggagttcaactggggttacgacccgatcaattacaatgtgccggagggctcctatgcgacagatgccagacatggtgaagtcagaatcagggaaatgaaagagatgatccaggcaattcacgaagctggttttggtgtgatcatggatgtggtttacaatcatacttattcactggattcctggtttcagagaactgcaccttggtatttttaccgggtatttccggacggaacagtttctgatggctctgcttgtggaaatgacgtggcaagtgaaagagagatgtgtgcaaaatatattctggagtcagtgctttactgggcagaggaatatcatattgatggattccgttttgatttgatgggacttctggatgtagatctgatgaatcggattcgaagtgaactggatcagaggtacgggaaaggaaagaagatcatttacggagagccatgggcggcagataagacggctgtagaaggcgataaaaaactggcagcaaaagaaaatatcggacttttggatgaaaatatcggggctttttgtgatagcacccgagatggaatcaaaggttctgcactacgtgcaaaggaagcagggtttataaacggcgcagaaggaaaagaagatgaaatgcttgcaagtgtgacagcatggtgcgcaaatccttatcaggcagaaggttttgaaaatgtgaaagcaccttcgcagattgttacctatgtatcggcacacgacaatcatacattatgggataaattaaaagggacagtcgtagaggaaaaagaatgtatgaggttgaataaaatggctgcatcagtctatatgacttgtcagggaacgctgtttttcttatcaggagaagaatttgcccgcacaaaagatggattggataatacctttaaggctccaatttctctgaatcgtcttgattggaaaaaggcatggaaaaatcatgaactggttcattattatcaggggttgatcgcacttcgcaaacagatttccggactttgtgacaagtcgaaggaaagttctaagcgaattatcaatatgtggaaagaaaaggatgtagtgggatttaccgtggtcaatgatgaagcagcaagatggagccaggtgaaaataatttataatgcaagaaaaagcagctataaagaagaatttttggacgatggctgggaagtcttgagtgatgcagatgacagctggtgctggaaaaaaggaatctgcgtagacagacagatagaagtcgcaccgcagagtgtgttgatactgggacgtaaataattaaggaggagtagtacatgaagtggatttatggaagacaggattggaagacattagagagaggacttgaaaactgctatcttttaacgaacggtctgggaggtttttcttcgcttacgatgatcggagctgtggcaagaaatgatcattcggtattcatggcatgtacgaaagctcctaatcacagagtgaatgtgattcatcgtataaaggaagaactggatataggggaaacaaaatatgttctttcaacccaggaatttgcggatggaacgaaagaagaaggataccgctatcttacagaattttcttttgaaattcttccttcgtggcgttatctgacaagtggagtagagatagagaaagagattgtgatggcacagggcagcaatcagatcgcagtgaattatcatatgaaaaaccgtggtcaggaagaggctgttctctgtgtaactccgttttttcaatttgaacctaaaggggaagatttgaaagaagataagatattttcaagacaagaccaaaagattaccgatggaaagtataatcttttctttgaaacaaatggggagacagaagaatttcaggaaaagaaagaaacgtatttttatcgttacgatgaatgtgatggaagacgagaaaatggaaccgcaagcgcagtgtatcagataaaaaaacgggtaaagccaggagaagagacagatttgacagtaatttattcgctggaaagtcggattgatatggatgcaaaaaaattatttgataaaattaaagaagaacagatccatcatcacgagaagcttataaagacttcaggtttgaaaaataaactggcacagacactggtatgtggtgcagacaagttcctttcgaaaagagagtccacagacggattgaccattcttgccggttttcctttttttgaggattggggaagagatacaatgattgcacttccgggaatctgcatctccacaggaagatttgaaagtgcaaaatcaattttgcggacatttgcatgttatgaaaaggatggattgatgccaaatctgtttccggaaggggagaatgagccactttataatactgtagatgcagcactattatttatcaactgcgtgtggttatattatgaaaaaacccaggacatcaaatttgtagaggaaatgtatccggtaatgcaaagaattatttccggttatgaaagaggaacaaatttcaatatccatatggaagaagatggtcttatcagtgccggagcggggctggatcaggtaacatggatggacgtacgtgtgggagaaatccttccgacaccaagacatgggaaaccggtggaaatcaatgcttactggtataatgcactttgtatcatgcagaaattttctgaaattctgaagaggactgaagcgcagaaatatagaaagcttgcatgcaaagtgaaagaatcttttgtgcgagaattctggatggaagaaaatcagtgcctgaaagatgtaatctcaggaacaaaagcagatatgcagatacgttgtaaccagatatgggcagtgtctatgccatttacgatgttggatgaagagaaagaacgacaggttgtagatatggtgtttgaaaagctgtatacaccatatggccttcggacattagaaccaaaagacgaagaatttcatgcatgttatggcggagagatgataaaaagagatcttgcctatcatcagggaactgtctggactttcccaatgggtgggtattatctcgcctatctgaaagtgaataaaaattcaaaagaagcaaaaaagactgtggcaaagcagatggaagtgctggaaagtgcaatgcgggaaggctgtatcggtcagcttccggagatttatgatggagaaattccggtttcctcaaaaggatgttttgcacaggcgtggagtgtaggagaaatcctgcgtgtttatgaaaaattggaggaagaataagatggaatttaccggtgtataccataaaacgtcagaacagatgagttatcctctggatgaggacagactgattgtaaacattaagaccggatatgatgtgaaacaagtgtttattcattacggagatccttatgaagccggaatcctgggaggaaaggaacggtggaccggaaaaagagaagaaatcatttataaaaagcgtctgccgtatcaaatctggtggacaacaacacttcttcctgcatataaaagatgtaaatattattttgaacttaggacagaaaaggaagtctggtattattttgaagatggttttctgacagaagagcagcttcaaatggatgggcgtatgcagcagtgctttattgtgccctggatgaatccggcagatataaaccgcacaccagcatgggtaaatgatacgatctggtatcagattttcccggacagattctgcaatgggacaccggaaaagaatggaaatgatatcacgccgtggagaaatcacggaaccgtgacaaatcaggaaaaattcggaggaaatctggaagggattcgtcagagattatcgtatcttcagaaccttggaattaccgggatttatctgaatccaatcatggaagcagagtcaaatcacaaatatgacactacggattatacaaagatcgatccgtctttcggtgatgaagaaacgatgagaatgctttgcaaggaagcacatgaaaaaggaatccgcattatggtagatgccgtatttaaccactgtggaagaaaatttgcgccgtggcttgatgtactggaacatggaaaagattcttgttatgcggactggtttatggtggaagactgggagcagattggaaaaagagcagacaccagagacaggcgtttttattcttttgcatttgcagatacaatgccaaagctgaatacgaataaggaagaagtgatagagtatttctgtaaagtctgcgaggaatggattcgaaaatttgatatagacggaattcggtttgatgtaggaaatgaagtatcacatcggttcttaaagcggatgcgagaacatttaaaaacgataaaaccagacatttatctgttgggagaaatctggcacgatgcaagtcagtggctgcaaggagatgagtatgattccgttatgaattacccattgctcagcggaatccatgactttttccttgacaaaacgatgaaaaaagaggaatttgaatatatggtaaatcgttgctataccatgtatatgcagcagaataatgatgtacttttcaacctgttggattcccacgatacggagagacttatgaatcgttttcatgatttggataaattttatcagcagcttgcaattctcttcacgcttccgggaagcccttgcatttactacggaacggaaatcgcaatggagggtgatcatgacccggattgcagaagatgtatgccatggagtgagattgaaagcaaagagcatcaggaaaagattgcaatgatgcggaaactgatcatgcttagaagaaatgagaaaatgtgcagaagccctcatttccattttccggatacatatgaaaatgatcgatgtgtagaatatattaaattagatgaagaaggtaatcaaattgaggttctattaaatgcatcggaggaaaaagtgaaagtaaaaggaaatgggaaaattctttttgcccgagaatttgatggagagatacttggcgtaaatggaacgctcattcgtaaaatttagagaacataaagaagggagaggatatcccggtagaatcagaaaatctgccggagagatatcgagacagagtatggaaaataagaataaatggtggaaaaatgcagttgtatatcagatttatccgaaaagctttcaagattcggatggagatggaatcggtgatattccaggaattatcagcagattggattatttgaaaaaacttggaatagatgcaatctggctctcaccggtgtatcgttcgccacaggatgaca

SEQ ID NO: 2845 - DNA, 1291 bp, Unknown
  gut microbiota DNA sequence
ataggaatttaagataaattattttattatgttaaaaatgtaaattgggaggtaaaaacgatgaaaatttacaaagcaaaagattacaaggatatgagcaggaaagcagcgaatatcatctctgcacaggtgatcatgaaaccaaactgtgtactgggactggcaacaggatctacgccaatcggaacttatgatcagctggttgaatggtataacaagggagatctggatttctcggaggttacgacagtaaatctggatgaatacaagggattgccacgtacgaatgatcagagctattattactttatgcatcaacatctgtttgaccgtgtgaatattgatccggaaaggaccaatgttccgaacggaatggagccggatgcggaaaaagaatgtggaagatatgaagaactgatccgatcactgggcggtgtggatcttcagctgctcggactcggacataacggacatatcggtttcaatgagccgggagaagcatttgaaaaggaaacacattgtgtagatctgacagagagtacgattgaggcaaataagagattcttcgcatctgccgacgatgtgccaaaacaggcatatacgatgggaattaagacaatcatgcaggcaaagaagatcctgatagtagtgaacggagaaaacaaggcagatatcgtagagcgtgctttcttcggcccggtcacaccggaagtgccggcttctattctccagctgcataatgatgtgacgttggttggggatgaggaagcacttgctaaaattgagatttaattcagaaaggctgtggatgcccgaccgatttttattacaaataagtccccagttgttaccggaaacatggatgaaaagagagctgatcaactacgatcagctcccttttactagcaatttataatcttttccacttcatcttctttcgttttcaacagttttgaaatctcagcaactgtaaattttgcttcatatagattttttataagattctttttttcctcaaatttaccttctaattttccctctaattttccctcatcatatgcttcgcctctctgtacttcaatatctgtctcataatcatactcagccgttaacatatttacaacctcgcttccttttcttttcagatagtctgcaagaattcctttttctatacattcttcaattgcatgtttatatggctctacatcttttttcttctgatatttacggattatttctataaattcactatattcccgtattatcggacaacgatccaacaattcatgtc

SEQ ID NO: 2846 - DNA, 12993 bp, Unknown
  gut microbiota DNA sequence
attataataaaataagtgtagatgttagagttaattactctctaacaactacacttttatggtactaaatggtaaatgcgtaaccgtagtggcttccgctgggttacacttccgggcattttatttattaacattcgctgccagtcacgacttgaaggaaacaatagataaggattattgtgaatgtggaatgccgttagaaacaattagagagtcagaagcaccgttaaaggaacgaagcgaacgtgtttgaggcgaacgccgagtttgagcgtagttcctttgcttttaggtgattctgactctcttagtgtttcttatggtatggaacctgaacaagaagccttatctattgtttccttcaaggactgagaggctgcttccccagttaataaattaaacgccaaattaaaccccaatttatttcaacgtatatagaaattcaaaacaccgtatggtatactgacaatgttgctgcctccatactggcaacaggaaggaggtgttcattatggatttggcattatcttttattgtcgctgttgcggctggtgtagtttgccactacatcatcaaatggttagatggcgacaaatagccggtaactagcctgtggagttaagcctttccacaccaaaatcaggaatagaaaaaccctcggatggcactccgagggtttttcgttgctgttcactatggaatagcattatctttttgcctactggcattatagcatatgcaatttaacaatacaatatgcaaatttaatagaaagtgggtatgttcttgcttttcttgtcttttcatgctatactatcacccgttacaaaacccgaaaaaaccaaggtcttacaagggtttcgccgattcccggcgtaaagaagatgatagaaaagacatccaccggatttctttcctatccgctacggcgcgtgtgttcgtgaccttccacacgtaaaacaaaactaaaggagaattgaaaaatgaaaaacaaaaatcttagtttcatgacccaggcagccatgatcgctgcaatctatgtggtgctgacttacatctttgcaccattttctttcggagaagtacaggttcgtatctccgaggcactcactattttaccaatatttacaccagccgctattccgggactctttgtcggatgtctggtcggtaatattctgggcggtgcgatccttccggatattgtattcggcagtattgcaactctgatcggtgcatttttcacatggaaactgcgtgagcagaagccggttgtcgcaacacttccaccgattatttcgaatatcatcatcgttccgttcgtactgcgttacggttatggtgtgacacttccaattccgtttatgatgctgacggttggaattggtgaggtgatctcctgcactgttcttggtctgatcgtgtacggagcattgaagaaatataaaggaacacttttccgcacagcttaatctatatctgaatggtatcaaaaagagcggacatataactcatttcataacagttatatgtccgctcttttttattttctatacacaactatccaatatacgcatttccgcttccggatgtcatctgatccatctcttcatacttcacgctgtgtcttgtactgtcattcaagtcttcatacacaacattcgtatcactatatcccaccagaataaccgcattctgcgaatccagcattgcaatgaccggtctgccctgattgataatgtacaggatctcttctgtcgtacatccggtcaggtcataggcagcaccatcatttatatccttcaaaatatcaattggcttctcctggtttttaagacggtccttgattgtatttaatacgtcatctttctctgtgatcgaatactgcaggttacggttaccacgctcccatacatagtcctgtgaggaatcgactaccactccgttgtaatcatttgctttcttgatcgcatcccctgcctttgtatacacgccctggatctcaccatgtccatagacataatatttctccggtgcgtctttgtctgaaaatgtgatcgtctgcggtgtctcgaacaggatctgttttggtttcagtacttttggttccttatccgatatcccatcattgtatgtcagtcgtacctgtgtctgcttcagatctgtcgcatatgtctccagtgtaatattgcttttcgtcttctgttcattgttcgtaatataatccggagctgttgcagtataagtgtccccatcctttgatgcacgctccagcgtgatcatatcttcatcaaatgctgcatttaaaatgtaaatgccatctgtctgataggttttgatcacttttcctttttgattccggatctccaatttgtacattgggacggttgcttctccggacacggtatttcctatgtcttccgtcttcgcaattccatatacaaaatcacttctgatgaagcccagtggacggatgcattctccttcgctgcaggttattttctgcttctttcctgtccctacattcaggatcgatactttcgttgcagttcctagttctccgtctgcctgatatgcaatcagacttccatcttccgatacgacatactgctgtgcgtccagacctttgaccagtactgttttctcatcatcctctatactatactgatatagtgtaccgtccaccatggtgtagagcatgtctgtcttcgcatcataataagacatttctcccagttcactgactgcctgtgcataagatttattggtagagataaagactttctcttccacggaatttttctctatatcgtaataatatacggccactccgacttcaccttcatgctcaccacgattcatatatcccgacacaaggaaggtcgtgttgccctttgcgtctactttcaaaatcttgatcttgtgatccggaaccagatttctcacatctgtattttccgcatctgcaaatccgaatacaagtgacacctcatccgaatctttattataattccaaagttcatttgcctcgacaaatgatacgatcgtcccgtctttattcaccttataagacagattcgttggtgcaattccgaggataattcccttctcattcagaaccttcttcgtcgcatcaaatatctgatccatcgttctgtcataatctaagaggtatgtcttttgtgcatctgcgatgtatctgacacggaagaattcttcgaccgcataccggtcggattcattttcctctcctttgcagcttaccctgtattgtaacaataccgacatgcaggtactgttcagttctttgatactccagcgttcttcctgttctacctgtggtttcagactgccccatgtaacctgttcgtaattcgaattgatcgttacatgctgaagcgtcgtattatccgcatcattcgtcggctcaagcgctgctcctacgcctgcattctctgcctttgcaagtgcattttcatgataatcactgatataattcagacactgtgcaacattggcatcttcatcactgacaattctggtgtagaaatataccggatccgcaccatttctgttcagccgaacctccagaattctttcttcatccagtaccttatctccactcagatccagactgaagttctttcctgcctttttgattttcttagattccagttcacttgtcccgtccagtgtgtagactttatagctggctcctgtaaatttattgccatatgcttctatatttacatccagactctgatcggctaccggagtgatggtattatgcatagaagacacatccatcctctttgcatagcctgtaagtgtattgatcttataatctccatatgaaaatgagatctgtggaaatgttgcggctcccatatcagccgtcatgttgtcattccccttattcgtcacgtagctgaatataatgacagccacgataaatactgcagacaaaacgcccacatttatcaaacgtttctttaaagttaatgtcatttatactccctctttattccgtttttccctggttatctaacaggcgccccagtgtcggtgacaccctgagttctgcttcacatttccgaatagatgcttcgatttgctgccgccttacagattctttctgatctgctttctgattcctttttactgcccggatcaggatattcttcggtgtgtgttccatatcgatgaattccagtatctgtgcttcatacccctcgcgctccagatactgtgcccggagtccgtccgtgatcagcgccgccatacgttccttcaacagtccatatcttaataccggttctaatacctcattccggatctgtcggttcaattcatgctggcagcatggtacagacaggatcacttttgcatcctagccgaccgctttcgccagtgcataatccgttgccgtatcacaggcatgtagagttactaccatatctactttgttgactccggtataatctgcaatatccccttccagaaatctcagcttttcatagccgtatttctcactcagttcattacagtgacggatcacctctttcttcagatccagtcctatgattcttatgtcatattctttcaattcatgcaggtaataatacatggcaaatgtaagataagactttccacagccaaaatccagaattgtaagttctcttcccttatccagctccggaaggatatcttcgataaactccagaaaacggttgatctggcggaacttatcggattttgcacgcacaatctttccatcctgcgtcataactccaagatcctgaagaaacggtaccgggactccctcttccaacacatactttttcttacggtcatggctcatatcaatcttctttttcccgcccttttttatcttactttttatggtcacttttccttttttacttacaagaaccgtataatccgctctctgtgtctccatctgcatctggcgcatatttcccatatattcgagaagtatttcacaagcttttttctcctccacattctcatgaaatgcctgattgttccggaacgattcaaactggaagtaaagtacctcttttttcagtacaggtcttacctttaccttctgcacatcgtctttcttcttcggattactcagcgttgctgatataaattctatatttaaattttcctgtaataatttacttaattcattcataatattatattttactgttttttagacaagagcgcaagtatcatggatagcaattttaccggacagaaccgagaaaatgcagttaaggacggaggattgcatgcaatcctccgtccccaactatgaaaccgggaattttattgtcactttaaacaaatctccatccagatataattcaaatgttccgccctgcatttccgtcagcgactgtgcgatcgacaatcccagaccactgccttctgtgcttcttgatacatccccgcggatgaatcgttccgtcagctcggaagccgggatgttcagcggccgtgccgatatattcttcaggctgaagcatgccatgccatctttcttctcgagatcagcataaactcttgttccctgcatcgcatattttgccgcattgttatatatattagacagcactctccaaagccgtctcccatctgcgcggatcacaatctcctcattcggaaggttcatgacctcttccagatctcctgccttgaatttttcctcgaattctccactcgtctgctggatcatttccaccaggttcaggttcatgaattccaacgtaatattccctgaacttaccttggaagcctctacgacgtcttctgtcaatgtcttcaggcgctgtgatttctgttccagaacttcaatgtaacgccggatcttcggatccttaaagtcctcctgctttaacaattctacataattaatgatagatgtaagcggcgtcttgatatcatgcgagacattcgtaatgaggtctgtcttcagccgttcgcttttcatactctttgcaagtgctgtttccagtccttctccaatagaatttactttctctgcaatctctttctgttctgccagtaatccatttaccggaatctgatactccacttcgccaccggcaatcttctcgatccctatcatgatctttccagttccttttgccttttgaaccatccagacgaatgctgcggcatctgttaccagcaagatgaatgcccacgcccaggtagtactcccatctgcagcaaatatataggtcagccagtggaacaataaaaatgctgctaatccgatcatcattttccacagataccggatgttttgaagcatatctttcaaaaagagtaacagccatctgaatacactgttcttccatacagtcttcgccttgattcttctcaccaggctcagataccccagaaggaacatcgcacagctatacagcgcacccagacatcccaccaccattccttgcagatatatctgtttattttctgtatagatagtctctccatttacgctttgccatgtaaatatcccggcttttgttactaccagcataactactgcccagagcaatattacaccaaccgctgccggttctgtctttatgtgatcaaacttcaccagatgcacttcttcatcttccgcacttcttccggctccgatcgtcaataacaccagaatcgccagataggctgcgactgccagaactgcccctataccggccgcttttgccccggccgcatattgtgtaaagatctgtttctgctcgtaaaaatcatctttcacaggatacgctgtatccacaaccgatgcatatacataatctgacgcatttacataaccggctactgtcttctgccattcctgtgccattgaatctcctttgccggctttttcaatattactttcatagtttgcaagcttcggccttacgatcacatatttccctgatttttttagttgttccaggctctcctcgtaatgatcatagtcctgatatttctttttattcgtaatgaccgttccgttatcccggttcacatacaggtatgtgatattcgaatttccttcctgatactgcttctggtttagcacataattgtcaacatccgaatagatgatctcggccgcatcatttatcattctgcaggcatcactcagcctgccgttccatgtcttggaattattcacaagctgaagtaccgtttctccgtttaccgtcttatagtctccgggaatctttgtcccgtcataattccagcaattgatgtaagcaatctttccatcgatatcctgaagtcccctgaatctggatttcccgctgctgctttcctgatattccccctgtttcagctcatccagaatatcatctgcagaactgtttcctgtaatgacaaatgacagatcccctctgtcgatcatctgtttaaattctttataacggaaatagtggtagtttccatctgaccgctgacacacaatgatatcgtcctgttcgtcccgggtatctgagacggaaccatcatctgtcatcgtttctgcgattaatttgccccaggaatacatgtcccccagccggaaggacagtccggtctcgtctttacccgttatcccgcctgtatcttcatattttgccacatctacgatcttatccgggtcatattttccatctgtatcatataaggtctgatattggatctcgtccaggatgtgataattggcattggccacagcattggcaaatgcattgctttcctcatacgtcttcgcagcatcagcagaacacagctcctgtatcagcaccggataacgcgtagcccacaggatgcataacacccctgcagctgcaagtatatgtgccactgccagcaaaaagaattttactcttggcattcggtaccatttcttcatatatgctccttcctaaagcttctctatcttatacccgacaccccagactaccttcaggtatctcggctccttcggattgatctcgatcttctctctgatatggcggatatgtactgccactgtattatccactccgatagcatcctcattccagatactttcatatatctgatcgatagaaaatacttttccctgatttttcaccagtaataataaaatattatattcgatcggtgtcagtctgaccggttccccgtcaaccgtaacctccttctgttcatcatcgatagataatccaccgaccgcataaacagcctgattacttttatcgatcgtgcttccaagctgtgtatatctgcgaagctgggactttacccgcgctgtcagctccagcggattgaatggcttcgtcatataatcatccgctcctacattcagtcccaggatcttatcggcatcctcagattttgccgacaggattatgatcggcatattcttcttctcgcggatctttaacgttgcccggatcccatccagcttcggcatcatcacatcaatgatcagaagatccaccttctccctgtccagcacttttaacgcttcctcaccgtcataggcttttaacactttatatccttcctgcgacaggtatatctctattgcttctacaatctctctatcatcatcacatacaagtacgttgtacatttctcatcacctcccttatactatacaagaatatcaactaatttttaagtcctggtcttgtaaattcttaagatattatgaaaatatgctctttatccgttctgtcgtctaaaatagaaactgctaatattatgtctaaaaacaataaaccatattttcgtaaagatattttttctatataataatccctggtgatttaagaatcttttttattttttcatactccgtgggattttcatcttgtcggattcttccaaacaaaatttttagaaagaagatgacatattatgcatgaaccagaaatagaatatcttattcgctctcttggtattggtgcaacttaccgtggctatgaatatctcatttatggtatacgtctttgtctgtctgatgaaaactacctccttttcgtcagtaagtatctttatccagacatcgcacgtcactataatacgacaagttatagtgttgaacgtgatatccgcactgtcatcaaggtctgttgggagcacggaaacagaccgcttctcgaaaaaattgcattacgccctttaactctgaaaccaacctccggtgaattctttgatatcgtaactgctcatttacgcaaatactctgaatgctgtcctttactttccgctctttagaatctgtttttgtcttcttcatttttagttaagattttttcgaattcttttatgtttttaacatactttagacatattttttgtctatactatatatcagatagttgataagcaacaactatcacccccctcataaagtaaaacaccggaatcactctccggtgtacactttactctcattcctttagtaattataacaacaacaaaaagctctccgaaaaggagagttttttgttgcgtttttttataaaatgaacatacttttttcacatttcttgattataatactttcagatagttggataacaactatcgccccccctcataaagtaaaggccgccagaagattacttttggcggtccactttaccgataatttctgcggatgtctttacgactccgcttttgttttatttctttcttcgatccatgcaaggatatcccgatacacattctgccggtccacctcattcaagatctcatgccggtcgccttcatacagatggatcgacacatctttgatcccggcatctttatatttctcatagactctggtcacattctttccgaatgcccctaccgggtcatcggatcctgccgtaaagagcaccggaagcgtcttcggaatccgtttcatacttcccttccgtaccagaaccttcataccggtaaacatctgataataggctcccagtgtaaatgtataggaacacagcggatcccgcacatattcatctcgttttttcttatcggatgtgatccattccttcgatgtctcaccaggttcaaatttcttattgaaacctccaaaactcagactatccacaaatgcgcttctgtatttccatcctttgaacgctgcaatgaccctgcagatcatccttcccgcacaaagcgtcagcattccctgatgaccggttcccataatgataactcccgcaaggccccccgcatacatcgtcagatactgtctcaacaggaatgaccccatactgtgccccagcataaaatacggcacatccggatattttttccgtgtcatctcctgcagctgataaatatctccgatcacatactgattacctttccgttcatcaaaatatcccagatcagcttctgtctgtatggatttcccatgtcccagatgatcatgtccgactacataatatccgtgctccgacataaattcggcaaattcatcataacggtcaatatactccaccattccatgacatatctgtaagacaccttttatatctctatccggaagccattcgatcgcatggatctttgtcacagaatctctggatgtataataaaattcatgcttcatcatctatcatccattctgacatactctttatattcggccagcggtttgtacgccggacgaatgatcttatctacattcttaagctcttccagacggtgtgcactccatccgacgatacgcgctgccgcaaagatcggtgtataaagtgacggtggaagatccagcatactatatacaagtccgctgtagaaatcgacattcgcatttacacctttgtatatcttacgcttttctgcgatgacctccggtgccatgtgctctaccttttcatacagtgcatattccttctcacagcccttttctcttgcaagctgcttaacgaacttcttaaaaatatcggctctcgggtcagatacggaatagattgcatgccccattccgtagatcagtcctttccggtcaaatgccttcttatccaacaaatcgatcagataccggcgtacctcatcatcatcctcccagtcactgactttttccatcatatcgtcaaacatctgggttactttgacatttgctcccccgtgctttggcccttttaaggatgccatagcagccacgatcgtcgaataagtatccgttccggatgatgttaccacatgcgttgtaaatgtagaattgttaccgccgccgtgatccatatgaaggacaagtgccatatccaggatctttgcctctaatttcgtatattccttattctcacgcagcatcatcagtatattctctgctgttgataattccggtgacggtgcatagatgaagagatcttctcccatacggtaattatatgcatgatagccatagatcatcagcatcgggaactgactgatcagattcaggcactgacgcagtacatttggaatcgacgtatcgtctgcatgaggatcatacgtgtacaggcttaagattgatctcgacaggctgttcatcatgtcacggcttggcgctttcatgatcacatcacggacaaatgtcggcggcaatgtccgtctttccaccagtgtctcatgaaatgtctgcagctgcgtcttatccggaagttcaccgaataacagcagataggcgatttcctcaaatccatagtgcttatctttcagaaacccctgcaccagatctttgatattgtagccgcgatagtaaagatttcctgcacatggcacttcctctccgttcacgatcttcttcgcacatacatcggaaatgttcgtaagtcccgcaaggacaccttttccgttcaggtcacggagtccccgtttgacttcgtacttcgtatacagctctttgtctatcgcattgttcttctcgcaaagttctgcaaaatggctgatttccggtgttacctcaaatagtgtctgcccttcttttctgtccatcgtcatcatcctttcttatatggagataataaatcactcaatcttgcgaattcttccagtgtcagtgtctcacctctcacacttgcaccctttccaagtgcatcaatcgctgcttccacttcttcttttgtaaaatctaatgtcgccgcattcttcagaccgttcgccagtgtcttccttctctggttgaaagatgcacggatgatgttgaacatcagcttctcatcctgcacctgtaccggtttctcctgatgacaggtcaagcgtataaccgctgatcctaccttcggtctcggcatgaaacagttcggcggaacatttgccacaatatacgggtcggcataatactgtactgctaatgacagtgcgccatagtccttattacccggtccggtctgcatacggtccgcaacttctttctgcaccatgacagtgatactctccaccggaacctcattttcaaaaagtcccatgatgatcggcgtcgtaatataatatggcaggttcgccaccactttgaccggctttccgttgttctcttcgtctgcaagcttcttaagatccagcttcaatacatcttcattgatgacacgtacattgtcatatccgcttaatgtatcctccaggatcggaatcagattcttatcgatctcaactgcgatcacctttcctgccgcctgtgccagatattgcgtcatcgtaccgattcccggtccgatctccagtaccatatcatcctccgtgatattcgccgactgtatgatcttatctaatacatgtgtatcgatcaggaaattctgaccgaattttttctgaaatgaaaaattatatttctgcagaacctcgatggtattctgcggatttcctaacgttggttccttcatagaccctcccgtatctgttatatggtttcttgattattcttcattatacaataatttggccgggattgacagcgataaaaaatgaaatatgtataaatatataaatggggacggggatttctagaaatccccg

SEQ ID NO: 2847 - DNA, 27899 bp, Unknown
  gut microbiota DNA sequence
cttttcttcagcttgtatcagtgaactcagattatgattttcaatccatactatgacagcaaaaaacgtaaaaatcataattccgatactaaattttattgaatacacatatatattcaaatttgccgttactattcgtacaaaatataaaggtgcaattttgtgtaataaaaactgaatgccatacaatataccagttccaagaataagtcctagtattgatgagaatacccagccaagaacatattctatcaacatcaaactaaataccattcgtttgtgcattcccatcataataaataatccataatctcttattcttgattttaaataataaatcatagcatacgccatcaacattatagtaataacagaaatcattcctaaagccatagtaaaatcaattctaaaaagaaatgctgtttcggtatcttttacaatttgtaatacaatctcttttaatccacgaaatacaaacaactccatacttgcaacaatattactcaagaaaaacaaaatataattctttaaattacttcgaaaatttttatagattatttttgttaacatctacattcccctctccattttgtaatctgcaactagctactttgctccacataatagcatggttctactttacaccgcatagtagtttttgtcaattcgattacttatctattgtcatgttttttggctatgttataatattgataaatagattagaaaatatcaggtgatgcaatgtatgataaatctcaattaatgcgtggaacattagaaggatgtattttaaaaatactatcaaaaagtacatcttatggttatgaaattgttacaactcttctggggtatggatttaaagatataaaagaaggaactatttatccattattagtccgtcttgaaaaaaaaggaattattacctctgagatgcgcccttctccactgggtccaagtaggaaatattattccattacaccagatggagtagaatatttgaacgaatttaaaacaaactggaagcagatatccaaatctgtaaaccaaatatttgatacggaggtataaaatcatgttgaataaaaaagatcaaagaatcatacggcaaatgatacgccatattcgtacatttcctttatcagattctgaaattaagcaacttgaacgggatcttaccggaatggctcttgaagctgaaaaacgtggagaagattttgaagatgttttggacatgaccccaactgaattttgtgatgaattgctttactctatcggcggcagcaaggctccaggtggtcgctatctgttaaaaggtgccggaatttattatcaattaacaggaattcttggaacagcacttttttcactaatcctgttacttgcattattttatacaattataattccgtctgaacttgcacaaactggattacttgtattatttgttgcagcaattggtcttactttctttttgctatctttatcatttgggaataccgctgaacgcgattgtggcacaaccgaaaaatctgcacagctcgtgaataatgggaagattttgttggtaactgcagttatcttcgatatcgtagttactctttatatgatttttaatgctggagcgtctgtaggacattttaattataagcttccgcttcttatgcaggttattatctttttctcctgttatatgccggcaattctgtatattatcggtgcgaagaggaatctgccacgagagtacgttttaaatgagctatagtaatacctaattatatgtagaaaagtcaggaagattaaatataatcaacctgacttttttatcaaagattatgatcagtttctctcttttcttactgggcaagtcctcgcgaattgctttcatgcaatttggtcaaaaagaaagaccctgtataaaacagagtctctggcattttcttttgagagtctgcattctctagccatcaaccgactgcaataacttaattaattgcaaagaatatgatggcacaaacaagtattggaatcataccaatcacactgaatataatgcttaataacttatatactttggtatcgtagcccggaatatacgacttctttggattgtctggattatatcgtatctcgatttttgcccccttctgtgggacatgatgtgatagatatgcaccagtattcgtatataggacattgttaacttcgtactcgtataatggatagaaactcagactgtccccggaatttttagccaaaatatccttcactgttgcaactgttgtaactgtgcatctcgttgttttactcctgttaataaatcctaagataaaggccggtatcagaaaacaaattcccaacccgcataatgtgaaagctaatccaggttccatatatatgcctctcttgtcatctttctgtatgacactaattcaatacataatttctggtcgtaattccactgactcttcccttggcattgacaagcactgccttaaagatagtctcaccttccggcatctctaccggtccggtgtatttcgtggatgaagttgtcggttctgacttatcggttgtataatatgccgtatatccatccggtactttaatctcaatctcctgggcactgctgtactgtccggttgacggagatactgccggtgcatcctcaattgggagttctacggtatatgatttccttacagggagacttggaatgccggctttatttaccgcaattgcatagatagttgtgtcaccttcttcaatctggatcggtccggtatacttgcggcttcctgttgttggttttttcttattctttgtgtaataaattttacatccggatgctgccgtcagctttaactgctggacatcatcataatcttctccgtcatccagactgaatttcggagtttttactatatattccggaagtgcgtctgatatcgaagaatcggcttcatccagaagttccggaatcttctctttctgatcagaacgaatatagaatttgatacatgcacggtataattctatattctccccctgctttttcagtgcagatgtaaataaacgttctgctttatctgcattatcctgtgcctgatataccttggaaaggccggtataggcttccggtctggtatcatcttttgccagtgcgttgcggaagctgtcctcggcggtcgtatagccattccggccaagcgcccgatttcctttgttcactgcaccaatatacgatgtcaggtaagcaaatacgccgaccacagctatgatcagaagcaaaaacagggcaagtaataaagcacgttttttctttttcttacgtcttgctttctgtcttgcacgttcacggtttctacgcctgcgttcttcttcgctcatctgccggacgccactatggctggtgttccgattgcggccggaagcatttcttgctgctcctgcagttcttcccgcatttctattatttctatttcgggttgaatgtgtcgtatatgagtcattgtatatatcttcatcaccatctattgcacctttgatctgtgctgtaagcatatcatctaatgggttgtagtccggaacaatgcggacctcttttccacaatgtctgcaatacaattccccttcaggtattctctgaccacaatacctacatctcatcttatgccatcctcctactgtgaatactatcttttatccatttttctcattcaaatattgttcaaattcttcagaagacatcagaactttccgaggttttgtcccctcttccggtccgacagcccctgcctcacataactgatccataattcttgccgcacggttaaatcctatcttaaaagcccgttgtaacattccgatggatgctttttctttttcgataatcagtcttcctgcatctgcaaaatatgtatcattttcattatcatcatttccgcctgctccgccaagtggattgccggtcggaaccgtattcatgtgagtttctatttcctgattatatgtaacatctccgttgtgttcgcacagatattccacaacctgctgtacttccttatccgtcacaaaggaaccctgcaccctggccggtttctgatatccggatggatagaacagcatatcaccttttccgagaagcttttctgccccgttcatatcaatgatcgttctggaatcgactcccgatgatacggaaaatgcgattctggaaggcatatttgctttgatcaatccggtgataacattcacagatggtctctgtgttgcgagcaccagatggattccggctgctctggcaagctgtgccagacggcagatggcttcttccacatctcccggagcaaccatcatcagatcggcaagctcgtcgacgatgataatgatctgcggcatcggatccagcttttccccctcttctgtctgcacgccgaggcttttgatcttctcattatatcccttcatatcgcggacgttatatttggcaaatgcctgataacgtctggacatctctcccactgcccagttcagtgcacctgccgcttttttcgggtcggtgacaaccggaatcagcagatgtggaatgccgttatagacactcagctctacgaccttcggatcgatcatgatcagttttacttcatcgggatccgctttgtataacacactcatgatcagggtgttgatacatacggattttccggaaccggtcgcaccggcgatcaggacatgcggcatctttgcgatatccgcaacgactgtctttcctccgatatctttaccgacggcaaatgatatcttggaagggctgttctggaattccggtgattccagaaggtcacgcagcataactgcgctgttctctttattcgggacttcgattcctactgctgcttttccggggatcggagcctcaatacggatatctgcggctgcaagattcagcttgatatcatcggcaagtccgacgatcttgctgaccttaacacccatttccggctgtaattcatatctggtgacagacggaccacagcttacattcgtaatcgttacatttacaccgaagttttccagtgtctgctgtaacttcatagctgtttcacgcaaatgtgcatccgactcaccgccgccacgttttccgtgctgaagcagggataacggcggacatttgtatgcctttttcggttttgtagaatcggctgcaacactggctgcaacatccgcaacttcatctgccattcctgcagcacccatcttaggatttttccgccgcgttggtttttcttccggtgctgtacctgctgcagattctgcagcgtttttaacaggttccgttcctgcaactgccgtatctgccgtatcagatgcttccggttccggatccgcacggtgaatgacaaattccggtttttccggtcctttcgctgtctttggatcgatcggaagttctcttacttccggtgatttcttcgcaatagaggtatcaaaggaaaccccttctacatgtttgtctcttcgtttttccgtgccggaagcttccgcttctgcccgttctctttcacgttgcgtccgctgttccatgcgttcgcgttttcgttcttctgcaagttctttgtgccgtctggcatcttctcttgctctcgcatatgccttatcactgccggcctttacacctcttaatgctgactttccggtgataatgacgagacaaatgatcataaagatgattgtaataacataagttcctgccacaccgattgcaggtatcagaacatatgctacagattttccgatcttgccgcccatgtcatcgataaggtgtaacaatacttctgcaaggatcagaaggatcacgccgatcagactcttgacatatgcactgcggttgtctttattcgatatcagaaatgatacaagtccgaacaggataaaagggatcacatacgctgcaacgccaaagacattccataaaaatccagatatcgcatctcctaagaatcctgcaatgccaaaattactgatcagaagaataatgctgactgcaagagttgtccagatcagaatctcatctatcagaaaactattaccgtttccggttgatttccggccggcagtttttctttttccggttgtttttttcgttgtttttcttgttgtttttttattcgaagacggcttttttgctgtcgtattcgtcttttttccagttgttttacttttggtagactttgctgccattacaactcccccttatgatggcaatactaattataattatagcatttaggggttttgatgtcattacacattttcgttcttttttttatttctttcattgatcatttcgtgcaatttattcaatgcgtcttttaatccgccgacttcattgatgagtccttcgtgtaccgcatcttttccttccagcaatgtcccgacatcttttaccagttctgtcggatttaacatcagggtctcgatccgctcctgtgtcatagacgagtgatctgccaggaatctggtgatcctgtcctgcgttctcagcatattatccaggctttgctgcacaccgataaacatcccgttcgagcgcaccggatgaatgatcattgtcccgcttggcacaataaaggaatagtccgcagatacggcaagcgggcctccgatagagtgacttcctccaagaaccagtgacacagacggtttactgagtgaggcgatcatttccgcaatggagagtcctgcttccacatcgccgccaagtgtattcagaagaatcagtaatccgtcgatctcattgctgtcttcgacttccgcaagcaaaggaagtaagtgctcgtatttggttgccttggtgtttcccgatactgcttcatggccttcaatctctcctacaatagtaagtaatttgatccggtggctgtccctgctgttctcaagattagcgcttcctgtttctttcagttcttcagtcggttccgcacttttttctttttcctttttctcttcactcataaaaaatacctccatactttttcttagtatggaggtatcggattctttttattcatcccagttgtgatatacatcctgaacgtcatcgtcatcatccagcatatccagagttttctgaatattggcgatatcttttgcgtctgtcagttctacatatgtctgagggatcattgttacttctgcagatgccatcgggattcctgcttcttccattgcaagacggactgcactgaaatcgtccggatcagtcaatacttcaaagctgtcttcctcttctacaaaatcttctgctcctgcatcgagtacctgcatcatcagctcatcggcatcaccttcgtattcttctttatcgattacgatctgacctttcttatcgaacatgaatgatacacatccaggtgttcctacattaccgcttccctttgtaaatgcgttctttacgttagatgctgtacggttcttgttatctgtaagagtctctacgatgatagctgtaccgttcggtccatagccttcgtatgtaatgtgctcatagtttgccgcactcatatctccggatgcacgtttgatatttctttcgatggtatcattcggcatgttattagattttgcttttgcaattacgtcacgtaatctgctgttgttagaaggatcagaacttccgccttcttttacagctactgcaatctctttaccgatctttgtaaaaatctttccttttgcagcatcatttttttctttcttatgcttaatattggcaaattttgaatgtcctgacatgtcttttacctctctttatctatttgtttttatctttttttaaaattgtattattacacacgttgtctattctatcacgcttcgaaaactttttcaatcttaactgtctgaattatattattatcgatctgtaataccgtgaaacgatagccgtcatagtcaacaacacaggtttcgtcttctccagggatgtgttccagtttatcgatcagaaatccattcagtgtctcataatcttctttgtcaaatgttaccggaatcagatcttccagatcctccagttcagtcagaccattgacaatcatacttccgtcattctgttttttgatcatttcgtcttcttcatcatattcatccagaatatttccgacgatctcttccaggatatcttccattgcgacaaggccagaagtctgtccgtattcgtccagcacaacgaccatatgatttttagccgcctgcatttctttgaaaagagtatcaatgctctttgtttcaggaatatatgtaaccggacgtaggtattcctccagattttttaccggacattgccgttttgacttgtccagatagccggacgttgcatctctcagatgaatgatcccgatgatctcatcgatatcttcctgatagaccggaaatcttgaaaagcgttcatccagcatgaattgcaaagcctcttccagtgaccagtctccatcgattgctacaatattttttcggtgggtcataatatcctttgcatccttatccatataacggaaaatattgcggatcagacctgccgcttctttctgcatctcttcgtccatttcatcttcgtgaaatatctgtttcattcgttggaataaacttccctcttccataattaattatccttaactccttctctatgtatgaagctcgaaactgattcgaattgcttcattaaccttgttcattatctcttcgtccagatgacataccagatccttaagtctctgcttatcaatcgtacggatctgttccagtaaaaccacggaatttctgacaatatgataccttcttgcgtcaatttccacatgtgtcggtaatttcgctttgttcatccttgaggtgatcgccgcacagatgacggtcgggctatgcctgttgccaacatcattctgtatgatcagaactggacgaattccaccctgttccgatccgactactggacttaaatccgcataataaatatctcctcgtttcacctgcaccttgcttcacactccgattcttaagatatactaagtatttccctttttctcggatgtattctgcaaaatttcaagaacacacggcgatttaaaaactgtcgacctgttctacgacttctccatgccggatgtattctctcggaatacgtttatttaacacacacacaaattcataattgaatctaccggaaagttctcccagtttatcaacagaaaggaactcttttccatcacgtccgaagatgacaaccttatctccgaattctacatcttcaattgccgttacatcaaccatgaactgatccatgcatacacgaccgatgatcggtgctttttgtccatggatcaggacgtagcctttattggacagacttcttggatacccgtctccgtatccgactgggatcgtcgccacctttgtcggacgtgttgtgatataagttcctccataacttaccggctttccctccgtcagccattttacatgtgcaacatggctgatcagttccattgcaggttttaatggtactttatctttttccacctcatcggacggatacattccatatgttgtaattcccgcacgcacaatatccatattagcttcttccagatcaatgatgccggcactgttggaacaatgataatacgtgaatgtaacgttacgctttttcaattcctctttcatccagaggtatttctccagctgttcttttgtaaatgtcttatcttcttcatcggatttggcaaaatgcgtgaacataccttccattaccagattcggcagcttgctgattctggcgatctcatctgcattttccttcgtaatctggaaaccaagtcttgccattcctgtatcaagcttaatatggacatagacgttacatcccatagcttcggcaagctcagatacttcttttgccatctcatagctgtaaacggtcatacgtatctcgttacggatcattacatcccactgatcagggaaaatgcatcccagtaccaatactggctttttcaggcatgcatctttgatcagtatcgcctcgtccaatgtggcaacggcatatccccagatgtaatccatcggctccaaaagttttgcgatctggacagccccgtgcccataaccgtccattttgatgactgccatcatctgggtatttttatgaatattttttttcatcatttctatattatattcaaccgcatctaaattgactctggctaaaactcttgtatattgcttcactgttattcttcctccagtttcattaatgctttactgatatattctatcaaatctctcgccattacactatatacgcctttttcaaattttgcaaggtcaccggacaatccatgtatatatgtgcctaattctgcagcatcttccgcttcttttccctgcaccatccatccggagatcacgccagcgagaacatctcccgatccggcttttgccattgcactgttcccggtaaggttcatacgtatacctttctcttcgcttgcgatcagcgttcttgaatctttcagtacgcaggtaatccggtacctggaactaaaatctttcaggatctggatcctgtctgctttcagttcctctacagaaatgcctgtaagccttgacatttctttcatatgcggtgtgatcacaaatctgcgctcggccatctgattcagataatttttattctctgcaagaagattcagtccgtctgcatcaatcagacaaggtacctttacgtattcaatcacggtttttaatattttttcggaaagcctgctcattccaagacctgaaccgatacatacgctatctgcccatgtaagaagtgataacagttcttctttattatattcctcatacgttgtgataactgcttccggaaggagtgtctgtaagatctcccgattatctgaggaagtgtatattctcaccagcccggctcctgtcatgtaagcggcatgcgcattcagataagcggctccggccattcctttgcttccggctatcacgaggagtcttccgtacgtgcctttgtttgaatcttccggtctgtccggcagcatcttccggtagatatcttttccggctgtccggactatttcctgatcctcacagatagaatctgtagaaatgccgatatccggcacgataaccctgccggccatagttctgccctgtgacagctccagaccaatcttttttaactggaatgtcactgtatagtccgctttgaaagcgcagcccagaatacagcctgttgtggcagaaagcccggacgggatatctaccgcaaactttgttcccctcatccggttcatctgttcgatcacctgacgatatctgccctctactttacggctcaatcccactccaaagacggcatctatgatcacactataggagtcttcctgcggcattccataagtaatcttcccgccgcattcctgtaagcggtgcatttgttcctgtgtttcctcggtataatgctccgggtttcccacacaaaatgtctctacagagtagctgttattttgtaaaatacgggcaattgcgaaaccgtcccctccattattacccgaaccacagacaacacagacatgagaaagatcaaccttttcatcttctaatacctgtacacacgcctgcgccgcatgttccatcaattccagggaaggaacctctaatttttgaattgtatactgatctgctgctttcatctgtgctgcattcacccaaagctgcatccaatcatctcccatcaagtcctgctttatacttaccgcaacaaaagaacgtgtaaaaatatgtccatcttccggactactcctacacgcctttttcttttataataatttacttatgatcctctttgtaacgactgatattgtatgacagctgcatcaggctttctgacagatgtacattctcgacaacaatattatccggaagattcagatctgtgtgcgcaaagttccaaattgcacgcactccgttatcaaccagcatattcgccacttcaattgctttctcttttggaatcgtcagcactgcaatatcaatattattgttctgtacaaatgctttcaggtcatccatcatgcggatcggtacgcctcggatagagactccctgaagtcttggattcacatcaaagattcctttcaggataaatccacggttctcaaaagccgcataatttgccagtgcctgtccaagattaccggcaccgatgataatgatattatgatcttcttccaatcctaaaatttttccgatctctgtgtataaatactttacgttataaccatatccctgctggccgaatccgccaaagttattcagatcctgacggatctgtgatgcagttaccttcatacgcttactcagatcgttcgaagatatacgctctacaccattttccagcagttcacccaaatatctgtaatacctcggcaatctacgaatgactgcacgagaaatctctctttcttccaatatattcacccttccaatcatagtctgaaataattatataaaattgaaagattattgtcaaactattgttgaattttatacaatttccgttataataaaatagcatgtacaaatgtattttgcgaatacaaatgtatcaattatccacaacgcaggaggaaatatatgatattagcatgtcacgggatccagaaatctttcggtgaacacctcatcgtcagagatggatccttccatatagaagatcacgaaaaagcagctcttgtcggaccgaacggtgccggtaagtccactctgctcaaaatgattgtaggcgaattagccccggatgacggcaacgtcatcctgacaaaaggtaagacacttggctatcttgcccagcatcaagagatgcaaagcggtaatacgatctatgaagaagtccgcaccgcaaaggccgatataatcgctatggagcgccgtatccgcgagattgagatggaacttaagcatctctccggcgacgccctgaacgaccgtctggaaacttacaatcgccttatggccacttttgaacgtgagaatggctattcttgcgaaagtgagattaccggtgtgttaaaaggacttggatttacggaaaatgatttcaccaaaccggtcgacactctctccggaggacagaaaacccgtgtatctcttggcaagcttctgttaacaaaaccagacattttgcttcttgatgagccaaccaaccatctagatctgaattccattgcatggcttgaaacctatattctaaactaccagggagctgtgctgatcgtgtctcacgaccgttattttttgaacaaagttgtcacgaaagttcttgaaatcgagcttggagaacttcgtacttatatgggaaactacagtgactatgcagcaaagaagcagcagcttcgcgacatacgcctgaaggagtatcttaaccagcagcaggaaatcaagcatcaggaggcagttatcgaaaagcttcgttctttcaaccgtgaaaaatccatcaaacgtgccgaaagccgtgaaaagatgttggaaaagatgcagaccatcgaaaaaccgatagaagttaatacagatatacatctgaaactggaaccatcctgtgtaagcggcaatgatgtcctgactgttgaacatttaagcaaatctttccccggacaggagctttttacagacgttaatctcgagatcaaacgtggtgaacatgtcgcagtaatcggtgataacggaacaggaaagactacgcttcttaagatcttaaaccgagtggtatctgctgattccggtacttatacacttggctccaatgttaagattggctactacgaccaggaacatcatgtccttcatatggagaaaacaatttttgacgagatttccgatgattatccgactcttacgaatacggaaatccggaatgtgcttgcagcatttctttttaccggtgatgatgtcttcaaacagatcagttctttgagcggtggggaacgcggacgtgtatctcttgcgaaactgatgctctctgaagcaaatttcctgatcctcgacgagccgaccaaccatttggacatcgcatccaaagaaatccttgagaatgctttgaatgattataccggcaccgtactttatgtctctcatgaccgttatttcatcaatcagactgcatcacggattctggatcttgtcaatcatacatttgtaaattatatcggaaattatgactattatctggagaaaaaagaagaactcactactgcatatgccggagaagcctctacaccctcatccgtttcagataacagtacagacaagaatgtatccgagtcaaaactcagctggcaggagcaaaaggaagcccaggcaagactccgcaaacgtcagaatgagcttaaaaagacggaagaacgtatcggtgaactggaagaccgcgacggtgagattgatgccctgatggttcaggaagaaatcttcaccaactctgtaaaatgccaggaattggcaaaagaaaaagccgccatagcggaagaattagaagaattatatatgaaatgggaggaattagcggaagacgcttaatttatacgctgttcattcatacataaaaacaccatacactgtgatccgtcaaattcattcgggaattttcacattgtatggtgtttttgtcatatattatctactttaatttctcggcaattgccttaataaattcctcgctgttcaatacagttggattttccagtgtcgtgatcaatgccaggtcttttgtcatcttaccttcttcaatggtatcgatggttgctttttcaagcttatctgcgaacgctgtcaattcggaatttccatccatctcaccacgttttctgagagcacctgtccatgcaaaaatcgtagctacagagtttgtagaggtctcttctcctttcagatgcttgtaataatgacgttgtaccgttccatgagctgcctcatattcataatttccatccggtgataccagaacagatgtcatcattgcaagagaaccaaatgcggaagaaaccatatcactcattacatctccgtcatagttcttacatgcccagatatatccgccttctgatttcataactcttgcaaccgcatcatcgatcagagtatagaagtatgtaattccggcttctttgaatttatctgcataatctttatcaaagatttcctgaaatatatctttgaatgtatgatcatatttcttagagatcgtatcttttgttgcgaaccacagatcctgcctggtatctaatgcataattaaagcagcttctcgcaaagctttcaatagatccgcataagttatgcattccctgtgcaacacccggtccggcataattgtgtaccagttctctggtctctgtgccgtcttctgcagtgtataccagttctacttttccaggtccgggaatcttcatctctgtatttttatatacatcgccatatgcatgtcttgcaatcgtgattggttttttccagttctttacacatggctcaattccttttacaacgatcggtgcacggaatactgttccgtccagtattgcacggatcgttccgttcgggctcttccacatttctttcagatcatactctgtcatacgtgccgcatttggtgtgatggttgcacattttacggctactttatatttcttggtcgcattggctgcatcgatagtcacctgatcattcgtctcatttctgtgctccagacccagatcataatattctgtgttcagttcaatatatggctccagaaggtcttctttgatcatcttccagaggattcttgtcatttcgtccccgtccatctctacgattggtgttgtcattttaatttttgccatgatgtttgtctcctttctatctgttcgcggcatcttttattattcttccagatgcagattttccatcacatgtaatatatgttcgtttgcaagctgttctgcttttgccgcatcttttgccttgattgcttccagtatttctcggtgttcttctattgacttttcggcacgctccggtgcttcaatcgacatcgtcctggcaagctgtacatacttgtgaaaatctgttaatacatgttccaggatcctgctgttggatgcctcatacaatatcttatgaaacttaccatccatttctgacatctgttcaatctgtccggatcccttcttatgcaaatgaaattctgacagaagaatcacttcttccagttcttcaatctgcgcatccgtaatatatttcgttgcccagttggcacacagcccttccagttgcgaacgtatcttatagatatctttcacatcttttctggtaatggctgtcacatacgcacctttattcggaatgatcgtaactagtccttctaactccaattgtcttaaggcttctcttaccggtgttctgcttacccccagttcttcaccgattgttacttcccttaattcttcatgatctttatataccccattcagaatatcttcccgcagatgccggaacactcttcctcgtaaggatctgtcctgatattcttccataaaaacaccccaattaaatcaaatctatacccagtcttttgcagttctgatcaataactgcgatcagctcatcatctgtaagaacggttacacgtccttcttcgtactgttcatctacccagtcttttactgcgtttaccagttctgaattcttatccactttcttatcatccggaagcttaaaatatgtattgatccagtgggcaatacctgcaagtcccgaagtattggaaattgccacaagcggcggacggttcaggaatttatcggtatcaaatacattataaatctcttcgtttttcaagagtccatctgcatggattccggctctggtcacattaaagttcttgccaacgaatggtgtcctggaaggaacccggtaaccaatctctttttcataataatctgccatctctgtgatgactgttgtatccatgccatccagtgtaccgcgaagctgtgcatattcgaataccatcgcttccagtggtgtattgccggtacgttccccgattccaaaaagcgaacagtttacgccacaagcaccatataaccatgcggttgaagagttgctgactgctttgtagaaatcattgtgtccgtggaattcgatcagttcactcggaacacctgcatgtacacgcagaccatagataattcccggaatagatcttggaattactgctcccggataatttactccatatcccatcgtatcacaggcacgtatcttaaccggaatcttatactcatccatcagtttcatcagttccaggcagaacgggatcacgaatccgtagatgtcggaacgggtgatatcttccagatgacatctcggactgattcctgtctcaaggcattcccttacaatagacagataatgctccattgcctcacgtctggtcatttttaatttatagaaaatatgatagtccgaacagctcaccagaatacctgtttctttcattccaatctcttttaccagttggaaatctttcttgcttgcgcggatccagcttgttacttccggaaatttataatctctttccatacatttgtatacagcatctctgtcttttttactgtaaagaaagaattcgcactgtctgatctttccttttggaccacccagacgatggaaataatcatataatgttacgatctgctccgtactgtatggggcacgtgactgttgaccatcccggaatgttgtatctgtaatccagatttcatccggcatacaatgcggaacaattcggtcattgaatgcgattttcggaatctcatcataatggaacagattacgaaacacattcggcgtctttacatctaccaacgggtacatgtgttcttccagttgcaataaatttgtatgatcatccaggtatactttcctgttttccattctttcatcgcctgctttctaaaaataatttttcgtagtaaagtactaaatttaatatgtataattgtatacaatgatacatgtgttgtcaagtattattatggatatttattcaaaaaaaatgattatgggatttccataatcattttttgaatagtcgctgaaaaagttctctggtatcgtattaataaagcttggcattgacttctctaggacttaagccttcgtcttctaacgctttcataatctggtgcttgtgttcggttccgaaggcttccagtgtgattcgaagttctactgctgcgtttcggttggtacttacaaactggttgtgttccagtttgattacattaccgtttgctttggcaatcgtagatgcaacacgtaccagttcacctggtttgtcaggaagcagtaccgatacagagaagattctgtctcgctgtatcaatccatgctgtacgattgacgacattgtgatcacatccatatttccgccgcttaagatagatacgactttctttcctttcagatcaagctgtctgagggctgccaccgtcagaagtccggaattttctactatcatcttatgattttctactacatcgaggaatgccccaatcaaatcatcatctgcaacggtgatcacttcatcaatatttttctctgcgtatgggaatatcttctctcctacacgtttcacagcagtaccatctgcgatggtgtttgcactggaaagtgttacaggatgtctttcctttaatgcttctgtcatacttgcagcagctgccggttctacaccgattacttttacatttggattcagaagttttgtaagtgtagatacacctgtaatcagtccgccgccaccgatcggtgcgaggatataatctacatccggaagttcatcaaagatttccatagcgatactgccctgtccggttgcgacatccagatcatcgaacggatggacaaacgtatatccgttttcttctgctaatttcatcgcatatgcgcaggcatcatcatagacatccccgtgtaatacaacttctgcaccataactcttggtacggttaactttaatcagtggggtaactgtcggcataacgaccgttgctttgcagccaaatttttttgctgcatatgctacgccctgtgcatggttaccggccgatgctgtaacaagacctttctttctgttttcttcgctcattgtgctgattttataatatgcgccacgtactttgtaagcacccgtatactgcatattttctggtttcagatatacttctgcacctgtctggttgcttaaatattcactgtataccagcttggttggaagggttacttcttttacgatttcactcgcctgcttgaatttttctaatgttaacatctcgtatttcctctcttcctcttatttgttttctgaaacctcttctgaagtctcatcatcttttggtctttcgaataacgcattcacgaaatcatccgcatcaaatttctgcagatcatcaatggtctctcctacaccgatatattttaccggaacgccaagttctgcatggattgcaactgcgataccgccttttgcggttccgtccatctttgtcagaacaattcctgtaatttctgccacatcgttgaattcttttgcctgctgcagagcattctgccctgttgttgcatccagaaccaccagcgtctctctgtatgcctcaggaaattcccggtcgatgatcttattcatctttctgagttcttccatcagattctttttattatgcagccgaccggctgtatctatcattaatacatctgcgtgccgtgcttttgctgccgcaacagcatcaaacactaccgatgccgggtcagagccttcctgtccgccgatcagctcagcctgcgaacggttcgcccattcttttaactgttctcctgctgcagcacggaatgtatcagccgctgcaattaccactttcttatcctctgcgcggagttttccggccagctttccgatcgttgtagtctttcccacaccattgacaccgatcaccatcactacggatgtgtggttttcaaattcatatgccgtttccccgatatccatctgttctttgatactttcaatcagaagttcccggcactccatcggttctttgatgtgtttttcttttacctttgctttcagatcatccagaatatcataggttgcctgtacaccaaggtctcccatgatcagtacttcctccaattcctcgtaaaagtcatcatcgatacgggagaatccgtgaaagatgctgtccattcctgatacaatattatctctggtcttgccaagaccggcaaccagtttttcaaaaaatcccataccttcctcctatttatccagttcattttccagcaggctgacagataccagtgtagagacacctttttcctgcatagtaataccatacagtctgtctgctgcggtcattgttcctcgtcggtgtgtaattacaatgaactgcgtatattttgtcaatttgtgcaaatattgcgcaaaacggtctacgttattatcatcaagcgccgcctctatctcatccagcaggcagaatggtgacggtttcagattctggattgcaaaaagaagtgctattgctgtcagtgccttttcgcctccggataactgcatcatgttctgcagcttctttcctggcggctgggcaataatccggatacctgcttccagaatatcctcatcttccataagttccagcgttccttttccaccgccgaacatctccttgaatacctgatcaaactctgcggcaattctggcaaactgctctttaaactgcttgcgcatggcattatcaagttcctcgatgatctgctccagtgtttcggctgcttcaaccagatcatcatgctgtcctttcagaaattcataccgttcggatacacttttatattcttctatcgcattgacattgacatttcccaatgcacggatctcactttttaattcctggatccgtctcttcatatctgcaagatcggtcagattcggattcctaagctcttttgcatgattcagtgtgagttcatattcttcccacatataattaatctgcttctcggaagcttcttcgcagccttctttctggctttccagacggtaaacttctttatcaagatccgccatatgtttcgagatctcttcacgtttttcaaagaacgctttgtgacgtttattcagttccattcgttcactttttgaatgttcgatctgaagtttgatctcttcaaacaaatctccggaatgatcaattgttgtttttaactcgtggatcttctcctctttttcggtgatctccctggaattgccgcctttattctttgtcagctcttccaattcagtccggaatttatcgacctcttcgcagatacgggtaatattttccgtgataaatgtatatttttgctctaatcctgcatattccagatgaatctgttctgattttctggtcttaatactctcttttgtatgaacatcttccagttctttctgctctttctcaatggtgaaattcagatcattctccagactttcggatgtatccagctcaatattaatagattcctgattgtccatgatctccgtgatctgtgcatcgagtttcgcagcttcattccgcaaattatcaaactgctgtctgaagcttctgatcctggctgatgactgatctgcattcatcttcgccgtattctgtacgacatatgctttctgcagttctgtactgattgcatcggtcttctcataataccctgcacgttcttctttcagaccggagatctgttgttccatctccgtcatctcctgcttaagcttctgcacggtcttttcaaattcttcgatttcccgtcgtctgctcagaagattacttgagtttttaaatgctccaccagtcatcgaaccacctggattgatcagctcgccttccagtgttacgatacggatagactggtggtatttccttgcaatcattgttgcatgatcaatatgatctactaccagtgttcttcccagcagataatctgcaagggttttatatttgctctccacctggatcaatttgttggctgtcccgataactcccgtttctttcagtacttccggccggttaatcccggaattcgcacggatcgacgttaacggcagaaaggttgcacgtccaaacttattcttcttcaggaaatgaatcattcgttttgctgtatcctcatcctccgttacgatattctggatatttcctccaagtgcagtctcaatagcgatctcatagtctttttcaaccttcacgatatctgctactacacccaaaagtccctgctcccggtccttattatccatgactttacgaatactgttaccgtatccgtcataccgttccgtaatattctttaatgattccagtctggactgttccctgtgaaaagcagattgtccgatctgcagcttctgggattctttcgaaatcttagtctgcaattccctgatcctgcgttcatattctttattctcgtcattcagtgaaatgatcttgtcggaaataactttcaattccatttggaatttattcaggctctcattctcttctgcgatctcactgtcatttgcaaggatttcacggttaatctgcgattttcttacctggatctgctccatcattgtatcgaatttctgaatctgagctttcgtagatgctctgttattcagtatttccataatatgattctttttttcatcgacagatccggtaatctgagcaatcttctcctgcaattccgtcagttcatttttgatcttatcttcttctgaccgcttttcttccatctgtttttcaatggaatctttttccgtgtgaagttctttcagctgtccttcacggacatctatctccgaatcaataacaccggcacgctgatcgaagtgttcatcattcatccgcgcactgtggatctgttcttttaacaatgcgatctggttctctaactgttgcttcagaatggttgtctcatttaactgacggttcgctttttcaatggaattatcgatcacttccacctgttcttcaatcgactcatattctgtctttgtatctgcatactttctggttgcttcttctagttctccttttgtaatacgcagtttttcatccagattccggatctgatcccggatacgttccatttccaaaagaaacatattgatatcgtatgtttttaattcttctttgcgtttcagatattcccgcgccttttcagactgacgttctaacggtccgacctgtttttccagttcagacagaatatcattgacacggaccagattctggcgttcgtcttccagctttttgactgacatactttttcttcgtttgaatttaacaattcctgccgcctcatcaaaaagttcccgcctctcatccggcttaccacttaagatcttatcaatctgtccctgtccgataatcgaatacccttcttttccgatacctgtatcatagaaaagttcatttacatcttttaatctgcatgctcttccattgatcagatattcgctttctccggaacggtatagctttcttgctaccgtaacttcttcgtaatcaaccggaagcttatggtctgaattgtccagagtgatcgccaccgatgcataactaagcggctttctgttctcagtaccggaaaaaataacatcctgcatgttgccgcctcttaactgcttcacacgctgttccccaagcacccatctgaccgcatctgctacgttactttttccacttccgttcggaccgacaatgccggtgattccattatggaattcgaatttaattttattggcaaatgatttaaatccctgcacttctatgctttttaaatacattccacacctactttatattcttttcatgcagtttcaaaatgctgatatatgcagcctcctgctctgctgctttcttcgtccggccttctccaactccgtattcttcttctccgatatgtaccgcaacacggaaagtcttattatgatccggtccctcttcaccaatcagatgatacgagattacttctttaaaattcgcctgcacgatttcctgcaggatagtcttgctatcaaaaaagagtttcttgttctccaaatctttcaaaataaatcgatgtataaactcttttgcattagcaaaaccaccatcaagataaattgctccgatcagagcctccattgcatccgatgttacagattctctctttcgtcccccggtagcgtcttctcctttaccaagcaggaggtattctccaagatcaagatctcttgcgcaaaatgccagtgccggttcacataccatacttgctcttgtctttgtaagttcaccttccggaagctttggattattgtgaaacagaaattcactggataccagttcaagaactgcatcccccagaaattccagccgttcattacattcatacttcggaagatgtttttcattggcgtaagaactatgaatcatcgcctttgtaaacagggtaaagtcatcaaatttgtaaccaatctttccttctaattctttaaggtctttgctcatcgtaaactccatcctaaagaacgaaaaaagcccctggcagggctctttcgttctttttatatctgcctagttattatttgttgcattcttgatctgctcaacagcatctccaactgtagagatctgctcagcgtcatcattatcgatctcaatgtcaaatgtttcttctattcccataataatctggaagatatcaagggagtctgctcccagatcatctacaaatgttgtgtcctctgtaatatcattcacttctacatttaatacatcagcgatgatttcttttaatttttcaagttccatatcaaatctccttttcttatcatagttagtaatatattattcagcggatttttgctccgattgaatactttccctgatcttttcattgatcttctgcttcttaaatgttacacattggattaatgtattgctgacttcttttgctttcgagcttccatgcgtctttacaaccagaccatttaatccaagcagcggcgctccgccatactcacttgcatcaaacgattttaaagttgatttcaacgccggcttgataagcaatgcaccaatcttacttctgagggtggacatcagtccttctttcaccttactgatcaataccgcaccgacgccttcatataacttaaggattacattgcccgaaaatgcttctgtcacaatgacatctgcctgcccatgcggaatctctcttgcttccacactgccgataaaattcagttctttttcttcttttaatagagggaatgtttcttttaccaatgcattacccttttcttcttctgctccgatatttacaattccgacttttggactcttaataccaatcacatgctccatgtaaatagaacccatcttggcaaactgaaccaggtgtgatgctctggcatctacatttgcaccgcagtcaatcaaaagtgctacccccttctctgtcgggatcagagacgcaagaggtggtctctctacacctttgattcttccaacgattacctgtccgcccaccagaattgctccggaacttccggcagatacaaatgcatcagcctttccttcctttaccatcttcattccgactacgatggaagagtctttctttcttctgatcgcattcaccggcggctcagcagtttctataacttcggttgtattcacaacttccagtctgttcttgtcataagtgtacttctgtaattcagcattcaccatatcttctttgccaagcagatatacttttatgtcctgttcacgtccaagggcatcgactgccccttttaccatctcacccggtgcattgtccccgcccatagcgtccaatgcgatcaccgtaatttctgacatatttattcctcctaatattactgaatttattctactaaacatccatgcaaaaatcaatattttcaaaaatatttatcagaagtttgataatatatgatctggttggtataataccttttatcatcaaaattagatatggaattatagaaagaaagggatcaataaatggattattataagagagctcttgaactcaacgatgaaaccataaaaaacagacgttactttcatatgaatgcagaggccggtcttcatatgccaatggcctgcgtatatgtaatggacaaattaaccgaatatggattggtgccttcgaggtgcggagaaggtgtgactgctactgtcggaaatggcggtaaagtattattattacgtgcggacatggatgccctcccaatgccggaagaaagcggacttccatttgcctgcccgaccggaaaagaagcacatgcctgcggacatgattttcacgctgccatgttactgaccgctgcaaaaatgctaaaagaaaatgaggccgagttaaaaggcacagtcaaatttatgttccagcctgcggaagaaacattcgaaggcagtaaaaatatgatagaacatggtatcctggagaatccgaaagtagatgcggcactggcctatcatgtatctccagggcagatgccggttggaatctacatgtataacagtacaggaactatgatgtactccgttgacggttttcatatcgaaatcaaaggaaagggttcacacggtgcctatcctcagaactccattgacccgatcaatattgcggcacatgtctatctggctctgcagtccgtaatcgcccgtgaggcagatccttccaaagcctgtcttatgaccgtcggtaaattccaggccggaaccgccgccaatatcattcctgatactgccgttctcgaaggaactattcgaacgaacgataaagattccagagaacttctggtacgaagaatgaaagaaacggcaatccggacagccgaaactttcggaggaacagccaaaatcactatgatctcggaagtaccgcctctgatctgcgatccggaatttaccgaacagatcgtcggcttcatgaaggaactggatattccgaaactaaccccttacccaggcatatccgcaagtgcttctgaagattttgcaaatattgcagaacaggtaccatccgctttcatgtatctgtctgccggatatatggatgatcgcgggaagtattctgcacataacccaaaggtacagtttaatgaggatgtgtgtccgatcggggctgcgtgtctggcgcactgtgcgacccgttatttaaattgatttgggatttaatttattaactggggaagcggcctctcagtccttgaaggaaacaatagataaggcttcttgttcaggttccataccataagaaacactaagagagtcagaatcacctaaaagcaaaggaactacgctcaaactcggcgttcgcctcaaacacgttcgcttcgttcctttaacggtgcttctgactctctaattgtttctaacggcattccacattcacaataatccttatctattgtttccttcaagtcgtgactggcagcggatgttaataaatgaaatgcccgaaagtgtaacccggtgaaggccactacggttacgcaattgctgtttaattcttaaggcatttgatacacacggaataaaacttggaaaggctgttccagtgaatgtggaagaggcgttggtaattcttaaggggcaaaattctgcgttgagttttcaaaatttgactgtctgaggcgtatgccgagtttcaaattttgaaagcctgcttttagcagaattt

SEQ ID NO: 2848 - DNA, 13176 bp, Unknown
  gut microbiota DNA sequence
ggcaagtatggtccagcttcgctggacacacggcataagcagaagcactctctggagaatgttgaaaaaataaaaaaagaatcacaaacggaagaggatgaagtaatacgcccctcgtctaattaacagggaacatattacttcatcctcttccacctgtgattctttttatttcatattcttcttatttactcgatcgcatccgtctcaatcacaaattttacattaccatccattgctttatccttaccgctgaatgtactatatttgcaatcttctgatgtcagcacatcgattctgtcaagtacatcaccaagttcatcttccacggtgctcttcaacttacttgttccttctttgtcaaatttcgccatgccttctgcaagctcttttgcacctgactgaagttcggaagctccgcttctaagtgcaccgctgttggctgcaagtgttgcagatccggaagacatctggcttcccagtgtgttcagtccgcttgccagctgattggttccactctgaagtgtattgacaccggctactaatgtcggactgttggatttcagtttatttgcaccacttaccagggaatcattgtatccgcttaactgagcgaatcctttgttcagtgccgtgattccctgaattgctgtcgggaattgagcggatgtcgcatgattcaatgcagccagattgctgtgcagtgttccgattgcactgttcagtccctgcatacctgcatttaactggtctacacttcctgttaatgtacttaactgccctgcctgtgcaagaacaccttccgcatcttcgatactcttcaactgcttctgtaattccggaagtgctgctgccagctctcccgaagacttcttcaaagtatctgcattcgtcatgatcgttgctgcacctgcttttaaggaatctacatctattgtcggcatctttgacgtatcaatgcctgataactccttgagattctgtacggaatctgtggaagcttttgcgttcttcagtgcacttatagaactctgtaattgctttgcttcctcggaattcttatctgagattcctgcatacttcgcttccagtgcacttatagatgcagcgatcgcatcagaactgttctttgctgttgtcttagctgttgcaattgtctgattgtcagatgcaactacatcattgatattcttacatgcattctctaatgctgtctgcgctgcatcaatatttgccagagcttcctgcataccatttaatgtctgggcaattgttgtaagcggtgcctcgatgccatttgccagtgttccgcttaatgtcttagtctctgccatcaatgtattgccggttgttaccatagcatttacctgagacatcagaccctctacttctttcgttccgagtgctgctttcatctgtgctgttcctgctgccagagcctgggatgctgcctgaaggtcttctgtcgttgcacccttaccatctgttgcagcttcaagctgtgagatagcgctttgtacctgcttcagtcctgtacttaactgtgtcagctgtgaagctccggctgccagctgcttctcgccgtctacataactgctcacaccgtctgcaagtgtattcacaccacttgtataatcctgtacacctttgacaactttgtttacaccattcacatactctgtgacgctgccattcagctctccgttagaaccaaggtatttctggatgccggcgttcaatgtatcaacgccttctgtatagctgttcacaccatctgcaagtgttcctgctccatctgcaagtgtatcggaaccacttactaactgaagtgccgcatcctccagatcatccagagcgttctgaagatcatctacatttacgatactgtccatatccacatcatctaacagatcagataatgcaacagtataagtagaagacattgtaaaatctgttacatctgcttcaatacttaagctttccggaatcgtaactttgtcactttcttcactgcttaagttcaggctgtcttttaatcccggcattccgaatccgactacgatattcttattaccatcagaaataatcttgccgttatcaattgttacattactgaatgtctcattcggaagtatcattcccgtcatcatcacgaacggtgtatatacttctgtatcttttccatccaacgatacattctgcttttcattattcttataatcaacggtaattttcaaatgtccgctcttaccctttaactcagacggcttcatctgttttccgtccagataatagttcagttttactgataccggaagtttcttatctgtcgttccctgataatagatgtcctcaccgtctgtagtccaggtcagtttatctccgtctgacgtatatttttcatcaccttttacattcttgatatcgctcagtgtgctttcatcttccagatttccggatacgcttccggaattcttaagccagttagatacggttaccttatccgtcttaccacttgccttggcattcacgtatactgtttcttctttatatacatcactgtctgaagttccacttgccgcgaaagctggtgtcacacccatcatcactgacattccgactgctacagatgctgcaatttttcgtttcatttttctgttcttattcataattcctgcttcctttcttagttatcatggattgttaataacaggttactttgcttcacttgtctgtgcttttgcctttttcccaagaaatccgatggatgtcttgcagattaatttgtcaaatatcatgaacattgccggcaataccagaagcacgactaccatactgataatggctcctcttgcaagcaatgtacagatcgaaccgatcatttcaacctgagaatagcaggcaactccgaatgttgcagcaaagaagctaagtccactgctgatgatggacggcatactcgttttatgtgcaatgctgattgcttccatcttatcttttccaaggcttcgttctttttgatatctcgttgtcatcaggatcgcatagtcaacagttgcacctaactgaatggcaccgatcacgatacttgccacaaacggaaggctgattccctgataatacggaattgccatgttgatcataattgcaaattcgataactgccaccaggataaccggcagtgaaatcgatttgaaaataatcaggatgatcacaaatatcgctgcgatagagataatattaacattaacaagatcgacatccgtgacatcctgcagatctttcatcagaggcgcttctccgatgaccattcccgtcttatcatatgattttacaatcttatcgatctttttaatctgtgtattgacctgatctgttgcggattcgtattctgtacttacaaatgccagttcataatctttactctgcagcatcttccggacatcctttggaattatggaatccggtacactaggcccgataagtgaactcatactgatggtccatttcacgccttttactttatcgaccttattcagcatctgctgtttttcctttgcatccatgttcttatccatcatgataatatgcatgttgcttgccccaaagtcatcctttacttttgcaattgatacattactgttcaatgttgccggaagtgaatctgcaatattgtagtaaatctttgtatggttatttccataaattgccggaagtaaaagtataaggaatgccgcaatccatactttatagtgctttgtgataaaggctgatggacgatccatattacttaacagcaatttgtgtcttgtcttctcgattggtttatcaaatacaaggatcagtgccggcagaattgttacacaacagataacgccgatcacaactccttttgccattacgataccaaggtcacgtccgagtgcgaatgtcataacacaaagtgcgatgaatccagccacagtagttacggaacttccgacaaccgacttaaatgtattggcgatcgcatgccccatagctctgtctttctcacccgggaatctcttcttattctcttcataactattcagaaggaagatggaataatccatcgttacgccaagctgtaatactgctgtcagtgcctgcgtaatataagacgtttcaccgaatataatattacttcccaggttgtataaaatcgcaagccctatacttagcaggaataaaaacggaactacaaatgatcccgatgtaatctccagtacgaccaggcttaacagtgccgcgatcactacatagatcggaagttctttcattgcgatattcttaatatctgtaacgatacccgtcataccactgataaagcactgcttatttgcgatcttacgaagctgtgtcagtgcctccatggaattatcagatgatgtcgtatcatcaaataataccagcatcatcgttgcatctccattgataaatgcttttcttatatcttttggaatcatctctgtcggaagactgatatctgccacatcgtcataccagagtacatcctggacgtgcggcactttttcaaattccttttccagcttctgtacatccttcatatccatattctcgactgcgaccatggagaatgcacccattccaaattcatctaccaggatatcctgtccttttaccgtctccaggtgatccggcaggtaactcagcaagtcataatttacttttgtttttgcgatgccgattattgacggaacaattaataagactcctataagcagcaccagtattctgtgtcgggcaatccatttgccaactttgaccattctttccatctcctcttattttcttcatgcatttattattataatcaaaaatgactagtagtcaatattttatttaaattatttttttatttcgttgataatctttatccatattagcgcacactaaaaaagaaacagcacatcccgtgttgtttcttttttgtttctattctataatttattgcttcacacattccgagagaagcttaatgtgctgctgcctctgcatttccggcaactttttcttttcgtttgtcatgcattgcaaataatccggctaacagagttcctgagatggaatgccatgtacaggataccgcacagataattgcagattccggtgtagatgcaaactgggcagttgtagttgcaagattcgttgcaagtccggcattctgcatacctacttcgatagaaatggttctcttctttgatgtattcataccaaccagttttcctgctccatatccaagcagatatccaagcccgttgtgcagtaatactgctacgaagatcacaacacctgactggaagaacttggctccctgtgaagataccacaccaccgacaacacatgcaagtccgagaacagcaactcccggcataactttctgaagttcccggaatgttttattctttcccaacagataatttaacaagaatccaacaccaaccggaaggataacagtctcaatgattgatacgaacatcggaagtcccttgatcgtaatctgtgtaccgcttgccagtaaagataccatgagtggtgtcataaccggtgagaccagtgtggatactgttgtcattcctacagaaaaggctacatccccgccgcacagataagacatgatgttggaagatacacctcccggacagcagcctacaagaatcagcccaagtgcgattccatccggcaggttcaatacctttgaaagcgcaaatgcaaggaatggcatgatcagatactgcgcaaccgcaccaacacaaatgtcaaacggacgctgtgcaagaatcttaaagtcttccgttgtaagtgtcagtcccatactgaacatgataataccaatgataatagactgacatgtgaacttgttcgataccatgtctgtgaacagtgccagatttacccagcccatcatagacggaaggaaaaatgtaaccactgcgattgcgattacaacaattgacgtgtagtctgataaaaatttgcttgttttttgtaatgctttcattactcttctcctcctttaagcaatcactgtccaccaaaaaaaaatccctttccagaatatactctgaaaagggacgaaatctatccgcgttaccaccctaattctgtagaatctttctacagctctcattcacgtaccatcatacatgctccctgtaacgggggataccggcgaggtttactttgatattgctttcaacccgcttcttagagaggatatccttatctgcttattacctgcttccaccaaccgcaggctctctgtgaaataacgatagatacggcattgttctcatcaacgaatttcggtgaactatatgtgttttttacaagtccttattataaacctgtcatttcaaatgtcaagtataatttttcatgattttgcatattttttcatcccatcttgcaaaatactccttgacttcccggatttttactctccgatccttggaagattccatctgtaatgagccgcaagaaaacgtatcagcataacgatcagtgatgacaccaccatcgccggaagttctccgtaacttctgtatatgatcacacatatccacgcccccgcaatggatgcgcatgcataaatatgtttcacaaatatatacggcgcaactcctgccatcgtatcacgcaagagtcctcctccgactcccgtcattgtaccaaggaagaccagcagaaatgtattatcgatatagccgcagctgataccttttgtcactcccatcgccgaaaagattccaagtcctacagaatccattgccaacataagtttatcatagacctcaccaaaaccatcctgcagatatttcctgcggaaatatataatacaaaacacaagcaccgcagcaagtacggcatagatcacatataccggatgcagaagtgccgatggcaccttcccaagtataacatcacgaaccatacctccgccaactgccgttgacacaccaagcacgatcactccgaatatatccatgctgcactcaattccaaccattgcccccgatgctgagaacgctactgttccgatcagttcgattgcaaatataatccactcctgaatatccatcttgttttccccatcttgtcttttattctttgtaaatttactgtcctgttcatgctctgtcattctatttccgaaggtcttccagcatctctctgaccgtcttcccatacaccggatgacgtttataaggtgcaatctcatgcaaaggctccagtacaaacgctctcttatgcatctccacatgtggaatacataaagtatccgtctctgcaaccagatcatcataaaatataatatccagatccagcgttctcggtccccaatgtatgattcgttctcttcctgcctctttttcaattcggttcagctcttttaataactcttccggatataataatgtcgaaagcttcagacaaccgtttaagaaatccggctgatccgtcactccgtacggaggtgtcgtgataaatgtcgataccttctccacctttgtattctttatctcatccagcgcctgtaccgcggcttccaaaatgcttctgctatcccccatattcgatccgagcgcaatatatgccgtatgccattcacgctcaatctctacactgaccgtcttaagcggcagtccgaccggtgcccacggtttcttgatctcaatctgcaccttctgcagacctgctatacgcaccagcatctcctctgccagtccttccgcaaccttctccagaagcttaaacgtatgacttttcaaatactctgtgataaatgcacttgcttctccataatggatagatgcagtcagctcatctgtcagtcctgcccgtctggtatccgtatacataaccgcagacaccacaaatttctgccccagtacattttcctccggaaacacaccatgattggcaaatacttccagatcttctatctttatcttgtccggtttcatctcattcctcactctttctatacttcgtgtccccgcatgattgctttcgtcatctgaatggctctcttatttttctctacatcatggacgcgtacgaatgcacatcccttctgtaccccatatacggtcgtaaccatcgtaccttcttcccgctgcgtcaccggaagatccagcgtcagtccgattacggattttcgtgatgttccgagcaataccggatatccaagttcatttaatatctccatcttatcaataatctccaggttcatctcataagtctttccaaatccgacaccagggtcaaggatgatcttgtcatcctcaatgcctgctgcttttgcaagtcttacacattctttcatatcatccatgaaatctttcaggaagtcctgatattccgccttttcccgattatgcatcagacagcatgcagcctgatactttgcgatcacacttgccatcttcttgtcatattttaatccccagatgtcattgacaagatctgcacctgcctgaagtgcagcctctgcgacatggcttttgtaggtatcgattgacaccggtacatcaaattctttcttaagcacttcaataattggcgtcactcttgcaatctcttcttcatccgtgatttggatatgtcccggacgcgtagattccccgcctacgtcaatgatatctacaccttcttcaaccatctggtgtgcatgtgcaattgccgcatccattccgttaaactttcctccatcggaaaaggaatccggcgtcacattcaggattcccataatatatgtatgatttgctgtatcaaaattctttccacctatgatcatattattatctccatatttttctcttcttcattccagttacacttcttctctgccatgcaggaaagacacattctggaacgtttatcactttcatagaacagttcctctatcggcttcatatgctcatgccgtctgcggtgtcccctgactgccagacagatcagtgctttttcttcatccgtaaatgtaaaaccagtcggaagagaatccaatatccgccttgctattctctctcctgcgatctcatgcggaatctgctgtctgtactgaaaagatttgccaatatcatgcagcaccgccgctacgtagatcaattccttatcgaatccaagtccttcttccagattcttaatgtaagcaattcttgccacatccagaagatggttcatctgatgacaacagaataccctatccgtctcacattcacagatacgcttatagtatgtctgatacacttcatgattcaccaccgcattcagacggggcatccctttttgtctttctgttactcttttcatctacatctgtatctctttctttttatcgtccaagcatccggaaaaatctctcttccagtaccggatctgtctcaaatacaccgcgtcttgcaattgtcacagtctggcttcccggcttcttgatcccacgcattgtcatacacatatgctctgcttcgatcataacgatagcccctttcggctgcatatactccatcaaagcatcagcaatctgtccggtaagctgttcctgaagctgcagtcttcttgcgaatacctccacggtacgggcaagtttgcttaatcctacaactttcccatccggaatataagcaatatgtgctttcccataaaatggcaggaggtgatgctcacatgtcgaatagaatgtaatatctttctctattaccatctcatgactgtcaacggtaaatgtcttggaaagatgctttccggcatcctcatccatacctccatatatctcttcatacattcttgcaatccggtccggtgtatcaatcagtccttcccggttcacatcttctcccattccttccagaagcagccgcactgcctgttctatcttctcatgatctatcatattctttcctttctctgcggattctgtacgtatccttccatacaccggattacttcacttagatatgacaatgaaccacatgcgatcaccgcacgtttcccactgtcttctgttgcataagtatacgcttttgcaacagcatctccaatactcttttctgcgtacacgctcatctgttctgtcatacagtctcttacacattctgcaagcttctctgccggcagtgtacgttccttattcggcagatctaccgtatacacccgctttgctgacggacacagaatctgtacgatcttctcatattctttatctttaaatacacccatgatcaggataagttcctctcccgtaaaataccgttcaatggatgtcttaagcttcttcgccgcatcttcattatgcgcaccatctacgatcacaaccggatcttcagacagacaagtaaaacgtcccgcccatcttgttgcatcaagaccgtccctcactgcttcttcctcaatctgatatcccagcttcctgaggctttcaattacttccagtgccacagaaagattttctctctggcactctcctgcaatgtggttctgcatatgcgcatattttttatatgaaaatctaagtcctttataatcttctttttcgatactcatctgttccggctctgcttctgtgtatatacagttcagactctctgctttctttcgcaggatcagtctgacattctcctgctgtcttgctgacactaccgtacatcccggtttgatgatcccggatttcgtctgtgcgatctcttccagggtatctccgatcacccccagatgatcaacactgatcgttgcaaatactgcgcaaactgtattcttaattacattcgtcgcatctgtctctccgccgagaccggtttccaatacaaccagatcacatttttgtttcttaaaatacaaaaaagccatcgccgtctctacttcaaacactgtcggaacaggttctcctttacatacaagccggtcaattgcttcttttatctcttccatgatctctgcaaattctgattcagagatccatttcccatctatctgtatcttctccagataagaaatgactgtcggtgaaacatatcgcccggttttgtatcctgccttacttaatatcattgaagtgtatgcaagcacagatccttttccattcgttcctgcaatatgtatgaacttcagatcatcctgggggttcccaagttcacgcaacagacctcgaatcgtatctaagccaagtacacttccgtatttcgacatctcgtccaaatataccctcgcttctttataggtcacgtctttattttcctttcatcaaaaaaatagtgctgtcaaacagacatttctgcctaacagcactatcataccactattcaatcacactaacaagtgattgcttctttaatttattagatattcagcagatcactgaacaccttcagtgcaccatctgtctcgtgtgcaagtacacgttttgcaagtactttaccaagctgtacaccttcctggtcaaagctgttcacattccatacaaatccctggaacataactttattctcaaagtgtgcaagaagtgcaccgagagatcccggatttacctgctctccgataatgatgcttgatggacgtccgccttcgaaattcttattacggttctcatcggatttaccacatgcaaatgcaacgatctgggcagctacatttgcacaaagtttctgctggcttgtgctgtcctggatcacaacatctgtttccatctggctgttcttgtatccaacgaactgtaacggcacgatatccgttccctgatgcagtaactgatagaatgagtgctgtccgtttgttccaggctctccgaagatgaccgatcctgtaggatagttaaccggctcaccgaaacggttgacagatttaccgttagattccatatccaactgctgtaaatgtgcagggaaacggctcagtgcctgggaatatggaagtacggccgtacttggatatcctaatacatttctctcatatacaccaatcagtgcatccagcattgcagggttcttgaatacatctttgttcttagaaagtgcatcttctgctgcagcaccatcaaggaactgtgcaaatacttccggtccgaatgccagagataatacagcgcctccaactgcagatgtagaagaataacgtcctccgatatagtcatccatgaagaatgctgcaagataatcgtcactcttagccagcggagatgtctcacttgtaacagcaatcatgtgcttagaagcatccagtcccgcattcttcagtgcatcttttacaaatgattcattggttaatgtctcaagtgttgttcctgattttgataccagtacgaagatagaatgtgcaacatcgatagaattaagtacagctgccgcatcatcagggtctacgttactgatgaatttggcttccatcttgaatgtgtcattcttcttagcccagttctcaagtgcaagatacattgcacgaggtccgaggtcgcttccaccgataccaatctgtacaaccgttgtgaacttctctcctgcgccgtttgtgatctctcctgcatgtactttgtttgcaaagtctgcgatcttagcctgctgttctgtatagaatgcacgcttgtccactccatcggcctctacagcttctccaagctgtccacgtgtcatgtgatgaagtaccagacgtttctcgcctgtgttgatcacttctccgttgtaaagtgcttcaaatttctctgccagctgtgcttcatctgctaattttgcaagtgctgccagtactttatcgtcaacctgctttgcagcatagttataagtaagtccttctgccatcggaacgctgtaattctttactcgttctgctccgctttctcctgtcattgcttctacaagatttactcgctcaactttttcaagttctttgaatgatgcaagggtatctaagttgttccaggtaatcataatattagattcctccttcaaaaaaataaatatgatctttacggtcatgagtcaggccgtatttctcgttaattttagcacattttcagtataataacaattaaaaagcaaccaacatatgttgattgctttttaccttatatatataccttcaaaactgcatacaagaaatatttctttcatcctacctatcaccttgcttggtcatgccctc

SEQ ID NO: 2849 - DNA, 57133 bp, Unknown
  gut microbiota DNA sequence
atgtaagtggaacgcaaagagaaatatggcttttgggagctgatggagaacaagtacttttccctacatggagtgaaacaaacggtcaggatgatatcgtttggtatagtggtgttaacagagggaacggtacatggagtgttactgtagacagtaataatcacaagcatggtggaaaatacaatacacatgcatatgtcgcaaaaaacggtgtaagaagtgcagttggttcaacaagctactcactggaaagaatccagacagcacagcagtttatgaatgcaaaagcaaatatgtattcaagcagaaccccatatttgttactggtaaacagaagtacacataaagtaggaatctatcagggatggcagggaaactggcgttgcattcagtattgggactgttcagatggagcaccaagtacaccaactgtggaaggaacattccaggtgggaagtaaaggttactattttgattcgggttcggcgagatgttactggtatacacagttcagaggaaattatttgttccattcagttttgtacaataaaaatggaacattaatggatggaagacttggaatgccactttcacatggatgtgtcagattaaacattaataatgcaaaatggatttatgataccattccagcaggaagtacagtggttgtatatcattaataatgaatataggtggttgatgaaatatatcagccgcctattattttttgttagaattatacaattaattatcagaatattgctaataggttgagatttagaaaagaatatgctaaaatatattgtcgtttgtaaataatgatttttggaggagaatatgtcaagatatatacaaaattttttgaaattcagaccgctcttaagtgaattggtttcaagagatataaaaattaaatatcgaagatcggttttgggtgtgctgtggacgttattaaatccattgcttatgatgattattttatctgtagtattttcaaacttatttaaatttgatgttgaaaacttcccactgtatttattaagtggacagattgtatttaatttttatagtgaatctacatcaagcgcgatgtctgcaattaccggaaatgcagcattaatcaaaaaggtatatgtaccgaaatacttatttgttatctctagagtattttcaagctttattaatctgatggcttcatttacggcattacttctggttatgatggctatgcgttcggaattacactggacagtaatgttgtcgccaattccgctgatgttattagtattgttctcgttaggagttggtatgattttatcagcagtcacagttaagttcagagatattatgcatttgtactctgtattcctgacagcattgacctatctgacacctgtgatttatccaatgtcaattttgccgggatggttatataagattgttatgctaaatccattgacaaatattctgatgatgttcagagatgtaatgatcaataacatggtgttcagtataggccagctgattgttgcagttgtggaaaccgttgtattcttgattattggattctatgtattctatagaaaccaagatcagtttattttaaatatttaggagtatgacatggagaaagaattaattattaaagtagatcatgtatctatgaaatttaatcttgcatctgagaagtttgatagtctgaaagaatatattataaaaagtttgaaaaagcaagtgtcatataatgaattctgggcattaaaagatgtgtcgtttgaagtatatcgtggagagtcgttaggtctgatcggtttgaacggtagtggaaaaagtacgatgttaaagacgattgcaggagtattgaaaccaactaagggatctgtaagcgtgcttggaacggttgcaccgctgattgaattaggagcaggcttcgattttgatttgactgcgagagagaatattttcctgaatggagctctgttgggatattcaagggaaatgatgaattcatattatgacgagattgtggaattttcggaattacaaaactttatggatgttccggttaagaatttttcatcaggaatggtatctagactggcgtttgcgattgcgacgatcggaacaccggatatcatgattgtagatgaagtcctttcagtaggagattttagattccagcagaaatgcgaagcgagaatcagaagtatgatggacagaggaacaacaatccttttcgtctcacacagtatcgaacaggtagaatcgatatgcaataaagttgtttggttggatcatggagttttaaaacgatttggggatgcggagccaatttgcaatgaatataaaaattcataaaggagaccaataatgaagaaaataatgaaatgggttattggcatagctgtaattataatgtttagctttttatatgcgcatattgccaaaacgcatattttgtatgataacagagtagataccagtaaatatatgggtaccggagtgctttcgggaaaaattgaacagaaatttgtgtcggaagaggactatctggatggaataacaatcaaatgttccatacaaggaacaccggcagattctacagtaaagatttcgttaaaggatgatgagacaggtaagattgtagcaaaatctgaattgaaattaaaagacattaaaaatagtaagttcaatgttttcaaatttgacagaatttcagaatgtaaaggaaagacatatactctgtatgtggaaaatcctgacggagatgtggagaaaacattaggagttggtttctcttatgaaccaaagacagaaaaaggaactgaacttttaattaacggtaataatgttgatggtacattgattgcaaaaacagtaacgaaccgttttgatatggagacattttgcgtagtattactgtttgtgttatatattgtattttttgttaaattcttatatagattgtttaaatagttaagatgcatattcctgacttttcattgtgaaaagtcaggaattattttataatagaaatatataagtccaataaatggaaaaacatggggaggtgtggaaacatgaagaaaagaatatttataattacgatattaagtatagcaatgttaactgcatgtaatgaaagcggaaaaacaaatgacatttcgaaaaatggacaagataaaaagcaggcagaaaaattagaaataaatacgaagaagaattctgacaaagaggaagaagcaaaagaagaaaaagaaacgcaggataatgataacacaaatgaaagtgacgaaaataaagaatcaaaatcagaaacggaaataaaaaaagaagttacgattagtgtgttttatagtaatgatgatgcaactgcttttactgcggatatggtaaaaataaaagagcttacaccggaaaatgtattgaatgctttagcggataaaggagtaatagataaagatataaagattaataaatttgaagtatcagaagttgatggaatgcagagtataaacattgattttgatcaaaaatttaaagagtatattatgtcgtgtggttctacgcaagagtattatgttgttggtggaatctgcaatacttttataaaagcatatcgggcggatagaataaaaataactgttgatggaaattgtttagagacggggcataatgattatccggattatatgtttgaattttaaaaagatatttaataatattataaaatcaaagaataaagattgaaatataatatatatgtgttgacggagaggaattggacaataatgaaaaaagatcttgtaagtgtattgatggttaattataatcatgcggacacaattgaacaatcaataagaagcgtattggagcaaacgtattcgaaacttcagttgattattgtcgatgatggatcaactgataattcagttgaaattataaacagtatagaagatccgagaattgaggtatatgaagaaaaagaaaataagcaaatatgtgcagtaactaatattggaatgaagaaagtgcgcggagaatattttgcacgaattgatagtgatgatttgtgggaaaaaaataagttagagcttcaagtggaatatttaaatgaacatccagaacataaaatttgctttacacatgtttcaattatagatgaaaatgatcaagtagtcgattcggagttagaaaaattatatgcggtagattatgaaaggcaagaggaatggttagagacatttttcttccttggaaattgtttgccaatgacatcagtacttatgacaacaaagattatggtagaaataggtgattttaatattgcttataggcaattgcatgattttgattattggattagaattgcaaaaaaatatcctatggctgtaatccctaagaaattagctcgaattagaagatatgagagcgaaacaaataatagtaatatttcggaaaaaaatacgactagaacatataatgaatatgtggatatcagaagacatttttttgatgaaatgtcggatgaagtgttaaaaaaaacatttggaaaatattttaaaaatggtaatgctgaatcaagagaagaattggaatgtgaaaaagcatttttattgtgtagccctttaggacaagggaaagctatatctaatgttggtatagaatattttgtaaatttatttcaaaataaaatgatgacagatattttggacaaaaattatgggttaaatgcaaaaaaattttatgaattaacgggggaacacctttataatgattggaagctacaagaaaaaattcaaattataaaggaaaaaaataagaaatttgaaaaaacaatagaagataaagaaagtagaataaaagtactggaagaagagttgaggttgcgtaacaaaataattgaagattatgaaaattcaacttcatggaagctgacaaaaccgttaagaaaaattggaacaattgtaaagaagtaggaaggaaagtaagttgaaaaaaccaggctactattcatccggcgaatttgcccgcatggcccacgtgaccttgcggacaattcgctattatgacaaacagaatatattaaaaccatcctacgtcacagaagcgggcgcaagattctacacagacgaagacttcgccagactgcagcagatattacttttgaaatatctgggattttcgctggacgacatccgggatatgacgatcgatgatgcagactaccacttcatgctcaactctcttaacattcagttgaaattagtccgtgaccgcatcgaacagatgcagctggtggagcaggcaattcaggatacgtcggatctgattaagaaagaacattccattgattggagtcagatgttgaatctgatccatctgaccggtatggagaaaagtgtaaagaaccagtatcaggatgcgtcaaacatttccgcaagaattaacctacacagtctgtattcgcagaatacgaaaggatggtttccatggattttcgaacaattggaattaaagccgggaatgaaggttttggagctgggatgtggagatggtacactctggaacgtggacagggataagattccgaaacagacggagatcgtagtatcagatatatcggatggaatgttaagagatgcaaggcgtacgatcggtgcagacgacagcagattcagattccgtgtatttgatgcgggaagaatcccatatgataaggatgcatttgatcttgtaattgccaatcatgtgttgttttattgcgaagatatcccgaaagtttgtaaagaagtaaaacgtgtattgaagccggaaggaagatttgtctgcagtacatatggcaatgatcatatgagagaagtgagtgaactggtacagaagttcgatgaccggatcgtactggcagcaaagaatctgtacgagcgttttggaaaagagaacggagaagagattcttaagaaggattttgaaaagatagagtggaggcggtatgaggattcgcttatcgtgccggaacctgagccattgatttcttatatcttgtcgtgccatgggaatcagggacagtatattctggatcattacaaggagttccagtcttatgtgcgtaagaagacggaaggcgggttccacattacgaaagatgccgggatttttgttggatataatggttgagaataatagaaatatcgtgcataataaaagtaagtataaaaaagtgtagagtgttggtgaagatcggcaggtggcagagttgaaaaagttttttaatgtaaatgggagttgtaatccgcaaatacactatatgatagatttatcggaacgtctatcagagataaaaaaaatggtagatgccggagagtactttacaattaacagggcaagacagtatggaaagacaacattgctggctgctttggcagaatatttgaaaagtgattataaggtgatcagtcttgattttcagacaatcagttatggagattttgagaatgaagaaaaatttgttgctgcgttttcaaacgagatattgatatcagaatacgatataccagaagatatcagaagtattttgttacatttggcggatggaaaagagaggaatgtaaccttatcagtgctgtttcgtacgttgttgcagtggtgcagaatttcagaaaaaccgctggtattgattattgatgaagttgatacagctacaaataatcaggtgtttgttgattttttggctcaactgcgtgcatattatctgcgtaggatgcagatgcctacatttcggtcagtgatacttgcaggagtatacgacgtgagaaatgtaaaaagtaagatcaggccggaagaaaatcataagacgaacagtccgtggaatatagcggcgaaatttaagatagatatgaatttttcagtagatgatatatcgggaatgctgaatgaatatgaacaggattatcagacaggaatggatgtagtggagattgcagaaatgatttattcttatacatcaggatatccgtatcttgtgtcatgtttatgtaaaatgatagatgaagatatcaaagatgaaagcaagacagcatggtgtaaacaggatgtactgactgctgtaaaaatgttgttgaatgataaaaatccattatttgaatctttaatcggaaaattgaatgaatatccgggagtgaaaaatctgatttacagattgctgttcagaggtgaaaatataggttataatccagatgacagtggaatagatatggctgaaatgtttggatttataaaagttcgaaatggaaatgtctatattgcaaaccgcatttttgaaacacgtctttacaatatgtttcttatgtcaacagatgaacaggaaaaggatgtatatagagaaggggcaagattaaaaaatcagtttatacatgatggtgcgttggatatgtggcgtattcttgaaaagtttgtagaatattttgatgatatttacggtgatagagatgaaaaattcctggaagcggatggccggagatattttatgctttttttgaaaccgatcattaatggaacagggaattattatattgaggcaagaacaaggaatgatgaacagacggatatgatcattgattatttgggacagcagtatatcattgagatgaagatatggcatgggaatgcctacaatgaaagaggagaaaagcaactttcggattatctggagtattatcatgtggataagggatatatgctgagctttaattttaataagaataagaagattggtgtaaaagaagtggtgttaggagagaagctgttgattgaagcagttgtttgattacggaaaattaaagttatgatcagcgacaagtcgtaattcttaagaacttcttaaatattacaggaaagttacaaaaaaataaaaaaagtacttgaaggtgacctaaggtcaccttttataatctaattaacacggaacatggagactagaatagaaagtgaagaacttgataacctattaatacaaaacgaggaggttcctgaaatgaaaggaattattttagcaggtggttcaggcacacgtctgtatccattaacaatggtaacatcaaagcagttactgccaatctatgacaagccgatgatctattatccaatgtcagtgctgatgaacgcaggtatccgtgatatcctgatcatctcaacaccacaggatacaccaagattccaagaattgttaggagacggacatcagtttggtgtgaatctgtcatatgcagtacagccaagcccggacggacttgctcaggcatttatcatcggagaagaattcatcggtgatgatacagtagcaatggttctcggagataacatttttgcaggtcacggactgaacaaacgtctgaaagctgctgttgagaatgcagagaccggaaagggagctactgtatttggatattatgtagatgatccggagcgtttcggtatcgtagaatttgatcacgagggaaaagctatttccatcgaagaaaaaccgacacagccaaagagcaactactgtgtaacaggattgtatttctatgacaacaatgttgtgaagtatgcaaaagagttaaagccaagtgcacgtggagaactggaaatcacagatctgaaccgtgtatatcttgagaaaggtgatctgaatgtagaacttctcggacagggattcacatggctggatacaggtacacacgaaagccttgtagatgcaaccaacttcgtgaagacggttgagacacatcagcaccgtaagattgcatgcctggaagagatcgcatacctgaacggatggatcagcaaggacgaggtaatggaagtatatgaagttctgaagaagaaccagtatggacagtacttaaaagatgtcctggatggaaaatataaagaaaatttgtactaaaatctatattaagaaatgatacaaaaaggagaaatcaaaaaatgacaattattgtaaccggaggagccggatttatcggaagtaactttgtatttcatatgttaaacaaatacccggactatcgcatcgtttgtctggactgcctgacatatgcaggtaacttatctacactggagcctgtaatggacaatccgaatttccgttttgtaaaagaaagcattacagaccgtgaagcagtgtacaaattattcgaagaagagaaaccggacatggttgtaaacttcgcagcagaaagccacgtagaccgttctatcgagaacccggaagtattcctggatacaaacatcaaaggtactgctgtactgatggatgcctgcagaaaatatggtatcaaacgttaccatcaggtatctacagatgaagtatacggagatctgccgcttgacagaccggacctgttcttcacagaggagacaccgatccacacaagcagcccatacagctcatctaaggcagcagcagacctgttagttcttgcttatcacagaacatacggactgccggtatctatcagcagatgttccaacaactacggaccatatcacttcccggagaaactgatcccgctgatgatcgccaatgcactgaatgacaagccgcttccggtatacggagaaggattaaatgtacgtgactggttatatgtagaagatcactgtaaagcaatcgacctgatcatccataacggaagagtcggagaagtatacaacgtaggcggacacaatgagaagacaaacatcgagatcgtaaagatcatctgtaaagagcttggaaaaccggaaagtctgatcactcacgttgcagaccgtaagggacatgatatgcgttatgcaatcgatcctacaaagatccacaacgaacttggatggcttccggagaccaaattcgaagatggtattaagaagacgatcaaatggtatcttgaaaataaggaatggtgggagacgatcatttccggagaataccagaactattatgagaaaatgtatgctcaccgggaggagatttaagaatgaaagtattagtgacaggtgttggcggacagcttggtcatgacgtgatgaacgaactggcatcccgtggttatgagggaatcggttctgacatcaaagaaacatacagcggaatccaggatggtacagcggtaacaacaatgccatatgtgccgatggatatcacagatgcatcttctgtagaaaaagttctgacagatgcaaaaccggatgtagtggtacactgtgctgcatggacagccgtggaccttgcagaagacgaagataagaaagagatcgtaaaagcggtcaatgcaacaggaacaaagaacattgcagatgtgtgtaaaaagttagactgtaagatggtatacatcagtacagactatgtatttgacggacagggagagaaagcctgggaacctgactgcaaggattacaaaccactgaatgtatatggagagacaaaacttgccggagagcttgcggtatcggagacgctggataagtacttcatcgtacgtatcgcgtgggtattcggaaagaacggtaagaactttatcaagacaatgctcaatgtagcaaagacacacgatacattgaaagttgtaaatgaccagatcggaacaccaacctatacatttgaccttgcaagacttctcgttgacatgatcgagactgacaaatatggttactatcatgcaacaaacgaaggcggatatatcagctggtatgattttacaaaggaaatcttccgccaggcagcagagcttggtcatgacgaatacagcgaagacaaggtgacggttctgccggtaacaacagaagagtacggtgtatccaaagcagcaagacctttcaacagcagactggacaagagtaaacttgtggaaaatggatttactccacttccgacatggcaggatgcgcttggaagatacttgaaagaaatcgaattctaaattttatataggtgaagaataatctcagccacatgacgtggctgggattaactcacgtataaatcatttaaaacaataaggagacgtaataatgggacagattaaagtagaaaaaaacgcaggcggtatccagggactctgtgtaattgaaccaacagtacatggtgacgcaagaggatactttatggagacatataaccagaaagatatggaagaagcaggacttacaatgcagttcgttcaggacaaccagtcaagttctacgaagggagtcttaagaggattacatttccagaaagaatttccacagggaaaactggtacgtgtcgtaaaaggtgctgtatttgacgtggcagtagacttaagaagtgacagtgagacatacggaaaatggttcggtgtagaactgacagaagaaaataagaaacagttctacattccggaaggattcgcacacggattcctggtattaagtgatctcgcagagttctgctacaaatgtacagacttctatcatccgggagacgagggcggtcttgcatggaacgatcctgagatcggcatcgagtggccgacactgacaggagagtataaaggaaccgcatccggagaaggttatgcgctggaagacggcactgcactgaacttaagtgataaggatcagctgtgggttggactgaaagatacgttccatttttaggataaactatgaataagttatcaaaattactgaatgttgtgatttatctgtgcatcataagttatgcacttccaacaggagtaatgatgggcatagcaattcagaaaatattggtatgcctgttgattattctgggaggaatatgcctggttttacaaagaaaaagccttgagattataaaaagtgcgaagctggagattactttaggttttttgggattgttggcatgtattgtcagttacattcttggaaatgaatggagtataaaatttacgggattattctatatctcggtaattgtgtttgtagaattatattttctggtcagatatgaattggctgaaccggaaaagattatagaatgtatcctttatatgatgcttttgaagatcctgggaaaaataatcatagaaatcgtctttgtatgtaagttgatagaatatgaggctgtaatagaattttatctaaacatgtttggaacggaagcatcgacaatgacaatgcatttgggcagattattgctgatccgtgtgcagacttcatctgatattatagtagtgacactgatgccgttttactggatgatggagaaatataaaaaaagcatcagaagtctgctgtttgcattgagcgggatctatacattgattgtattttcgagagttttgatggttgaattctgctgctttgcatttgttgcagtgttatattattggaagaaaatcccgaagaaggtaagatgcatcggggtgattctggtgcttgcttcgtcggtgttatggttgaaacctgtgatacaaatgatagaattccggttcttttcttcatttgctatagaatcagatgatgtcaggcagatacaaatgagagaattgataaacggagtgaaggagtcaccggtattcggccatggatttggaagttacataagtgattatacaagaagcggatcgataccgttttcatatgaaatagaatacctgtcattttgttaccagatgggaatttcaggatttgtagtttttgttggaggagtgctcctgatatacataagaaaaatcgtaaagtatgccagaaaaaacacctgggtcattaaagtatttactttgattggactgggctggtttgtgataagacctgcatttaatcctgcatttctcggactacagaatggatttcagatgatcgggttattgatgatcaatatgtattttaataaaaagcaggaaccgtatcaaaagtaaaatgatacggttcctgtttttttctattttttgaataattttcgtctaaaccagtctctggcataagaaagagtatgaagaatcagttcaaactcgatcaaaatatagttaggcaggtgccgcagcttaaaagcaacttttttctgttcccgggcatgggaaagcccttcttttattccgcaggcatagtcttcaccgaaccccttacgcatgaaaaacagatatttgacaacacagccgagaaaaagaggaataaagttcaaaaccagctgcaagaaaggcatgtttttgtaattcaggtaaatattgttgcgggcggataatttaaccttgaaagagttatattttgaaccgcttgtaccgcttcctacgtggtagaccagtgctgtggggcagtatgtatttttgtagccgtaaatttttgcgcgatatccgacatcgatatcctcaaggtatgcaaaatgattttcatcaaataagccgatttttgaaaaagcagaccggcggtagatggctgccccggcgcatgcggtaaatatctgatctgcttttgtgtaattggagacaggacgtccggttccgcggcacacgccccaacccattaaagtataaagatcaccggcactgtcgatcagttctggatgatacatctggatcatcttactgctgacagaaaagatgtgcggagatttttcaatcgctttgatcatttcttctacatagtgtgtatcaacggtcgtatcattattgagcaatatcacataaggtgtagtggaatgttcgattccgacattgaccgctttgctgaaaccgtaatttttctttaaggagataacctctatatctgggtagtgctcactcatatattccagacttccatcggaagatgcgttgtcaaccactaatactttgaaatccctgcaggtctgttctgataatgactggaggcagggctccataaaatgtttcccgttatagtttgggatgataattgttactttcatagtttgagaaatactccgatctctattttctgatttgtttctattattatagcaaaaaaaagaagagggtgctatataaagagtgggtaaaataattttttaaatatatttcaaaattattaataaagtattaagaaaactgtggtataatgggttgccgtaaggaaaaaattattgtaagataaaacgtaatgtaaaattagataaatatgggtgaggaacattgataaaggataatcaaaagttattaaacagattacatgtagtaatagatgcagttgtaattgtattttcatatattgcatcatggtacctgagatttaaaagcgggatttttgaattggatccatggtttttatcgttgcaggaatatgcaaaagtgttgattgtaattgtgccgggatatttggtcttatattatggattccagttatatacaccaaaacgtgtgcagggacgcagactggaagcatggcatatcattcaggctaatgtgattggtctgatggcatttattttacttttatatgtgtggaaacagcctgatttttccaggggtatgatttttgtatttttcctggtgaatgtatttttagaagttgttgtaagaaatattatccgtgaagtgttgcgggatatgcggaagcagggatataaccagaagcacattctgctgatcggatatagccgtgcggcggaacagtatattgacagaattaaagcaaatccggaatggggctatatcgtgagaggaattcttgcggacaatgtaccaagaggaacagagtataaaggaattaaggtacttggaagaatcgataatcttatgattgttcttccggaaaataaactggatgagatagcaatcactctcgggctggcagaatatcataaattagaaaagattgtaggtatgtgtgaaaaatctggtgtccatacaaagtttataccggattataataatatcattccgacaaaaccatatacggaagatctgataggacttccggtaattaatataagaagagtaccgcttagcaatatgctgaatgcatttgtaaaaagggcaatggatatttttggagcattggttgcgcttacattattttcaccggtcatgctggtaataacaattattataaaagtgacatctccgggaccactgatcttcaaacaggaaaggatcggtctgcaaaataaaccattctatatgtataaattccggtctatggttgtacaggatgcatcaaaagaaaagaatggatggacggtaaagaacgatccgcgtgttacgccggtaggaaagtttataagaaaaacaagcattgacgaattaccgcagctgatcaatatcctgaaaggggatatgagtctgatcggcccgagaccggaaagacctcagtttgtagaaaaattcaaagaagagattccaagatatatgatcaaacatcaggtgcggccgggacttaccggatgggcacaggtgaatggactacgtggtgacacatcgattcaaaagagaatcgagtatgatttatattatattgaaaattggacattgggatttgatataaaaatattatttctgacatttttcaaaggttttattaataagaatgcatattagcttctaaaggagacggcaatggcaaagaaaagacgcaagacaaaaagacaattaagagaagaacgacgaaaaaaaatgcgcaaaagaaaaagaaaaagaattattttactaacagttgaaattataattctggctgctctgttagtggctgcttacggaatattcaaactcggaaaactggattataatgtgttgaataaaaaaaagctggaagtttataaggatacaggagagtatacgaacattgcattgtttggattggattcgagaaataatgaattggacggcggtgtacaaagtgactgtattatgatcgcaagtattaataataagacaagtgacgtgaagcttgtgtctgtatacagggatacgttgctgcagcaacagaatggacgctataataaagcgaacgcaacatataatacaggcggtccggaagaggcaatcagtcttctgaaccgtaactttgatcttgatattaagaattatgtcagtgtgaattttaatgcgcttgtaaaagtgatcgatgctctgggtgggattgatattaaaatgacgaaagaagaagcacactggtgtaatctgtatggtgccgagacggcaagagtgattggcgaacattggtcggatatagaagaaaaagccggtacgcagcatctggacggtattcatggtgtggcatatgcaagaatccgttatacaagtggtaatgacttcaaacgtgcacagagacagagaattgtattagaaaaggttgcaaagaaagcacagaaagcgaatttcattactttaaataaaatagtaaatgaagtatttccgatgatttcgacaagtttttcttcaaaacagattctgggatttgcagcgaatgcactgaattataatctggtgtcaacaaatggattcccatatcaggtaacaaccagtgaaacagtgaagaatcatagcggtgtatcttttgtcattccaatcggtttggaacagaatgtaaagcaattacatcaggaactgtttaatgatgattcttatgaggcatcagacaaagtaaaagagattgacagtgacattgtttatctgacggatataacagcagataatacagatgcaatggagtctacgtttaaaggagacagtctgaatgagggaacggaataaaattattttagaatatggaacttatatgctgagcttttttgtcagttacatagcgtcactggcaaaatggtattatgcttcgggaattattctgattgtggaagctgtttatttgtatgttcactgggtaagggaaagtggaagctttgtggaactgagggctctgtttacacttgcctgggtagggggccagggaatcagctgtctgaaactcagtacattacaggatacatggagctatataacctggttgagcttttgtgtgatatatatagcttttggaataggatatgaatggggaagaaagtatagcagggtagagggaaaagaacctgaaaaaaataaaaaaaaggcagacaggctttttcgatgtattatgttgctgctggttgtgtcggccggatgttttgtaatcgaaattatccggatcggttatattccggttttttcagacgaaccttattcgtattcttatttcagaatgtcggctttacattatcttcattattgtgcaatcagttgtatcctgataccgggacttacggtgctttggaaaaaaatcgattctgaggaaagtaagtggcgtaatggagcaatcattattgcaaatatagtggcatttgcagttccgtttctctatgtatcgagatttcagtttctgtttgaaataggtgtggcagcagtcatttatatactggtaaataaaaatatgaggaaaagtaccctggttcttcttggctttgtggtttgtgcagcgtatgtggtgattacattgtcacagaagcgggatgcgatatatttgaacaatgtatttaaaatgaaatatacacatatgccggtgtttctgacccagccgtatatctatattgccaataactacgataattttgactgtctggtgaaaaatctgccgaaattttcttgtggcctgcggatgttattcccgtttgtgtcattaacgggattgaaatttgtaatgccaaatctggttccggcaacggtctatctgaccagtaccgaattgacaacgcttacaatgttttatgatgcttattatgattttggagtcattggagtatttgtgatagctctgcttattggtgttgtggcaaaggtcattattgatattattaaaaaaagtgataacccggttgtatatcttttttatggacagattgcagtgtatctggctcttgcattttttacaacatggttcagcagtcctgcgacatggttctggctgatcattacagggatgatttattgctatgtaggatatgataagaaatagaggatgaaaaagaaaagatgaataacgatcagacttctgtagatgtggtgataccatcatacagaccagatgaaaaatttagcagacttgtgaaaaaacttcaggaacaggaatatccgatcggcactatttttgtgatcaatacaaaggccggaaggtttccgaaagaagtagagcagatggaaaaggtaaaagtataccatatagaacgccgggaatttgatcatggcgcaacacgagatatgggaatgcagatgtcaaaggcggaaattgttgtatttatgacacaggatgcagtgccagcagatgaatatgtgattggaaatctggtgaaagtactggaagaagatgaaatgaccggggcggcgtatgcacgtcagcttgcagcatctgattgtaattatatagaaaaatataccagaaaattcaattacccggaaaacagccggataaaaagcaaggaagatttacaggaaatgggcattaaaacattcttctgttctaacgtttgtgcggcatataaacggaatatttatgaaaaagcaggtggattctgcaagaaaacaatatttaatgaggatatgatattggctggtcatatgataaatgccggatacaaggttgcttatgtggctgaagcgagagtgattcactcacataattatacaggaatgcagcagtttcaccgcaattttgatatggctgtgtcgcaggcagaacatccggaagtattcgatggtataaagtctgaaaacgaaggaataaaactggtgaagcagacagctgctcatttggtaaaacagcggaaaatatatatggttccaaaactggtttatcaaagtggttgtaagtatattggttaccggatggggaaaatgtataaaaaattgccggataaagtcgttaaatggtgttcgatgagtccgggatactgggaaaagtaggcgaaaagctttatttttgattgaagtttgtcatattttaaggtaatatagatatgatatgataagctacgactgaagaaaggatataaaaagtaatggcaaaagataaaaaaagatataaaagacggggacgaaggtcgaaaacaaggggatttgcctcctggtctctgggtaagaagattggagccattcttggaggaacattggtgacggtagcagcgatcggagctgtcattgtagccagtaagctttcgaagatcaatacagtaaagttagatacagataaattaagcgtttcaaaggaagcaaaaaaaaggggaagcggatatctgaatgttgcattgttcggtgtggattcaagagacaatgatctggacaaaggaaccagaagtgacacaataatgattgcaagcctgaacaagaagacaatgaaggtgaaaattgcatcaatatatagagacacgttgtcagagcaggaagatggaacgttgaataaaatcaatgcagcgtattcatatggtggtccggaaggtgctctttcagtgttgaataagaatctggatatgaatattgaacattatgtaacggtgaattttaactcgatgatagatattgtagattctgtgggcggaattgatatcgatgtacaggaagatgaaatgccgtacatctgtggttatgttcaggaaattatgaaggtgaccggaaagctgtctccgggagttacagaaccgggaatacagactctgaatggtgtgcaggcaactgcatatgccagaatcagatacacagccggagatgatttcaaacgtgcagaaaggcagcgggcggttctacagaaagttgtagagaagctgcaacaggcatcaccggcacagttgaataagattattgataaggtttttcctgaggtttcgacaaactttacaatgacagaaatccttgaatatgcgaaagatgcgtttaattatgaactgggagaaacaacagggttcccatttgacaagacaaccgatacattgggaaatgtaggaagcgttgttattccggttacaatggaaagtaatgtaaagcagctgcatagcttcttctatggagaaagtgacaattatgatgtgtcttccacagtatcggatatcagtgcaaagatagagaaaaaagccggaaacagagatgctgatacagacgaatcaacacaggagtttatgcaacagccggaagagacatattccggaagcagtggaacaacaaagaacagttcgggaagtacaggaacaaccggaagcacttcgtacagatcgggaacgagtggtaacagtggtacttcgggaagtacagggacaacgggaagtacaaccggaacaggtacgggaagtggtacatcaaccggaacaggaagcggaacaacaggaagtacaggaacgacaggaaatggtacatcaacgggagatacttcaaccgggacaggcggagaatcaactggcggcgaaggtaccacggagtagaacaccataaagatagaaaaaggggtattattcatgaaaaaagtcaaaaaaataattgtatcatttcttttgatgtgtatgttgtgtgttggaatgacatgtgtggcaagtgcaaccgcagcagaattcagattttctgatccgcagaccagtgtcggggcagaagtagaagtaacggcaaaggtttcgtctgcgaaagcattaaatacaattcaggcaacattaagctatgataaaacaaagctgcgcttcatcagcggtgatgatgctacaggtggagacggaacaattacaatatcaagaaatgatgaaaatgccggaacaacgatggaatttaatttaaaattccaggcattggatgagggaacaacatcggtagaagttgccaaggttgatggaattgatagcaatggagttgcattggagattacgtcaggttcttcatctgtcagcatagcagaaggtgataaatcgctgattcaggaagaagataccagttcagctgttgatggaacagaggttaagattggaaaatcaaaatatatcgtaacagatgatttttcggatacgattattcctgatggttttgtaagagatgcgttgaaatttgaaggaacagatcatcagattattaagcaggaatcaagtggcgcacttgcaatgtatcttacacctgaaaacggaggagatgcggatttttatctgtatgacagtgataccggaaagttctctcctcttgaagtaatagaggttgcaaagggaagatatattattcctttggctgatgacggaaatatctcattgccagaccagtatcagaagacatcacttacattaaacggaaaagagtttgatacatggcaggatacaaagaatgcggaatattatattgtctatgcgatgaattcggatggagaaaagacaacataccgttatgatacaacagatggtacgtaccagaaatattcgccatcatcaggaacatcttcaacgtcagattctactgtcaataacggaaaaggaatctggggaaaaattttaaattttgtagatagttttttggatatcgtagtaattattgcacttgttctttttgcagtactgctgatcgtagtaattattacttctgtaaaacttcattatagagatcttgaattagatgatctgtatgacgaatatggaattgatatggatgaggaagaagcagagaagaagattcagaaaaaagctgcgaaaaaagtaaataaagagaagaagaaaaataaaaagacagctaaaaaaccagcagctgtaaagaaaacatcaagatttgactatggagaagacgaatttgaagattatgaggatgatttcgatgatgaggatccatgggtgacagaaaatattgctaaagcaatggaacacaagcctgctaagaaacaatcagcaagacagaaaaagacagcaaggcgcacagaacctgaaagagaaaagaaaccatcccaaggcgtccgtgccttagacgagacaggtccggcaatccgtaaacctgttaagaagatcaatctggaggataccaatgattttgaagcctttacccctctggatgaagaagcatttgacaacttcgaaggctattattcagaagatgatgattatgatctgttcggagcaggttgtgatgatgacgatctgtttgatgcgacagcagatcttttgagtaatcatccggaaaagagaagaagtcatgcggagatggatgatacattcaaaatggatgtgattgatctcgattaaaataggatgaatagaatgaaccggtttgcagaaatcagaaagaaattgatggaagcaaaccggtttgttttttattttcaagtgttcctgacaagctttttgagtgtagaaaatgtataccccatctcctcccactttgcaagcagctcatccagaatctcgccattggttctggaggtgttatgcagcagcacgatggcacccggatggatccgtccgagaagcttgtcaaaggcttcttctttggatggctgcgcgtcggccagccagtcaacgtaggcaagactccagaagaaggtatgatatcccatgtcttttgccatctgcagattttcagtactgtattttccctgtggcggccggtagaagcgggtcatggatttgcctgtgatatctttatacagagcttccacactcttaagttctctggaaaatgtctcctttgttgcaatctgggacatgtcggggtgatggaaagtatggttgccgacggtatgaccttcttttaacatctgctttaccagctctggattatcacgcagaaagtttccgacaacaaaaaatgtggcttgaacgttatgacgttttaaagcgttcaagatagccggtgtatttccgttttcatagccgcagtcaaaagtaagatagatgacttttttatccgtcttttgtgcatagtaggcgtgatattgctgaagctcatcgaaagatgcattaccgacaggaactttgccttcctcctgaaagctgagaccccagttttcggcagccggcagaatcgtggagaggggattgccggaagtcgaggctgtcggaactgtgccggaggaagctgcattaccggatggacttttatcatctgttctgacagacgcaggcggaaagagccgggcaatctgtccgcctgcaaagaaacagaatgaaaagaagaataagaggatcaatggtttgtaattatgtaatcgggacataagaactccgcaagaatcatttgttcatatatatatgcagcgaatacaaagttatgacctgccttgcaaatagcagggaatcatagtagtatagggaagaaagaaaaatggacggaattgaatggaatatggatgcaaaaataaatgaacaggtaaagaataaaaagcaggataatctgatcactgcggagatcagatataaaatgacagcgaagggtatgatgatcactgaatattatggagcggacacttgtgtggtcctgccggatgagatagaaggagaaactgtgaccgcactggatgattatgcatttgccaggaatctggaagtggaagagatctggctgccggaagcgttaaaagaagtcggtcgttacgcattctaccggtgcaagaacttgaaaaaactgattctggggaatcaactgctcgatatgggtggcggtgcattgacaggttgtcgtctggaagaagtggagatatatttccgtgagggcaagaagagctgtctgaaatctattgtagaagagacgcgttatcagatccgtgtaagcttatacggatacagttggagatgttgcgcagaaaaaaacagtacagatgaatggttgagggaagtccggattctatttccggaacactatgaagaggcggttgagaacaccccggcaaggattcttgagacacaccatcatggtgcgggaggatactaccgccagtgcttttataaccgggaattagattataagaaatatgatgagatgttctatcatacggttgcagaggatacagaagagacggcggtggagcttgcactggaccggctgcgttttccggaggaattgtcggagaagaacaaaaatgtatacaaaacatacatacgggagcatatggaaacggtggcagcgtatctggtaaagagagaagatatagaaggaatccggttcctggagcagaagaagctgtggagtgaaccggctttacagacaggtatggatgtagcggcagaggggaacaggacggaaagtctgagtgtgcttatggatgtcagaaaagagctgttcccgaagaagaaaaaaacgtttgaattgtaaggagaagaagcggaaaatcatatggcagatacgaagaaacgtgtaaaaaataaaggaataaagaaagaaacaacagaaccggaggctgtgtcacagtcaactgccatgcaggagcgtatggagtctgtcagtcaaaagatcctgatcacggcaagaaatgagctttatatgaagatgcgtttcctggacgttgcattgtcgtgcatgccatttataccggatactggtgcggacggcatgggaacggatggactgtacctttattatgatccgcagtatctggggggattgttcagggaagaccgcattatggtgaaccggatctatctgcatttggtactgcatggtatcttccggcatatgctccggagaaagggaagagaagagcggatttatcatctggcctgcgacattgtggcagaatccatcatcgacgggcttcagtaccgctgtgtgatgaaggccaggtcacttcctagaagagagatgtatcggatgctgaaaaagaaaatgaagacactgacggcagaacgagtatatgaagtgctgaagaaagaagaattcccggaaacgaagcttggacagttagagtcagacttccgtgtggacgatcatagctactggccgaaagatgaggataagaagaagcagagccagatcgagaatcagtggcaggacatcagcgaacgtatggagacggagatggagacattttccaaagaggcatcggaaagttcgggcggtctgatcgatcaggtgaaggtcgagaaccgggaacggatggattaccgggaatttttacggaagttttcggttttaaaagaagagatgacggtagatccggattcgtttgattataatttttacagttatggattgtctttatacggcaatatgccattgatcgagccgcaggagtggaaggaagtccagaaggtcgaagaatttgtgattgtgatcgatacatcaatgtcgtgctccggagaactggtgaaaaagttcctggaagagacatatggtgtgctgagtgagaacgacagtttttttcggaaggtgaatattcatatcatacagtgtgatgaccagatccagacggatcagaagatcacctgtgaggaagaactgaaatcttatatggagaagttagaattaaaaggcgaaggcggaacggattttcgcccggcatttgcctatgtggacgaaatgatccggcagcatgcatttgaacatctgcgggggatgatctattttacggacggacgtgggatctatccggcgaagcgcccagtctacgagacggcatttgtgttcatggaggaagaatatgaagatgtggatgttccgccgtgggcaatcaagatcattctggaagaaggacaggatctgtaagtaaccggtgaattatatggaggaaagaaataaatggatataaagcgagcaaagaaagaaatcaaagattccatcgaggcatatcttgccaaagatgagttcggggattatatgattccacagatcagacagagaccgattcttttgatggggcctccgggaatcggaaaaacccaggtcatggagcaggtggcgaaagagtgtaaagtggcgcttgtggcatatacgatcacgcaccacaccagacagagcgcggtgggactgccatttattgaaaagaaagtatatagcggaaaagaatattctgttaccgaatatacgatgagtgagattattgcctcaatatacgataagatggaagagaccggattaaaagaaggaatcctcttcatcgatgagatcaactgtgtgtcagagacgctggcaccgacgatgctgcagttcctgcagtgtaagatgttcggcaatcagaagatcccggaaggctggatcatcgtggcggcaggcaatccgccggaatataataagtcggtccgtgattttgatgtggtgacacttgaccgcatcaagaagatcgatgtggatgtgaactatgatgtctggaaagaatacgcatatcaggcagatatccatccggcaatccttgcatatctggagatccgcagagattatttctatcgcatggagacgaccgtggacggaagagtctttgcaacggccagaggatgggaagatctgtcccagcttctgaagacatatgagaagctgggaaagaaagcagatagagaggtcgttcatcagtacattcagcattggaagattgcaaaggattttgcgaattatctggaactgtacagaaaatacaagaaagattacggacttgagaagatcattgaaggtgtctacacaaaggacactttggaaagactgcagtatgcagcatttgatgagcgtctcagtgtggttaacatgctgatcggtagactgggaacttgctttaaggaatattttctgaaagatcgttttgtgacgattctgtatgattatttgaaactatataaatcgaatctgcagattgatcttgtggtctgtgaggcaagagaaaagtacgaaaaactccggaaagaagagcagatgacaaagcaggaagatcatgtacgcaaacaggtactggatacgctggaatcctatgaacagcttacgaaagaggaatatctggacggagaagcagcatttgaacgtgtaaaggaattgtttggcaatgaagtggcagggcgggaagaactgacagagcatacacttgctgcgctggaacacgcatttgatttcatggaagctgcatttggagacagtcaggagatggtctctttcgtgaccgaacttaacacgaattattacagtattcagttcctgaaggaaaatgactgcgacaagtattatcagtacaataagaaattgttgttcgacaaacagcaggaagagatcctgtccgaaatggatgagatcgaacaggatctgaacactgccgtaaaataatggttaaaatttaatatgtaagtttatatccgtggcggatcttacggaaaattttccagataatgactgccggaaaactgagtgcaatataaagagacgacagtacgccgacacctccgccgatgatcataagaattaaaataccaatattcataaaaaagtcctccttgctgattctctgttgtttccagatacattttatgcattttgatggaggaacgaaagagccaaaaaggcttcttaacgccatctgaacagtaaatgttaatttcttaacggagttttagcaggagaagtacatttactttgaagacggcaggtgttagaataaacaatgagtaaacttgaaaaatataagatgatgaggagaatatatatatgaaatggaatcagtttcgtctgaagacgacgacagaggcagaagatatcgtcagcagcatgcttgcagatcttggaatcgaaggagtgcagatcgaggacaagattccgctcacccagtctgacaaagagcagatgttcgtagacatcctgccggatataccggaagatgatggatgtgcatatctgacattctatctggacgaagatgtagacaaacaggaactgttactgaaagtcagacaggaattggaagagatgagaagttacctgaatgtaggggagtgtacgattgaagaatcacagacagaagatgtagactgggtgaataactggaaacagtatttccatcagttctatattgatgacattcttgtcattccttcatgggaaaatgtcgaggcgaaggacagtgacaagatggtgatccatatcgatccgggtacagcattcggaaccggtatgcatgagacaacacagctctgtatccgtcagcttaagaaatatgtgacagaggatacagaaatcttagatgtaggatgtggaagcggaatccttggaatgctggcattgaagttcggcgcaaagcattccgtaggaacagatctggatccgtgtgcgatcgatgcaacatatgagaatatggacaataacggaatcagcagagatcagtatgaagtcatgatcggtaacatcattgatgataaagcagtacaggacaaggtgggatatgaaaaatatgatattgtagcagcaaatattctggcagatgtactggtgccgctgacacctgtgatcattcatcagatgaaaaaaggcggtatctatatcacgagtggaatcatcgaagacaaagaagatgtggtagtaaaagctgtgaaggaggcaggtctggaagtcctggaagtcaatcaccagggtgagtgggtatctgtaacagcaagaaagaattagaggatctgatatgcagcatttttttgtatcaccggaacaggtgagggaagaaaaaatctatgtagaaggcagtgacgtcaatcatatgaagaatgtgctccgtatgaagaccggcgaggaactgaccattggggacggtgacgggtggctctatttgtgtgtggtggaatcttacgaagaagacatggcggtacttaagattttggagaaaaagaaggatgagagcgaacttccgtcaaaaatctatctgtttcagggactcccaaaacaggacaagatggaactgattgtgcagaaagcggtggagctgggtgtataccaggtgattccggtggcaacgaagcgtgcagtagtaaagctggatgcaaagaaagcaaaaaagaaggtcgaacgctggcagcagatcgcagtcagtgcggcaaagcaggcaggaagaggcattatcccggcagtgggagaagtgtgtacctatgcacaggccctgaagtatgcagaggaactggatgttgtcctgatcccgtatgaactggcagaaggcatggaagagacgaagcagatcattgcagagatccggccggggcagtcggtcggcatctttatcggaccggaaggcggctttgagaaagaagaagtagaacaggctgtgaaagccggggcagagccgctgacacttggaaagagaatcctccgtacagagacggccggacttacaatgctttcggttctgatgttccatctggaagggtagagacataatctaatactaagaatgaagagtacaggaagtgaagaaatgaaggaagtatatctggataattcggcgaccaccatggcatatcgaagcgtcggggaactggtgcagaaggttatgtgtgaagactatggcaatccgtcttccatgcataacaaaggtgtggaagcagaaaaatatataaaagaagcaaaagagacatttgcaagactatggaaagtacaggaaaaggaagtgtattttacttccggcggtaccgaaagtgacaatatggcattgatcggtgcagcaagggcgaacaagcgtgcaggcaaccacctgatcacgtcatcgattgaacatccggcgatcattaataccatgcgttttctggaagaggaagaaggattccgtgtaacctatcttccggtagatcagtatggaaggatccgtctggatgcactgcaggaagcactgtgtgaagatacgattctggtatcgatcatgtatgtgaataatgaggtaggttctgtccagccgatccaggaagcggcaagtatcgtaaaggcatataataaagatattttattccatgtcgatgcggtacagggatttggaaaatataagatttacccgaagaaacttaaggtagatatgtgttccgtcagtggtcataaaatccacggaccgaagggtgtgggtgctttatacatcggtgaaaatgtaaagatccgtccgatcgtttatggaggcggccagcagcatgatatgcgttccggaacagaaaatgtaccgggaatcgcaggactttctctggcagcaaagacgatttacgacaacctggataagaaggtagagaagatgaggaggctaaagcagcatttcatcggaggcgtggaaaagattgagaatacgacgatccacggattatatgatgagacatcggcaccacatattatcagtgtaggaatcgcaggtatccggagtgaagtattgctgcatgcgctggaagataagggaatctatgtatcatccggttcggcatgtgcatccaatcatccacagatcagcggtgtgttaaagggaatcggcgcaaggcaggagttcctggatgcgaccctcaggttcagtatgtcagaatttactacgatggaagagattgactatacgctcgatgcactatataatatagtaccgatgcttagaagatataccagacattaagtagatcacgataaaagagaaagaaatcaggaaaggaatcagaagatgagatttcatacatttttattaaaatatggagagattggaattaagggaaagaaccgtcatctgttcgaagatgcactggtacgccaggtgcgctatgcattaaaggatgtggacggacagtttgatgtgcataagtcacaggcgagaatctatgtggactgtgaaggagattacgattatgatgagacggtagaacatctgaaaaaagtatttggtctggtcggaatctgtccggttgtccgtatggaggataaaggatttgaggaactgaagaaagacgttgtggcatatatggatgagatgtatccggataagaacttcacattcaaagtagaatccagacgtgcaaagaagtcgtacccattgaattctatggagatcagccgtgaccttggagaggctattttgtatgcatttccggagagcggaatcaaagtcgatgtgcatcatccggatgtcatggtcaatgtagaagtaaggaatgagatttatgtatattcacagattatcccgggagcaggcggaatgccggttggaacgaatggttcggcgatgctgctgttatccggtggtattgacagcccggttgcgggatatatggtatcaaaacgtggtgtgagtcttgaagcaacctatttccacgcaccgccgtatacaagtgagcgtgcaaaacagaaagttgtggatcttgcgaagaaggtagcaaaatattccggaccgatcaagcttcacgtagttaactttactgacatccagctttatatctatgaccagtgcccgcacgatgaactgacgatcattatgagaagatatatgatgcgtattgcagagcattttgcaaaagaagatggatgcttagggatgatcacaggcgagagtatcgggcaggtggcaagtcagaccatgcagagccttgcggcaaccaatgatgtatgtacgatgccggtttatcgtccgctgatcggatttgacaagcaggagatcgtggatgtatcagagaagatcgatacttacgagacatccatccagccattcgaagactgctgtacgatcttcgtggcaaaacatccggtaacaaagccgaatattgatgtgatccggcgttcggaagagaacctgaatgaaaagattgatgagctgatgaagcaggcgatcgagactgttgaggtcattgaagtaaaataaaaaaagagggctgaacccttaaacaggtcagccctttttctaagtagatcatttactttttgattactgattagtcacaaagatatggttttaacatagccatgatctcatctacattatcatcagcgtggatgttcagatcgatcggtttagaaagatctaagctgaagattcccatgattgattttgcatcgatgacatatcttccggatacaagatcaaaatcataatcaaattttgtgatgtcatttacaaatgattttactttgtcaattgaatttaaagaaatttttactgttttcattggaataccctccttgattcatttcttgttctatagatatattaagagtcagacgaagaaaagtcaagaaacaaattgccaaagaattcagaagattttcgttagaagttacaacaatgtgtaaaaaagaaaggaacagatacatgaagaaagtagcattgcataatctcgggtgcaaagtgaatgcgtatgagacggaagccatgcaggaactgctggaaaagcatggatatgagattgtgccgtttcaggaaggtgcagatgtgtatatcattaatacctgtacggtgacaaatatggcagaccggaaatccagacagatgctgcacagggcaagaaagatgaatccggattcgattgtcgttgcctgtggctgttacgtgcaggccagaaaagatgacatcccggatggaatcgatattgtcatcggaaataacaagaagcagaatattgtcgagatcctggaaaattatgagaaagagaaaaatccggatgcccaggccggaacaccggcaaaacaggaaaaagcggcagagacttatcaggagattctggatatcaatcacgaaaaagcgtatgaagatctgcatttaagcacggcagcagagcatacgagagcgtatatcaaggtacaggatggatgtaaccagttctgttcttactgtattattccatttgcaagaggaagagtaagaagcagaagccgtgacagcgtacttgaagaagtaaagacattggcggccaacggatacaaagaagtggtgctgacgggaatccacctgagttcctatggaatcgactgcgatgacaatctgttatccctgatccttgcgatccacgaagtagatggaattgaaagaatccgcctcggatcactggaaccaagaatcatcacggaggaatttgtacagacgatcgcacagcttccgaagatgtgtccgcatttccatctgtcactgcagagcggatgcaatgcaacactgaagcgtatgaaccgcagatacactgcagaagagtattacgaaaaatgccggctgctccgtaagtatttccgtaacccggcacttacaacagatgtgatcgttggatttccgggagaaacggaagaagaatttgccgagtcaaaagcatttgtagataaagtggatttctacgagacacacattttcaaatattccagaagagaaggaacaaaggccgcagcaatgaaagaccaggttccggatcagatcaaggctgtaagaagtgcggaacttatagaactgagccatagaaaacaggccgcatacgaagaaagactgatcggaaccacgcaggaagttctgatcgaagagaaaattatacgcaacggagaagaattacagattggtcacacaaaggaatatgtgaaaattggtgtaaaaaatccgaataatcttattaatcagcttgtaaatgtagaaattgaaaaccaattacaaatattgcattgaaatttaagatttaatcatgtagaataaaattgaaatatttttggaggacgtgattacatgaaaaatatgacaaatacccagtttttccaggtggaaagtggaccgcagatcagtgcaaaagatattctggaaatcgtatacaaggcattgagtgaaaagggatataatccggtaaatcagatcgtaggatacattatgtccggcgatccgacttatatcacaagccataacggagccagaagtctgatcatgaagatggaaagagatgaactggtagaagagatgctcaagacgtatattgagcataatgagtgggaataatgactatgagaatcatgggactggactatggatctaagacggtaggtgttgctgtcagtgatccgttgggaattactgctcagggagtggagactatatgcagaaaggacgagaacaagctcagaaagacctgtgcgcgtatcgaagcactgatcgaagagtatcaggttacgaagattgtcctcggacttccgaagcatatgaacaatgatattggagatcgtgcggaaaaatcaatggcatttggtgagatgttaaaaagacggaccggcctggaggtcgtgatgtgggacgagcgtctgaccacggtagaagctgaacggactttaatagagaataaggtaaggcgtgaagaccgtaagaaatatattgataagattgcggctgtttttatattgcagggatatttggattcacttgcacacacgccactggattaagaggtagattgcagatggaaaagattaaattcatgtccgaagagatgaatgaagaagtagatttttatgtacttgaacagacgaaagttggtggtgtgtcatatattctggtgacggattcggaagaagatgatgcagaatgtctgattctgaaagacacatcaggagagagccagtcagagagcgtatacgagatcgtagaggatgatgtagagctttctgctgttctgaaagtatttgaagaactacttgaagatgtagagattgaaaggtagtttggaatgtctatcagtaaagagaagtttaaagaaatgctgagagagaaggggttgaaagttaccaaccagcgtatactggtactggaggtccttgcagatcaccgcgataagcatctgactgcagaagatatttatgaattagtaagagaagattatccggagattgggctggcaactatataccggacagtgcagttgttactggaaatgcaattggtggatcgtatcagtcttgatgatggatgtgcacgttatgaaatcggagaattctttgatggagaagaaagacatcatcatcaccatctgatatgcagaacatgtggtaagattcttccgtttaaggatgatctgttggaagatctggaagataagatcgaagataccacgggatttcatgtgttagaccacgaattaaagttctatggacagtgcagggagtgccaaaaaagaggcagaaaaaagtagtgcggtaaacacgtggaggtgtaattttgaaaagagaaaacaatggaaaaatgcgtatcattccactcggaggtctggaaaagatcggaatgaacatcacagcttttgagtatgaagacagtattattgttgtagactgcggattatctttcccggaggaggatatgcttggaatcgacctggtcattccggatgtcacctacctgaaagataacattcagaaagtaaaaggatttgtaatcacccatggacatgaggaccatatcggtgcacttccttatgtattaagagaactgaatcttcctatctatgcgacaaagcttacgatgggaatcattgagaaaaagctgacggaacataatctgcttcgcagtacaagaagaaaagttgtcagacacggacagtcgatcaatctgggacagttccgtatcgaatttattaagacaaaccacagtatccaggatgcggcagcactggcaatctattcaccggctggtattgttgtgcatacaggagactttaaagtagattatacaccggtatatggtgatgcgatcgatctgcagagatttgcagagatcggcaagaaaggcgtactggcactgatgtcagacagtaccaatgctgagagaccaggatttacacagtcagagcgtacagtaggtatcacatttgatcatgtttttgcagaacataaagataccagaattatcattgcaacatttgcatcaaatgtagaccgtgtacagcagatcatcaatacggcatgtaaatatgaccgtaaggtggtcgtagagggacgaagcatggtgaacatcatccaggttgcacaggaactgggatacttaaatgttccggataagacattgatcgagatcgaccagcttaagaattatccgccggagaagaccgttctgatcacaaccggaagccagggagaatctatggcagctctgtcgcgtatggcagcagatgtgcataagaaagtaacgatcatgcctggtgatacgatcatcttcagttcgaatccgatccctggaaatgaaaagtctgtatccaaggtaatcaatgaactgacagctaagggagcgaatgtcatcttccaggatgcacatgtatccggtcatgcatgtcaggaagaactgaaactgatctattctctggtaaaaccgaaatatgcgatcccggttcacggagaataccgtcacctcaaagcaaatgcgggaattgccagaatgcttggcattccgaaagataatattttcatcctgaaatccggtaatgttctggaagtcagtgagaaggaagcaaaagtagtagacaatgtacacacaggagagattctggtagacggacttggtgtaggagatgttggaaatattgtacttcgtgacagacagcatctggcggaagacggtattatgatcgttgtactgacactggaaaaaggaagcaatcagcttcttgcaggtccggatattgtatcgcgtggattcgtctatgtaagagagtccgaaagtctgatggaagaggcaaggaaagttcttacagatgcagtggaggattgtctgacacatcagcgcaacgcagactggagtaagatcaagcttgtgattcgtgatacgatgaacgatttcatttggaaacgtaccaagagaagaccaatgatccttccgatcattatggacgtataaaaaaagaaaaaatgagccgccacatagtacgaaaccggcgccttccgacacagtgtgtgaggctggctttgtacaatgtacggctcgtttccttgtagaatcctaagagaaactgcaggaaagaacaggtacaacagttagaacagaggtagagatactatgatcgtagatgaacgtatggttacatacatccggtcgttggaacgtccggagaatcctgtgatagaggcaatcgaacaggaagcattggaaagtttcgtaccgatcatccgcaaagaaacccagagcttcttaaaggtaatgatgttaatgaaccgcccggccagagtgctggaggtgggcacagcagtcggattttcggcaatcttaatgagtgaatatcttccggaaggaagccgtatcacaacaatagaaaactatgaaaaaagaatcccgattgcgcgaaacaactttaagcgtgcggggaaagaagaacagatcacgctgatcgaaggggatgccctggaagtgatgaagaccctggaaggtccatatgattttatctttatggatgcggccaagggacagtatatccattatatgccggaggcagtaagactgcttgcggatggaggtatcctgatgtcagacaacgtattacaggatggggatatcatagaatccagatttgcggtagagaggcggaaccgtaccatccacagccgtatgcgggattacctctatgaattaaagcacagcaatgtgctggagacatcgatcatcccgttgggtgatggtgtggcactcagtatcaagaagaaaaaagaggagaaggagaatcgataagatgagaaacagacatccagaattactgattcctgcaagcagtctggaagtgttgaagactgcggttatgtttggtgcagatgcagtatatatcggaggagaggcatttggacttcgtgcaaaggcaaagaatttctctatggaagacatgaaagaaggcgtgcagtttgcgcatgagcatggagcaagagttcatgtcactgtaaatattcttgcacataatgatgacctggaaggtgcggcagagtatttaaaagaactaaaagagatcggaccggatgcgctgatcattgcagatccggcaatttttatgcttgcaaaagagatttgtccggagatagaaagacatgtcagcacacaggcaaataacacgaactatggaacattcaacttttggtggaacctgggggcaaagcgtgtggtaacagccagagaactttcattaaaagaaatcagggagatccgtgcgcatatcccggcagagatggagattgaaagttttatccatggggcaatgtgtatttcttattccggaagatgcctgctgagcaatttctttacgggaagagatgccaatcagggtgcctgtacacatccgtgccgttggaaatattccgtggtagaagagacaagaccgggcgaatatatgccggtgtatgagaatgaaagaggaacatacattttcaactccaaggatctgtgtatgattgaacacattccggaaatgatcgatgcgggaattgatagttttaagatcgagggacgtatgaagacggctctgtatgtggcaacggttgcaagaacttaccgcaaggcgatcgatgattatctggaggatccgaagaaatatgaggcgaatatgccttggtacagggatcagatttcgaattgtacataccgtcagtttacgacaggattttattttggaaaaccgggtgacgagagccagatctacgatagtaacacgtatatcaaagagtacacttatcttgggattatcggcgggattaaagatggcatgtaccgcatcgaacagagaaataagttctctgtaggtgagactgtcgagattatgaaaccggacggacagaacgtagaagtaacggtggaaaagatcatagatgaggatgggcaggagcaggagagtgcgccgcatccaaagcaggtgctgtatgtggcattaagcggagaagcttccgtatatgatattttaagacgccaggaaggtgtaacggaatagggcagacaagtaacagagaaagcagtgattcagtgcaaaaatggaaaagcacagaatcactgctttttgcatagaatataataaatctgcctaagaggtgctttgtcttgaagtcatttccccaaccattgacggcagcggaagaaaagtactatatgcagaaatatacagagggtgatctggaagcaaagcacattctaatagaacggaatctgcgtctggttgcacatatcgtgaaaaagtaccagccgcctccggaagagatggaagaccttctgtcaatcggaaccattgggcttatgaaggctgttgtaacgtttgatccggataagagcgcaaggcttgcatcgtatgcagcaaggtgcatcgaaaatgaagtattgatgtacttgagaggtaagaaaaaaagttcaaaagaagtatctttgtatgaaccgatcggaacggaccgggaaggcaatgagatacaattatttgatgtgattgagatgaatgaagaagatgtctaccgaagactggaacgtaaggaagatgtgatccgtctgtatcagcaggtggaatcggtattgtctcagagagaacgaatggtactgaagctgcggtacggcctgtataatgaagaggaatatacacagcgggaaattgcagcaatgctcggcatttccagatcgtatgtatcaagaattgagaagagtgcgattgaaaaattaagaaactttttcacttcttagaaaagtctttaaaaaatctttagaattctatatccgttattttaagaatcaaagtctatacttaacaccataagaaagaggcatgcaaaatggtatgtgagaaagggtggcagttatgaaagtactggtgttaagtggtagatttggaatgggacatgagatggcagccaatgcgatctgcgaacagtttcggaaaatagatgaacaggcagaaattgaaaaaaaagatcttctggaagagttatatccacatatcagtaaattcattttcggtggattccgcatgatggtagagcactgttacgggatttataattttatctacaaaatgtccggaaggatgaaggtagaaatgcggccaaggggaaaggcactctataaaaggttaaagaagatcatggatggagaacaaccagatgtgatcgtctgtacacatccgatgtgtgtaaaagcaattgcatcctataaagaaaagacagggcttaaaacaccacttgtgacctgcatcacagatatcagtatgcatccggagtggacagcatcacagacagacatctatcttgctccgacacaggagatcaaaaggcatctgataaaggaggggaccagggcggaagatattcttgtgacaggaattccggttcgccagcagttcctggatgcagattgccgtcagaaacgggaaagaaacagaacacgcagggtgctcattatgggaggcggacttgggctgatgccggatctgaaagaattgcttgaaaaattacatagcatgcaaggcgttgagagcgtagtcattaccggaaaaaatcataagatgtatgaggaatgggtgaaccgctatgaggatgtggaagtacttggatacacggaaaatatcagcagatatatgcgcggagcagaccttgtgattacaaaagcaggcggaattacgttgtttgaaattctgcacagtcaggttccgctatttgtcatccacccgtttctggagcaggagatgaataatgcaaggtatgcggcagaaaaaggatttgcaaaagtcatatggggcagacgtgaagactatattccggaactggaaaagctgttaagtgatgaaaaaatgatggaagaaatgaccggaaatgtaaggcgtgcctgtaaagagatgatagaagtatcactggatgaggcagtagggatcatggaagaaaggatgacggcataatgaatataccaaagactgcaaaactgggactggcctgtgccgcagcactgagttatagtgtgattccgacgtatttgctgaaataccgttggattttcagaagcagacaaagggcatcccgggaagagaaggttttgtacctgacatttgatgacggtccggatacagtatatacgaatatattactcgattttctggagaaggaacagattccggcagcatttttcatggttgcaggatctgctcggaagcatcccgggatcgtggaacggatgagaaagagcggataccaggtcggaatacattcgttgagccacgaaagtgcgatgctttccggaccgggaagaaccggccgggatgtgaaagaatcgaaaaagattatggagaagatggatattgcagtgaaatggtacagaccaccgtggggacatctgaacctggcaagtctgttctggatacggaagttgcatctgaatctggtattctgggatgtgatggcacaggactggtcagcgaaagagaccccggacagtatctgcaataagatattaagaagagtctttccgggtgcggttatctgtctgcatgacggaagaggggagaatggagcaccgggaagaacgatagaagcattgaaaaaagcaatcccattgttgaaagcgcaggggtatgaattcagaaggatagaagaaaaatatggaacagcaggtgagtcagagatcgattaaaaagtatatggttttatttccggttttagcactggtggtatgtttcgttattttgaagggtgcagatatggaatctgtgtggaatgccatgaaaagtgcgaagccgcaatggctggcagcagggcttatactggcggcggtattcaatatcgcggaagcgatcaatctgaggagcgtattgaattcatttggatatcaggtaagtttcagacagagtatgaaatatgcttataccggctattttttcagttcgatcaccccatctgcaacaggcggacagccggtacagttatatgtgatgaataaggataatatccatgtggcacatggaacgatggctcttctgacagaactcaccagttttcagattgcagcatttctgatggaaaatgtagcaacgttctggatactgacgggaaggatacgtctgaataagatgatgctggcattggcggttctcgggtatctgatgaatctgatttttatagcagcactggtggtcataatgttatccgaaggtctgaaaaagaagattgtaaatggaatacgtttcctgatcatgaaactcccgtttgggaataagaagagattgggcgctaagatggacgagattgttcgtgattttgaagattgtaaattgttttttaaaagggatccggtacttgcgttaaaagtgacaacagtcagtctgatccagatcatctgttggttcagtgttccatgggcagtgtatcatgcaatgggagagtccggcagttcttatggaagtatgtttctgcatcagatcattttgtatatgactacagcacttcttccgttcccgggagctgagggaattagtgaattctcattcgtaaagttgtttgcaggtatctttacttctgttccggtggcagcggcagtactggtgaatcggggaatcagcttttattttttgctgatattaagtggaatctttagcatcgtgcttggacgcatggatagaaaatcaaaaagtaaaatgaaagtgaaattagaaaaatattgacacggcggaaagaataggctatgatgattgcacatttaacgaagatgagtgatcaagtacagactattctttttcgttttctaaatctggaccgccagtggcggattctgtagatgaccggatcggtcaagttatcaactatatcaaaacaattttatatgagtaccagataaataaggcagaaaagatgcttatataaggacaggttctgcatggtctggtatggaaaggagtgtgcagatggcattttgtacagttttatctgcttcagttcagggactgggggtagagatgatccgtgtggaagcggatgtaagtaacggacttccgatgttccatatggtgggatatctgtcctcggaagtgaaagaggcatcagaacgggtgagaacagcaatccgcaattcggggatgaaacttccggcaaagaagatcattgtcaatcttgcgccggcaactgtccggaaaaaaggggcatcgtttgatctgccgattgctctggcggtgctggcagctatggggtatataccggaagaagcaatggaacgggtgatcgtaacaggggaattaagtctggaggggaaaataagaggtgtaccgggagttctgccgatggtgatagaggcgaaagaacaaggatgtaaaagctttatcctgcccggagagaatgagacagaaggaagactcgtaaaaggaatcgagattctaccggcagataatctggaggaactctgtgcgtatctgaacggagctgcgcgttcggaaaagtctaaaagggagaaaaaagaaaatgaaaaaaacagacaacatagagccagagaagattttgcggatatctgcggacagaaagcggtgaaacgtgcggcagaaattgcagtggcaggagggcacaatctgttaatggctggatcaccgggatccggaaaaacgatgatcgcaaagaggatcgcaaccattttaccggaactgtcatgggaagaaagtctggaaattacgaagatctacagtgtattggggctggtggatcaggaatacccgctgatcacacagcgcccgtttcgtaatgttcatcatacaatcaccagaacagcgctgacagggggcggcagaataccgatgcccggggagatcagtatggcacacggaggtgtgctgtttcttgatgaacttgcggaatttccaagaaatgttctggaagtactaagacagccattggaagaacatcagattcatattgcgagaaattatgggaattttacatttccggcggaatttatgctggtagcagcaatgaatccgtgtccatgcggaaactatccggatgtgcagaaatgttcctgcacacccgggcagattcagaaataccttggcaagatcagccagccgttcctggatcgtatggatatctgcatagagactccgaaagttgtataccgggatctggacggagaacggaaagatctggaaggggaagagacatctgagacgatacgccgcagagtgacggatgcaaggaatatacagagggaaagatataaaggaacagatatcaggacaaatgcagtattaggaccgcaggagatcggacattacgtagaactgggagagcgcgaaagaaagatgatggagcttgcatttgaaagaatcgggcttacagcaaggacctatcataagatcctgcgtgtggcaaggacaattgcagatctggattacagtgagaaggtaaaggagaaacatttaaaagaagctattgcttaccggtcactggataagaagtactggggacgttaggaggatgtgaatgatatatgaatactggctggcagggatagaaggcatttcgaatctgaaaaaaagaaaattaagagaggtatatggaaatggaaaagcaatatattatatagaagaaactaatttgaagaaacatacatttctgaatgagaaggatatagagagactgaaaaaagcaaagaaaacagttaatctcgaaatgcaatgggaaaaaatcgtgaaaaagaagataaaatttgtgccgtatttttcggatgattatccggaaaaaatgaaagtgatcacagatcccccgtacgccttgtacgtacttggatcgctgccggatgaaaatgtgaaaagcgcagcaatcgtaggggccaggaattgtacttcatatggagaacaaatggcattgcagtatgggaaatgtcttgggcatgcgggagtacaggtgataagcggtatggcgagaggaatcgacggagcagggcagagaggtgctttgaacggagacggaacaacgtttgctgttctgggatgtggagtggatgtgtgttatccaagagcaaatatcggattatacatggacattcaaaaaaaaggcggaatcatatcggaatttccacccggaaccgaaccgcttgcaagaaattttccgatgcggaaccggattatcagtggactggcggaatggatactggtaatagaggcaaaagaaaagagcggatctttgatcactgcagattttgcactggatcaggggaaggatgtctatgcacttccgggaccggtgacaagtgcgttgagccagggatgtcacagactgatccggcagggagcgggaatactgatcacaccggaagaactgatggatgaatggaatctgaatcggatgcaaattggacaaaaaaataacaaaaatgaaaaaatgcttgaaagtcctgagcgtatggtgtatagttgtctcgatttgttcccgaaaggaattgatgaattgatgaaagaaacagaactttctatttcagaattgatggaaagactgattactttggaattgaaaggatacgcagaagaagtatccagaaattattatataaggctgttgtaagaacggtcggtattatggaggaaattatggcacgctatctggtaatcgtggagtcacctgcaaaggtgaagaccattaagaagttcttaggaagtaattatgtagtgaccgcatcgaacggtcatgtgagagatatgcccaaaagccagatgggtatcgacattgaaaatgattacgaaccaaagtatataacgatcagaggaaagggagagattcttgcgaggcttcgtaaggaagtcaaaaaggcggacaagatatatcttgcaactgacccggaccgggagggagaagcaatatcctggcatctgagtaaagctttgaaattagaagataagaaagtttatcgaatcagttttaatgagattactaagaatgcagtaaaagcgtcgcttaagaatccaagagaaatcgatatggatctggtggatgcgcagcaggcacgccgtgtactggacagaattgtaggttacaagatcagtccgctcctgtgggcaaaggttaagagaggattaagtgccggacgtgtacagtcggttgcattgcgtattatcgcagacagagaagaagagatcaatgcttttattccggaagaatactggacactggatgcggatctgaaggtcaaaggagaaagaaaacttctgactgctaagttctatggtacagaaaagaataagatgacaatctcatccaaggaagaactggacgagatcatgaaagaagtagaaaatgcggagtattctgttgccgatataaaaaaaggagaacgtaccaagaaggcaccggtaccgtttacaaccagtacgttgcagcaggaagcatccaaggcattgaattttgcaacagccaagaccatgcgtattgcccagcagttatatgagggtgtggatatcaaaggcagtggtactgtgggattgatcacatacctgcgtacggattctacccgtatctcagaggaagcggatgcaacagtaagagaatatatcagggaaggcttcggtgaagagtatgtttccgacggagacgttaagaaatcttcagacaagaagatcattcaggatgcacatgaggcgatccgtccgacagatgtaaccagaacaccggcagcagtgaaagaattcttaagccgtgaccagttccgtctgtaccagcttgtatggaaacgttttattgccagcagaatgcagccggccagatacgagacgacttctgtaaagattgccgcaggacagtatcgttttacagtcgctgcatccaagattgtttttgaagggttccgcagtgtatatacggaagccggcgagacaaaagaagagaacaatgtgctgttaaaagggctggatatggattctgtccttacgaaagaaagtctgaacagtaagcagcattttacacaaccaccggcacattatacagaggcaacattggttaagacactggaagaacttggaatcgggcgtccaagtacatatgcgccgacaatttctacgatcattgcaagacgctatgtggcaaaagagaataagaatctgtatctgacggaaatcggagaagtagtgaataatattatgaaacagtccttcccgagtattgtggatgtgaactttacggcaaatatggagagccttctggatggcgttgcggaaggaaaagtcagatggaagacaattatcgagaatttttatccagatctggaggcagcagtggaaaaagccgagacagaactggaacaggtgaagattgaagatgaagtgacagatgtgatctgtgaggagtgcggccgcaatatggttgtcaaatatggcccgcatggaaaattccttgcatgcccgggattccctgactgccgtaacacgaaaccatatctggaaaagataggtgtaccatgccctgtctgtggtaaagatgtggtaatccggaagacgaaaaagggaagacgatattacggctgcgaggataacccggaatgtgaatttatgtcatggcagaagccatcgacaaaaaaatgtccgagatgtggtaaatacatgctggaaaaaggaaataaactggtttgcagcgatgaacagtgcggatatgtagaaaatattgaaaataataaggataattaatgatattcgttgaatatttcagaattgtatgataatatacattcataaggatggaggaatgtaaatgggcgtacaattgttggataaaaccagaaaaatcaacaaattactgcataacaatagttcgagtaaagttgtcttcaatgatatctgcgaagtccttacagaaattttaaattcgaacgtattagtgatcagtaaaaaaggaaaagtgcttggcggaagcaaatgcgaaggtgtgccttacattaccgaattgatcgagagagaaatcggaaaacatgtagatgatatgctgaatgagcggctgcttagtatcttatcaacaaaagaaaatgtaaatcttcagacattgggattttccgaagaagctgtcaaaggttatcaggcgattattacgccgattgacattgcaggggaaagactcgggacactgtttatctataaaaaagataaagtgtatgagattgatgacatcattttgagtgaatacggaacaacggttgttggtcttgagatgttaagatctgtgaatgaagaaagtgcagaagaaaccagaaaagagcatattgtacaatcggcaatcagtacattgtcgtattcggaattagaagcaatcattcatatatttgatgagttggatggtgcggaaggaattctggtcgcaagtaagattgcagaccgtgtcggaattaccagatcggtaattgtcaatgctctgagaaaattcgaaagtgcgggtgtgatcgaatcccgttcttccggtatgaaaggaacgtatattaaagtagtcaatgattatgtatttacggaacttgaccgcattaaagcagaacgtacaaaataataagaactacaaagggtatcgggcaactgatacccttttcacagtataaaggaggatgcggatagtgaaatatggaggatgtacggcaaaactcagaatggaccgcgtaattctggaagacagtttttttgatgaaacggaatatttatgcaagatcatagcatatgatgaagaggaggagacgttgtatctggtatcggaagagacggaactcaccttttattctttggatggaatctatgagtgcagcatagaggatccgaaagatcctgtggtctgcaaaggaatattaaaagaacgttactggaacaaggcaggcagggttatgaaatttaaaattcaaaatggattttataaaaaagttctaaactaaatagaaagtgtgttgacaaaccaaaaggagagtgctattttatatctagaatctttcagcactctcttttgttgagtgctaataatgcaggaataattaaggaggaatagatatgaagttagtaccattaggtgacagagttgtattaaaacagtgtgtagcagaggagactacaaagtcgggaattgtgattcctggacagtctaaggaaaaaccgcagcaggcagaggttattgctgtaggaccaggtggaatggtgaatggtaaagaagttgagatgcatgttacaacaggacagcaggtaatttattccaaatatgcaggaacgaatgttgagattgatgacgaggaatatatcattgtaaaacaggatgatattctggccatctgcgagtaattgtacaattaattcatatatttcaggaggtagataccaatggcaaaagaaattaaatatggtgcagaagcaagaagagcgctggaagctggtgttaatcagctcgctgatacagtaagagtaacaatcggaccaaaaggacgtaatgtcgttttggataaatctttcggagcaccactgatcacaaatgacggtgtaacaattgcaaaagagattgaactggaagacagatttgaaaatatgggagcacaactgatcaaagaagttgcttctaagacaaatgatgtagcaggagacggtactacaacagcaactgtacttgcacaggcaatggttcatgaaggtatgaagaacctggaagcaggagcgaatccgatcattctccgtaaaggaatgaagaaagcaacagatgtggcagtagaagccattgcgaagatgtcaagcaaagtaaaagacaaagatcagattgcaaaagtggcagcaatttctgcaggtgatgctgaagtcggacagatggtggcagatgctatggagaaagtatctaatgacggagttattacgatcgaagagtctaagactatgaagacagagctggatcttgtagaaggtatgcagtttgaccgtggatatgtatctgcatatatggctacagatatggataagatggaagcaaatctggatgatccatatattctgatcacagataagaagatttctaatattcaggaaatccttccgcttctggagcagattgttcaggccggagcaagacttcttattatcgcagaagatattgagggagaggcacttacaactctgatcgttaataaactgcgtggaacattcaatgttgtagctgtaaaagcacctggatacggtgacagaagaaaagaaatgttaaaagacattgctacactgacaggtggtcaggttatttctgaagaactcggtatggaactgaaagatacaaccatggatcagcttggacgtgcaaaatctgtaaaggtacagaaagaaaatacagtaattgttgatggtatgggagataagaatgcaatcgcagaccgcgttgcccagatcaaggcacagatcgaagagacaacatctgactttgacagagaaaaacttcaagaaagacttgcaaaacttgcaggcggcgtagctgttatccgtgtcggagcagcaacggagacagagatgaaagaagcaaaacttcgtatggaagatgccttgaacgccacaagagcagcagtagaggaaggtatcatttccggtggtggatctgcatacattcatgcgtccaaagcagttgctgaagcgattgacggactggaaggtgacgagaaaacaggtgcaaaggttgtcctgaaagctctggaagcaccactgttccatatctcagtcaatgcaggactggaaggtgctgttatcattaacaaggtaagagaatcagaagtgggaaccggatttgatgctctgacagaacagtacgtagatatggtggaaaacggaattctggatcctgctaaggttacaagaagtgcactgcagaacgcaacatctgttgcttctacacttctcacaacagaatctgttgtagcagatatcaaagaagatgcaccggctgtaccggcaggaaatccgggtatgggtatgatgtaacagaatattaaatttttgagaactcctcgtcagaggagttttcttttttgcttcaggtgtgctacaatagacatagcttaaagcagacttggaggaaagaaaaaatggatgatttttacacagagcagctgataaaaaaacaggcggactcaaaggatacacttaagaaagcggggctgatcgtattgacggttttgtcagtgcttttggtttttgcaataccggtggggattatttttccggttgtaatgatcgtggttgatgtgctggtattcagcaatatgaatgtggagtatgagtatgtatttgtgaatggagatcttgatatagacaagatcatgaacaaatccagaagaaaaagaatgttttctgtagatgcagatcagatggaacttcttgcaccggtaggagctgtagaattaatgcagtataagaaggtcaggacatatgattatacatcaggaaaaaatcatgcagaaatctatgcattgattgcttcgaacaaaggagaactgtgtaaagttttgtttgagccaaatgagacgatcatagaaggattctttgtaaaagcaccaagaaaagtaatcagaaaataatacgtaaaatgtaaaaaagattgtattaaaataaaaacatgttaaaagctgttgacaaatatgggtatgattcgctaagatagctgttaaatatgaatatgcaaaagaaagagaggaagaaatcatgggaaagataattggagaaggtattacatttgatgatgtgcttttagttccatcgtactcagaagtaattccgaaccaggtggatttatctacttacctgactaagaaaattaagttaaatattccgatgatgagtgccggaatggatactgttaccgagcaccgtatggcaattgcaatggccagacaggggggaatcggaattatccataaaaatatgtctattgaacagcaggctgaggaagtggataaggtaaaacgttcagaaaacggtgttattacagatccattttatttatcaccggataatacactggaagatgccaacaatctgatggcaaagttcagaatctcaggtgtgccgatcacagagggaaaaaaattagttggtattatcacaaaccgtgatttgaaatttgaagaagacttttcaaagaaaatcagagagtcaatgacttcggaagggttgatcacagcaccggaaggaattactctggaagaagcaaagaagattcttgcaaaagccagaaaggaaaaacttccgatcgtagataaagacttcaacctgaaaggtttgattacaattaaggatattgaaaaacagattaaatatccattgtctgcaaaagatgcacagggacgtctgctttgcggagctgcaatcggaattacagcaaactgtcttgagagagcaaaggctctggtagatgcaaaggttgatgtggttgttttggattcagcacacggacattcagcaaacgttattcatacagttgatatgattaagagcaaattcccggatctgcaggtaattgcaggtaacgttgctaccggagctgcaacagaagatctgatcaaagccggtgttgatgcggtaaaagttggaatcggacctggatcgatctgtacaacacgtatcattgcaggtattggtgttcctcagatcacagcagttatggactgctacgaagcggcagacaaatatggaattccgatcattgcggatggaggaataaagtactccggagatatgacaaaagcaatcgcagccggagcgaatgtatgtatgatgggaagtatctttgcaggatgtgatgagagtcctggaacattcgaattattccagggtagaaaatataaagtataccgtggtatgggatctatctcagcaatggagaacggaagtaaagatcgttacttccagacagatgcgaaaaaactggttccggaaggtgtcgaaggacgtgttgcttacaaaggaagcgtggaagatactgtattccagttaatgggtggtcttcgttcaggtatgggatattgcggagcaccaacaattgaggatttgaaacagacaggaaaattcgtgaagatttcttcggcttcattaaaagaaagtcatcctcatgatattcatattacaaaagaagcaccaaactacagtgtagacgaataaaaagattcgggcgtcgtgaaaacggcgccttttttgtattatatgtgtctggcaaagagagagtttaaatgaataatatcagaaaaaatatcctgaaaattcttcatatcatggttttcagagatgaatatatagagtataataatgtttaggtaatctgcttggtatataaatgcacataataaatacacaagtaatattaaaaaaaataaagtaaaagggagatgcctggatatgaaaaaagaatttggaacaacgagaaacggggaaacagcaagctgttatatattgaaaaacagcaaaggaatgaaagcagttgtatctgattttggagctgctttactgaagctttacgtaccggataagaatggaaagtctcaggatgtcgtattgggatacgagacacttgaggattatgaaaatggtggagattctgtaggagcgactgtcggacgtgtggcaaaccgtattggaactggtgcattcgaactgaacggaaagaaatatgagcttacgaagaatgataacggggaaaatacacttcatggaggaacagatttctataataaaagaatgtggagtgtaaaagaagaggatgatacacatgtagtatttatgcttgtcagtccggacggggatcagggattcccgggagaagtaaagatagaagtatcctatacagttacggaagaaaatgaattaaagattcattattatgcaattcctgatcaggatacccttttgaacatgacgaatcacagctatttcaacctggcaggacatgcatccggaaccgcatgtaatgcaaaagtgtggttagatgcagatgcatttacagagacggatgctgaactgattccaacaggaacggtaattccggtagagggcacaccaatggatttccgtgaaggaaaaaaggttgcaaaagagatcggagcagattataaaccattgaaattggcaggcggctatgatcataactgggtattaaacgggtcgggattcagaaaagcggcatcagccgaatcggaagagacaggtattaagatggaagtatatacagaccttccgggtatacagttctattccggcaatttcctggcaggagctaagggaaaggaaggagctgtctatggaaagggttgtggtatatgctttgaaacgcagtatttcccggatgcaattcataaagataattttgaatctccgattacaaaagccggagaagtatatgatacaacaacaacgtataggttttgctgattttcataaaaacataagaatctctttcgggtacattaaaaaatgaatgataaaatagataaaagtgtactatataaggatagataaaaaagagagaaaagatgaaaaaaacgagaagccattctaaaaaaggtctgatcattcttattataataacagttgtactgtgtgcggtgacggttttaaaaaagcaggagcagccggaagaatatacggaaaataaaagtgattacatagattctgtaagaccggatatagacgtagaactgctgacgccgaatgagtattccagagcgggaatcgcaacaaataagattacaggaattgtgattcattatacagcaaatcccggtgcttcggctatgaataaccgggattatttcgaaggattgaaggacagtcacattacgaaagcaagcagtaattttgttgtgggtctggaaggtgagattgttcaatgtgtaccaacatgggagatggcgtatgcctcaaacagcaggaatattgatacggtgtcgatagaatgctgtcatccggacgaaacgggaaaattcaatcaaaagacgtatcagtctatggtagatctttgcgcgtggctgtgtctgaagttcgatttgaatgaaaatgatgttatacgtcattatgatgtgactggaaagatttgccccaaatattttgtagaacatgaagatgcatggaaacagttcaagggtgatgtgggagtaaagctggaaaaattaaaggaatatcaataaatctccttagttttatcacagattaaacacaattacgctgtacactaccaatataagatatgaaaggggcaataagatatggaaaatcaatataattattatacaaccgatcagaatatgaatacgggaaattatggcggcggtggggaaccgggaaaagaaccgcagaaaaaaagaggaaaaggcgcagcgagatgggcaaaggtggtctgtgcaggactggtatttggagtggttgcaagtgctgcatttcagacgagtaatattgtggcaggaaaagttcttggtacaacacagacgacgaataaaacagctaagacaacaacgaccagcaatgcaaaactgacaacttcaaccaacagctcaataggaaccgcaaatgtaacagaggtaactaaaaatgcgatgccgtcaattgtgtccattacaaacatgagtgtacaggaagtgcagaatttcttcggtggtacacagaaacaggaaagtgaaagtgccggttctggaattattattggacagaacgattcagaacttctgattgcaaccaataaccatgtagtagaaggaagcagtacactgacagttacctttatagatgggaaaagcgtgaaagctgacatcaaaggtacggattcagacaaggatcttgcagttgtggcagttccgttaagcgagatcaaggattctacgatggataaaattgcggtggcaacactgggaaattcagatcagacacaggtaggagatcaggtaattgcgatcggaaatgctctcggatacggacagtcagtaacgacaggtattgtatctgcaaaagaccgcacaatggatagttacgatggaaaacttcttcagacagatgcggctatcaatccgggaaacagcggaggtgctcttctgaatgcaaatggagaagtgattggaatcaattctgcaaagattgcaacggaaacagtagagggaataggatatgcgattccggtatctgatgtaagtgatctgatcacaaatctgatgaatcagaagacaaaaaccaaggtagcagaatccgaaagaggctacattggaatcaaaggtgtagatgtaacagcagacagtgcacagatgtataatatgccgacaggagtatatgtatcagaagtgatctccggtggcggtgcagaaaaagcaggcattacaaaaggagctgttattacaggaatcgaaggaacaagcgtagatggaatggatgcattgcaggaacagcttcaatattataaagcaggagaaaaagtaaaaattacgattcagacacagaataagaatggtgaatacgagaaaaaagatgttgaagtaacattaggaaaacaatcggaataatttggataaaaaattgatatttgtaaattgatgtagtataatgtcaatgtatatggaatatacaaggccgaaaggcacaaagcacagtttgaaataatacactatggggagggacagattcatatgaagtgtccaatatgtggtcaggaattaagaccaggaaaaaaggatccgaattatctgttgtgctataattgcaaaaagaagttcaaaattccacagagtgctcataaagtacagaagagagcggaaaaaccggaacctgaagaacagaagtattcgaatataccgccaaaagaagtacgcgaaaaacgtgaacaggaaatgcgtgatgcgtatgatgaactccttgcagtaggagatgggaaaaagaaaaagaaaccagctccgaagccgcagcgcagagaagaattagaggatgaatattatgatgatatcgacgacgaagaagaagagaagatgtcaaaagcaccgatcattattcttgcaattgctatcattgtagtagctggattaattgcattcatgttactcagataattgatcaagggagtataccgacaacaaattatctaaagcgaacataaagtgctgacttgcctacaggtaagtcagcatttttgcgagatgaaaagattgaaattaagctgaaaaagagttaaatcaaaaagaaataaaaaagaataaaataacagttgacaaacacaactgcttgtgatattcttaataagctgtcgcttgagacaaacgaatgtttgagaaagaggtggcagacggacagctgaaaagctggtcgaaaaaaaagattaaaaagttcttgacaaacgccaatgaatatgataatctaaataagctgtttcaaacagcaaagacaaagaac

SEQ ID NO: 2850 - DNA, 1232 bp, Unknown
  gut microbiota DNA sequence
gctcttttttagtaaactgttaatagacatcgtctttaatgtatttagcgattgtatcagttaattcctccatgttaatcggcttggaaatatggtcattcatgcctgaatccagggattcctgaatatcatctataaaagcatttgcagacaaagctataattggaatcctaaccgcatcgaggcgctctatacccagggctcgaatagctttcgttgcttggtgtccatccatgtttggcatcataatatccatcaaaataagatcgtatgtgtctcgtggatgatttttaaacaaattcacgacttcttttctatctgatgcgcgtgttacggtcataccggcatcttccagcattatcgtagcaagttcagcatttagatcattatcctctgccataagaacatgaacacctgtcaaatctctatgtagagattgtttttgttttgattgaataacttgttctgtcaactccagtggaatctccacagtgaatgtagtacctacaccttttttactctcaacagcaattgaaccgcccatcatatctatatgtttttttgtgatggccatgccaagaccggttcccttatatttagttctggcattagcatcatcttcttgtgaaaacggcttgaataattctttctggaactcttcactcatgccaataccattatcttgaacaacataacgaattatgatatgtttctcatccgttccggggtaactgctgatatccaaagtaatctttccaccgtcctttgtgaatttcacagcattgccaagaagattcaccaggacttctcgaatacgcgtaacatccgcaaggacatatgggttctttggtctttctcgatgtacttcaaacttaagatctcggttataaagaagtccattcataatcgcctggacgttatctgtcaattgagtaatgtccactggctcaggcgaaatgataacttttccactttcaatgcgcctgaaatccagaacgtcattcaacaaagagagaagatgattcgaacttttttgaactttctccaagctatcatgaatatctgaaaccgtgttctggtgaagcgcaatgtttgtaaatccaataatggcattcatcggtgttctgatgtcatggctaatattaagcaaaaacgcagattttgctttgttggcagcatctgcttcctcagcggcgttcattaataattgtttttgtttttgctcttctgcc

SEQ ID NO: 2851 - DNA, 10190 bp, Unknown
  gut microbiota DNA sequence
ataatggaccaaagctgcatgaatttctgcgtgaattaagcagggaaacatttcagaagggcgatatgatcattgtcggagaagcctggggagcaacaccggaaattgcaaagaaatatagtaatccggatggcagtgaattttccatggttttccagtttgagcatattatgcttgatcaggaagaaggaaaggaaaaatgggatactattccattgaatatggttaagctgaaaaaatgccttgcgaagtggcagaatactttatatcagacaggatggaacagcctgttcatgaataaccatgatcttcccagaatcgtgtcgcgctggggaaatgacggaaaatacagaaaagagtcggcaaaaatgctggcgacaatgcttcatggaatgcaggggactccttacatttaccagggagaagagttgggaatgacgaatgtgcagtttgacagcattgagaaatatgaagatattgagacattgaatatgtacaaagagcgtctggaaaaaggatatcagccagaagaaatcatgcattctatttacgcaagaagccgtgataatgcccgcactccaatgcagtggagcggagaggagaatggaggcttcacaacaggagaaccatggtttaccgtgaatccaaattatatcaggatcaatgccaaagaggcactggaagatgaaaattcggtattttactattatcagaagctaattcgtttaagaaaagaaaatccagtatttgtggatggaaaatttgaccttcttctgccggaagatgagaagatttttacctatacgagaacagatgagcatacaaagatgctggtatgtgcaaactttacggatgaggaagttagctgcccattgcttgatgagtggaaagatggggaagtctggattcggaattatgaggatgacagagaaggaaatgtattgcgtccatatgaggcggtgataattggaactgctgtgaatattgtgaaagcaggatagttcccgtttgacagagtaattgaggagtacaacataaccagagaaccttggataaaaccgaagaaataaagatacttgcaaaatcccttcacaccctgtatcatttcaaaaggaacaaaacgaaatgacaaggagtggtttcattggcaaagatcaggaaaaaaccaaagaagagcataaataaaaatataaataaaaaatcgttcacacaaagcacacctaatatcgcagaaaaactcgacaacgagatggttgcgttcctggatacggaattcttaacatcccagataaaaggaggaccgccggccaagcttgtgtcggttgggtttgtagtctgtgggaagaattttgaagaagtaacaagatttcattcctacatttatgcagaagacaaattgcatgaccggttccaggagatgaccgggatagagcggaaagatctcttaagtgccccggattatgaacttgtgatggaagaagtcgcagagcagctggaagcgtgggaagtatcaaggatctatgtatggggaccggataagtatgtgatacagcgggatcttctggaatatcgtaaggacatatcgaaacggaccagaaagatcgtgaaccgaatccttcgtatgatcaaggatatagaaggaacttattcggcaaagctggatctgcaaagtacggggattggaagtctgaagatcatctgcggactcggaacagaagtcagccacaatgcgctggacgatgcggtagatctgaaaaatatcatcagccacattgatctgaaaggctgttcagagcatatgctgcagattatgaaaaagtatacatcggagaaagaagtatactacaggctgcgcagattccgtgaaaaatgggatgatgtatcggaagggattcaggaaaagagtcttagcctgctgaaagaacttggaaaagtggatgcggtagaagcaagagcactccgggatgatcttttggtagtgtgtaccggggaagcaatggcatttccgactttagaagaatatatccaaaaagagaatgcaaaaacagggaaagtaattcgtgataaaaacgataaatagagaaaattaacagataattttaagcaaaattgcagattgacggaaatcggtaaaacagtttgaagggcagggaaacctgcccttctccaatgttactgcaccagctggaagaatgctttcatctccagtgtcagaagtttgtccttgtggtatactatctgccgccagatatgcagatcaaaatcactgaccggtatgggggtcaggatcccctgtgcaatctgattctgtacagcaaactgaggaacaaaagataaaaattcatttttcaacagaagctgaatgatgaagtcggtactgctggattccacccgtggatggatttcttgaccatatgcagcaagatactgatccagaataaaacggtaacttgcatctttttcggtaagtataaaaggttcactgataattttatttaatgtcagaggacttttttttgtgcaaggatgatccggacttgcaacgaaaatgatattttccggttcttctaagatcttgacccacttcggatcgtacatacgtttatccataaaatagacgagatctacacaggatttattcatcatatcaagaagagcttccggggaatctgtgatgatactgatctcaaccgcagggtgaagtgcatgatatctggacaggatatccggcagaatagaagaacagatcgactcgatcgttccgatcctgagtgtgccattcagatcctgggatccggagagtacatcttttgcttcttcaatctcactggtgatgcgcagagcatactgataaaatacttttccctgatgtgtaagggaaatgtgtttgccaatccggtcaaaaagccgggtgcctaattcggattccagctgtttgatctggatactgacggcagcctgtgtgtaaccgagaacatcggcggcttttgaaaaactttcctgattggcaacatgtataaatgtgtttatttcacgaaaatccataattcctccgttcttcttgcataaaatatttttaatcattttataaaaaagttaaattttacgaatcgtttatttgatgatacagtgtctaagtgagaaaaacaagataaaatgcgttttcaggaaaaattgttttatggtattatagatagaagaaaggaatacaaaagagagatggaaaagacaaatcgaaaatatcaggcgtacatacagattttaaaagaagaattacatcctgcaatgggatgtacggaaccgattgcgctggcttatgcggcagcggtagccagaagagaactcggatgtctgccggacagagttgtcattggggcaagtggcagcattattaagaatgtaaaatcagtgatcgttccgaataccaatcatctgaaagggataccagccgcagtatccgcaggaatcgtggcaggagatccggacaaagaactggaagtaattgcagaggcgacagaggaagattcggcaaaaatcaaagatttcttagagaatacaccaatcactgttgaacatctggatcagggtatcacatttgacattgtactcacgttatatcatggagatgagtatgcaaaagtaaggattgcaaattatcataccaacattgtgctgatcgagcacaatggggaagttgtaaaagaatcagaagtcaagggtgaagaagaggaagggcttacagacagaagtcttttaaatatgaaagatatctgggactttatcaatacggtagacatagaagagattaaagaagttcttgacagacagatggagtataattatacaattgcaaaagaaggaatccgcggggattatggtgccaatataggaaaagtacttcttgatatggatgatgacaatgtaaagacccgggcaaaagcgatggcggcagcaggatccgatgcccgtatgaatggctgtgaactgccggttgtgatcaattccggaagtgggaatcagggaattacggtatcggtaccggtcatggtatatgcggaggagttgaacgtagaaaaagaaaaactctaccgtgcacttgcactttccaatctgacagcaatccatgagaagacaccgatcggtcgtctgtcagcatattgcggtgcggttaatgcgggagcaggagcgggagcaggtatcgcctacctttgcggcggaggatatgaggaagtgatccatacggttgtcaatgcactggcaatcgtatcaggtatcgtctgcgatggcgcgaaagcatcctgtgcggcaaagattgcatcggcagtagatgccggaatccttggatataatatgtatatccgtggtcaggaattttatggcggggatggaatcgtgacaaaaggtgtagaggcgacattgagaaatgtcggacgtctcggaaaagaaggtatgcgtgagacgaataaagaaatcattaaaatgatgattgaagattaagctgggaagtgatgaattggaaagcagtgtatccaaggaacggctttcggacaggctggaccggaaagaaatcgtaagaggaactgcactgacgattacgggaggttttctgtggggactcgcaggagtatttggcaaatattcgtttgaatacaaaggagtgatggcaccgtggctggtcaatgtccggctgatcattgcagggatcattttgctgatgagagcatatatggtgcagaaaaatggaatcttccgtatctggaaaaataaaagacatatgttacgtatgctggtgtacggagtgattggtattgcaggatgtcagatgacgtattatatggcggtacaggattcaaatgccggaattgcgacagtcctgcaatacacggcaccggttatgattatggttcttctggcaatcagaaactggaagctgcctgagggaaatgagatacttgcgttggtattggcatttggaggaacggttcttctggcaacgcacggcaatcttacgcaattgagtgtgtcaaagacaacattagtattagggcttgcttcggcagtcgcaacggtattttataatctcgtaccgggtaatctcatggatatctatggaaccttttccatggtcggctggggaatgctgatcagtggaatcggtctgacaccatttgtgcagccatggacgatggtgggagatatcctttgggactggcagtgcgtcggttgtattgcagtcgtaatcatatttggtacagtgatgtcctttagctgttatatggaaggagttcgtctgatcggaggctccaaggcaagtttgtttgcatcggttgaaccgctgacagcaacggtgatgtcggtactctttatgcatgtggctttttcgggaatggatctggcaggatttgtcggaattatagcgggcgtgattatcttgtcgctgccaaagaagaaaaaatgatataaaaagattacagaaagtcctgtcgggagagtaatattcccgagaggacttttgtcttgaaattaacaaatcaaaaggatatggaggatatcatatgttaaacagtttaaacaacgttgtgaatttcctgaatagttacatctggggcgttggaatgctgatactgattgtaggaagtgggttatattttacaatcagattacacggtttccagtttgtacattttaaggatatgtggagcagaatcatcgataagcaggattctgattcgggaatttcagcatttggttcattttgtacgaccatggcaatgcgtgtcggtacaggtaacgtagccggagttgcagtggcaatttacatgggcggcccgggagcattgttctggatgattcttgcaggtatgaccaactcggcagtatgttttgcagaatgtacgttgtcagttctttataaaacaagaattgacggacagtatcgtggcggaggagcttactgtgcggagagaggacttggctggaagaaatatggtgcattcatggccatgattttgatgatcggaacttctgtatttatgcctgcagcagctacatatacaatctgtgacggattccacaatgcgatcaagattccaatgtgggtaagtgcattagtaattgccctgattcttgcggttgtggttatcggtggtgtgaaacgtatcagcgcaattgcatctatgattgtaccatttatggtaactgtatatctgatcgtggcaattgtaatcattgtaatgaatattacagcagtacctggactgatcaaagaggttgtaacggcagcatttgccaagaatgcagttttcggcggaacaatcggtgtgatcatccaacagggtgttaagcgaggtacattttcaagtgcatccggtatgggtgaagcttctcctacagccgcagcagcagagacaagtcatccggtaaaacagggtatggcgaatgcagcgggtgtatggcttgacacggttatcatctgtaccgcatcgggactgatgatcctgttaacagactgcttcaacacagcgaatggatatgtcggcagtggctcggcagagcttcctgcacttgcagcagcaggaacaaatggagtgatctttgtgcagttggcatgtaagactgttatgggcaagattgcacctacattcattgcgatcatgctggcactgttctcattcacttgtctgatcagttactattacgaagcagagacagcagctatgtacctgttccagggtgattccaaagcgaaaatacgtaaagttgttacttggatcatgagaattgcaatgcctgttctgatctttatctggggtaatctggaatcagatatcgcatggaacttatcagatctggcacttggaagctgtacatgggtaaatatgctggttgttcttttgttatcaccaaaggtaatagcgctttacaaagactatgaatcacaaatgaaagaaaagaaagatccatactataatccggataaacttacatgggatggtgtagacacagagatgtggaaagacatcaataagaaatatattgaaaaagataaataagttataaagaataacccctgggagacatctcccgggggttattgtatactcgattattagttgtcataatctttcgaacaaacactgatacctattccatatcccttcggtccgatatgacatccgatactgaatgaaagcggatcataatatacatagaagtttgggaatgcgtctacaagcatctgtttccattcctcagcctcttcttctgtcaggttggaaccggcagcaccaatcaggatatgtctgtcatctgcatctttaaagcgtgtctcacggtcgttctttaatgcttcgaccattttttgtttacacttctttataccgcgggtcttggcaaaagcatccagtttgtcaccctgaattgtcaagatcggtttgatgttcagaacgcttccaagagcggcaccggcagcagtgacacgtccgccctttttcagaaattcgagcgtatcaacagcgatatagatgctggaattgtaagcctcggcttctaatatttctttgatctcttttgcggattttccggcttctgcaagcttttttgcatgcatgacagattctctctgtgtgacagagatcctgtgattgtctgcaatctgtactttgccttcataatcagtagaaaggttgatggctgaagaacaggaagcgctcagtccgctggacatcgggatatggatgatctcgtcataaccctgctcgaagatatcatcccaaagatccatcagatcaccgggcgaaggctgggatgtggatacattctttccgcctgtcaggctttcatagaaagaagtttcggtaagatcgattccttcatagtgtgtctcatcattgataatgactggcataggaatcagaaagattcccatcgagtcagcttctgctttcataattccgctgtttgtgtctgtcataacagctgttttcataagagaaaacctccttttgtactctttactatctatcagttacagaataaatattcttgatagcaaatattttattctgttcgcgtgtcaccccaaaagaacagtgcaacggttcccggacctgtatggcttccgattgttgttcccacattgttgatctccactttttctttcagatatggaaaacgggattgaaccagatcagcaacggccttcgcatcttcgtaacagccggaatgagaaatgtagcatttccctgtatagtcggtctgatgatcggcatattctgccatcttatcgacaatggcacggataacttttcgctttgtgcgaatcttatatcgtggaatcaggcgtcccaggttatccatgttaaggagcgggcagatgttcagtacaccgccgatcgcacctgctgtcttcgagatgcgcccgccttttacgtagaatttcaaatcggtggaaaagaaccagtgatgtacgttcagccggtgcttttcagcgaagcggaagacttcgtccagggacttgccttcatcacgcagatccgccagcttatccatcaaaagtccatatccggaagatgcgccaagagaatccacgatcaggatccggcggtcaggataacgttcttcaagactttcttttgcaatcattgcggaattgataactccagagagtccggaagaaagtgtgacatgcaggatatcctttcctgctttcaggaagggctcgaaatattcttcgaattcctcggcattgacctgtgaagtctttgtatcggctccggcggccattgcagcataaaatttatcaaatgggatagattttccaagatcatcggcatattccctgccatccagttcgaaatgaaaacagatgtaagatatgtcacgtgctttgaaatgttcctccgtaagatctgctgtcgagcagcagctgatgatgtaatccctcataatgcatgcttccttccctgttgttttattatatttagaatattcatgtatactccaagtggtaaaaattgtaccattttctcgggggaaattcaataataacgaaaaaatcaggaagaaaaagatgaaattgcctgcggatttcgtggtacaatattcatacatcaaaggtactgcaggaagatagggataatggaaataacggaaataacggggaataagaaaatatgaataaagatatggaaagaataaaagaaaacatgaatattctaaaggattgcacattatgtccaagaaactgtcatgcagaccgtttggggggacagcgcggaagatgtcatgagacggccgagatcgtggcagcaagggcagcactccacatgtgggaagaaccctgtatatcaggagatgcaggctccggagcggtattcttttccggctgttcgatgggctgtatcttctgtcagaaccataatatagccgaagcaaaagccggaaagataatcacgattgaaaggctgtcgcagatattcctggaacttcagggagaaggagctgccaatattaatcttgtgacaccgacacactatgttccacagattatagaagcattagagatagcaagaaaagccggtctggatctcccggttgtctataatacaagcggatatgaaaagccggagacaatacagatgctggatggatatgtagatgtctatcttccggattttaaatacatggaaccagaacttgcagctgcatattcgaaggctccggattatcccgaatatgccaaagcatctttaaaagaaatgattcgtcagacggggaatatccagatcaacaaagaaacaggaatgatacaaaaaggagtgatcgtaagacatctggttctgccggggcatgtaaaaaattccaaagcggtcataaaatatctgctcgaaacatacaaagaccagattctgatcagcattatgaatcaatatactcctatgccgcaggtcgcagaagatccacttcttggccgtaaagttacaaaaagagaatatgaaaaagttatagattatgcactggaactgggaatggaagatggatttatccaggaaggagaagcagcaaaagaaagctttataccggaatttaatttagaggggatagggatttaattcagaaaggctgtggatacccgaaccggaataaagcttggaaaggcgttcctgctcaggttccatcggcgggtcaat

SEQ ID NO: 2852 - DNA, 15183 bp, Unknown
  gut microbiota DNA sequence
atggacgaagctgctttaaaagcaatgtttgagaaagaaaatgtagatgcagtcattcactgtgctgcacttaaatcagtcggagaatccgtacagaagccattagagtactaccgtaacaatataacaggaactctgacgctgatggatgttatgaaacagaccagtgttaagaatattgataagttgaaagtactgattatgtacgaggtgattcggtttatgaattacctctttttttattcaaatttaatctatctgtggaaagtgaaataccattattttatgcatatatccaaacattctgtttcttatggaatcctgcccatctgctacaaattggaagcctattaacaaattaaagaaaccaggcatgcatctagcagcatctttgcaggcggtagctcatggttcagacagtgtattatatttccaactcagacagagccagggagcatcagaaaaattccgtggcgcagtaattgatcattatggtaaatcagatacaaaagaggcaggcattatagcaccggtagaattcgcaccaaaggagatttccataaatacaagagagtcggagaatgcagaatacttatttatacagaatttttggaaaaaggcggtaggagttccagtaagagaaggatataaagtgatttatggcaagaaaaatgagattgttgaacctctgaagacaagaattctgaagagagaaaaataaataaaagtatgacaatagttggcagatttttaaacaaaatcgtttcattgcagcaaaagagctctctgtggaatacacagggagccttttgcatatttttatttttttgtgctatcagcatcgatgacagactgaatctgtttcatcaaagtatcatagttatcttgattatcaattccgccgagcatcggatcacctacaatattaccatttctatcgaccagtattgttgtaggaaatgccatgatatcggacgcatatttccctgcatctgaagaagagtcaatggaaagattgcgatatttagcaccctgcttttcgagaatagtctttgcttcttttatagcagttttgtttccgtcgaaggtttctgtgttgatacctacaacttctccacccattgatttgattgcatcgtttaattcgttaagtttagataattcggcaacacaaggtttgcagccggtgaaccagaaattgatgacagttactgcatttttggaaaacaggctttcatcaacagaattcccatcataatcctgaccagagaaattcttgaaaggagatgcgtctttggaactgtttttctgatcagtcttatcagatcctgtatttttcttttcaatctcagcgatctgttcctcgatttttcggatagtttcaatatcagcggtaagtgttttcagctcgtcatctgtaaaagactccttgtttgattcaacagtgtcagccagagaatccgcataatttccatttggatccgcagcacttttactcatcatgccaaatgctttgttccatacatcttcatgatctgcgaagatctgattttcctgctgatataaatcattcagtttagagtcggaatcgtctgcagattctgagccggattcagtcttggtattctgagatttttctgtgtctgcagttcctttcccgctacatgctgtaaataataatgctatgcaaagtgttaaaatagagagaaatgttctttttgttttcataaataatagctccttaaaataatagtaataaaattaatagttaccggttggttatggttgattgctgctgttcttttttggggcatgtttttcccagaaactgatattggatcgcatcttttggacaaaccttgatgcaagccccgcatcgtatacattctggatgattcggagtcttgcacacatcaatatccattttacatgcctttgaacattgattgcatccgacacatttgctgccttcaactttaatattaagaaagctgatcttattaaataatgaatagattgctccaagaggacagatccatttacagaacggcctgtaaaacaaaatactcaacacaacaactgtaattaaaataagacatttaaaagaaaaaagtgttccaagtgcagaccttatagcggtatttccaagtgacagtggtatggctccttccaaaacaccttgtgggcaaatgtatttacagaagaatggatcccccatccctatagagttcgttacaaacaatggcagaagaataacgaaaacaatgaggattatatatttcaggtatcttagcggtttcagtcgggctgtggaaaattttttcccggggattttatgaagtaaatcctgaaaccagccaaacgggcataaaaaaccacagataaatcttccgagtgtcacaccgagcagaatgaaaaaaccggttatgtaatatgaaaatttaaatcgtgaggatccgataaccgcctgaaaggctccaatggggcaggctcctgttgcagcaggacaggaatagcagtttaatcctggcacacatactgttttaatcttgccctgatatattttgcctttaagtaaattggaaatatggatattggtaagtaatgtggcaattgcctgtatccatccccgtattctggcaattttttttgatagtaatttcgtttttttatccaattccaacacactccagacataattttattgctttgccaaagacggcagcagcttcacctcggatcacaccatagccaatcatggctgtacctgtgatgaatattacaaattgaaatatttttttgcacttcaagattttgttactcctttcgttggttgtatttgttgaccagctgacttcggtattatacaatagttagtgtgaaattttcgttaagaagagggtggaatgattttgagattattaatagttgaagatgaaaaacaaatatgtgatgcggttgcgaaaagtctgtatgatgccgggtacgaggtggatacctgttatgatggggaagaggcattggaatacatcctgacagaaaattatgatttgattgttctggatctgaatctgcccggcatggatgggatggaaatcctaaaagaactcagacagagcaatgaggagacaaaggttcttatattatcggcaagagggcagattgcagataaagtcgaagggttggatgctggtgcgaatgattatatggaaaagccgtttcatctacaggaacttgaggctcgtatcagaagtctgacaagaaggaaatttgtacaaaaggatgtatgtctggaaagtggcgatatcatgttcgacacgataaaacgtgaggcatatgcaaaggaaacaaagatttccctgacaagaaaagaaaaaggaattttggaatatttgcttcttaacctgggaagaccggtaagtcaagaggaattgatggagcatgtctgggatgcatctgtggatagcttcagtggagccatccgggtgcatatgtcttcgctaaggagaaagcttaaggcagtgcttggatatgatgcgattatgaataaggtgggagaaggatataaaatacgagaggagtctgattgatgaaaaaaatgtcactgcagtggagacttacgtgtataactacattgtgtattgcgattatatgtgggtgcctgacaatgttcgtctataaaaatggtgtgtattatatggattccctgcaaaaggctgttgacgctcagggagatgacagcggaggtggttcggaagaaatatacatcaccataccagaggataagtgggatgagttctcaaatgatttttctgttcaagtgtacaataataaagaagactacaaaagaaacagtctgatagtttcggctttattggctctccttggtggagtggccgcatattttataagtggacatgcgcttaaaccaattcgtgagttttctgataaaattgaagaagtgcaggctcaaaacctggcagattcgagaatagaagcaagtaagattaaagaactgaatcagcttagtgtttcgtataataagatgcttgaacgcctctcggatgcatttgagatacagagacaatttactgcaaatgcagcacatgagcttcgaactccattatcgttaatgcaggtacagcttgacctgtatcattccactcagcatccgggcagtgatgcagacaccgtacagatgataaagatgttgacggaacaaaatgacaggcttggaaagatggtaaaaacacttctcgacatgagtgagcttcagactgtaggacgggatgaaaaaattatccttaatgatctcgttgacgaggtattggaagatttggaacttcttgcacaggaaaagaatataaaacttattggaaaatataagaatataacgatgattggaagtgatatccttatttataggctggtatataatcttgttgagaatgctataaaatacaatcattcagacggtcaggttacagtaaatgcatacaaaaaacaaaaacatatttacctgtcagtagaggataccggaagcggaattccgaaagaactcagggaacgtgtatttgaaccattctttcgcgtggataaatccagaagccgagagcttggtggtgtaggacttggacttgctctggttcatgagatcgtgagagtgcacgatggcagtatcagcattaagtcaaaccctgcaggtggaacaatctttgaggtgatttttgaccagaaatcaaaggaatagttattcaaaaaaagaacaaaaaaagatgcttgtaaataggattgactcctaactgattaccatatattattatatattggtaaacattgctgaacattgcaaaacgttagtcagcatttagtgttttacaggttttgtagtaatccgcgattttgaccccaaaatgcgatgaaaaacagtaaaaaaacaggcagaaaaaagccccaaaaaaagaaaataattaaagatttatgaaaaaaacaataagaaaattattgtgcaacgtgtacaaaaatacaaggagatttaatgagaaagcttgcgttaaatgatgaaatattactaaaaatagagaaaccggcacgttatatcgggaatgaagtaaactcggtcatgaaagaccctgaaaaggtgtctgttaggtttgcgatgtgcttccccgatgtttacgaaataggaatgtcgcatctgggaatacagatcctttatgacatgttcaaccgccgagatgatgtgtggtgtgaacgtgtctattcgccgtggaccgatctggatcagattatgagagaacagaagattccgctgttcgcactggagtcgcaggatccgattaaggatttcgattttcttggaatcacgatccagtatgagatgtgttacaccaacattttacaggtgttggacttaagtgggattccgatgcaggcagcagaccgcacctgggatgatccaattgtgatcggcgggggaccttgtacgtataacccagaaccgctggcggagttctttgaccttttttacatgggggaaggcgagacagtctatgatgaattgctaaatgtctacaaagagaacaagaaacgtggcgggacaagaaaagaatttctggagatggcagcagaaatcgaaggaatctatgttcctgcgttctatgatgtgacatataaggaagacggaacgatcgagagcttccgtccgaacaatccacatgcaaaagaaaaaatcaaaaagcaggtggttatggacatgactagtgcaacgtatccggagaaaccggtcgtgccgtttatcaaggcaacacaggatagagttgttcttgagatccagagaggctgtatccgcggatgccgtttctgccaggccggaatgttataccgtccgacacgtgaaaaggatgtagaagtcttaaaagattatgcatataagatgttaaagagtaccggacacgaggagatttccctcagttcattaagctccagtgattacagccatttaagagaactggtaactttcctgatcgatgagttcaaatcacagggaatcaatatcagtcttccgtccctccgtatagatgcattttcactggatgtgatgggacaggtacaggatatccgaaagagcagcctgacatttgcaccggaagccggatcgcagagaatgcgtaatgtgatcaacaaaggccttacggtagaggacatcattgggggtgccggacaggcgttcgacggtggctggaataaggtaaaactttactttatgctgggacttccgactgaaaccgaagaggacatgcgggcaatcccggaacttgcagatcagattgccagacgttactatgagatcccgaaagagcagcggaatggaaaatgtcagattacaacgagtacatcattcttcattccaaagccgttcacaccattccagtgggcaagaatgtatacgaatgaagaatacatttccagagcagcgatcgtaaagcatgcatttaatgaacagcttaaccgaaagagcctgaagtatcactggcacgatgcggaagttactgttctggaaggtgtatttgcaagaggtgatagaaaaacttctgaagtcattaaagaagcttaccgtctgggatgtctgtatgactcctggagcgatcagtttgataatgacaaatggatgcaggcatttgaaaatacgggcattgatatcgcattctataatctcagggaaaggcctttagatgaggtgttcccatgggattttatcgatatcggcgtaacaaaagaattcctgaaacaagagtggaatcatgcaatgaatgcagaagtaacaccgaactgccgtatgaaatgttccggctgcggtgttgcaaaatggaaaggaggtgtctgtattgaaagtaagaattaaattccgcaaatatggagtcatgcgtttcatcggacacctggatgtgatgcgttatttccagaaggcgatccgcagggcagagattccgattgcatttacaactggatacagcccgcatatgatcatgtcattcgcacagccgctcggagtcggtgtgacaagtgacggggaatattttgatatcgagatcacgaaaccgatttcttccgaaaacgcggttgcgcagttgaatgcagtgatggtggaaggaatagaagtcataagcttccgtgagatttcatcggataagaaagccagtggtatgacgatcgttgctgccgcagattataaagtaacatttcctgagacgttcaggcatgcagaagagatccgcgtgctcccggaaagctggaaaggaaaggtggagtcattcatggcgcagccggagattgtggtgttgaaaaagaccaagcgaagtgaaaaagaagttgatatcaaaccgatgatctacaaaatggctgcactggacgatggcatctatctgtatcttgcaaccggaagtgagcagaatctgaagccggatctggtggcagaagcgttcttgaaatttgcaggagaagatccggaagaaacaccggtgcatattcatagaattgatgtgtatgcaaagaatccggacgcagaagaaggaaagacagagttcatttcgctggatggacttgggaaagatattttataaagatataacggacttccatcaatctgacaggagtgattaaacatgagtaaaaaggaagtaaagacaaatgccatgcgtatgctggaccgcgcaaaagtttcatatagttatgaagaatatgaatgcgatgattttacagacggtatccagaccgcagacaaacttggatacgaccacaagctggtctataagacgctggtaacaacgggaaaaacagggaaccattatgtattcgtgattccgatcgaagccgagattgattttaagaaagcggcaaaagttgttggtgagaaatcactggagatgctgcatttaaaggatctgacgaaagtgaccggatatgtccgcgggggctgcacggcgatcggcatgaagaagcagttccctaccgtgattcaggaagatgcaaaggaactggaatatatgcatgtcagcggtgggaaacttggaatgcagatccggcttgcaccacaggatcttcagaaggttgcaaaagcagaatttgcagatgtgatccgcccataaccgcatgcagtgatgctgtggggagaatcagagagtacctgaaaggcatgtatatttatgcagtagttctaaaaatcaatcgttattcccacacatattaacacattattgcattgaagtgcgctcaaaaatgatgtaagataaatacagttacgttttttatagcgaaagaatatgaatgcatttcagaaaatacttggttggaggaatacgaaaagtgaaaaaagttgtaaaatttggtggtagttcgcttgcaagtgccgagcagtttaaaaaagtaggtaacattatcagaaaagaggaatccagaagatatgtcattccgtctgcacctggtaaacgtacgccggatgatacaaaagtaacggatatgttatacagttgttatggacaggcaatccttggggaagatgcggaaaaagattttgaagagcagttagaagcaatcaaagagagatataacagcattatcaggggattggatctggaactgagtctggatgaggaatttaagacaatccgtacaaacttcagcaagaaaatcggaagagattatgcggcttcccgtggagaatatctgaatggtatcattatggcggcatatcttggatatgaatttatcgatgctgcagaagtgatcgtatttgatgagaatggtaattttgacggagataagacgcatgagatcctgtctgcaagactggagaatacggaacgtgcagtcattccgggattctacggggcaaaacctgacggaagtatccagacattttcccgtggcggatctgatattacaggatcgatcgttgcaaaggctgtgcatgcagacatgtatgagaactggaccgatgtatctggtttcctgatcgctgatcctagaatcatcaagaatccaaagccgatcgatgtgatcacatacagagaactgcgcgagttatcttatatgggagcaaccgtacttcatgaggatgcgatcttccctgtacgtaaagagggaataccgatcaatatccgtaatacaaatgcaccggaagagaagggaacgctgatcgtagaagacacatgcagaaaacctcgttttacgatcacaggtattgccggtaagaaggatttcgcttctatcacgatcgaaaaagcaatgatgaactcagaagtcggattctgccgcaaggtattagaagtttttgaaaataatcatatttctattgaacacatgccgtcaggaatcgatactatgacgatcttcgttcacagagatgaatttgaagaaaaagaacaggatgtcattgcgggaatccacagagccgtagagcctgactttctggaactggagtcagatctggcactgatcgctgttgttggaagaggtatgcgtgcgaccaggggaacttccggacgtatatttgcagcacttgcacatgcaaatgtcaatgtcaagatgatcgatcagggttccagtgagctgaatatcatcattggtgtcagaagccatgattttgatgctgctatcaatgcggtttatgatatttttgtaaatacaatagtttaataaattggggaggctttcattagctatgaatattatgttttttctgaagccgaaaagtgatcttgctttcatttatgattatcacactttgcgacaggctttggagattatggaatatcacaagtattcctgtgtaccgatattaaataaagaggggaaatatgtcggttctatcacagagggagatcttttatggtcactgaaggagctggatctatttaatattaaagaggcagaatcaatcagtatcatgaagattaaaagacgtgtggattatcagtgcgtgacagcagaatcgaatatggaagatctgatcggacgcgcaatggaacagaattttgttccggtgatcgatgatcagggacatttcatcggaattatcaccagaagagatattataggttactgttatgacagattaaaagaatgtggagagtaaaatgatcattgattttcatacacacatatttccagataagatagccgggcggacgctcgactatctttctgacatttttggagcaagtccgtttgcagacggaacacataccggactttgtgattctatgaagaaagcgggagttgatgtttctgtttcacttccggcggtgacgaaagtatcgcaggtagaatctattaaccgttttgcgtctgcttttacagaaggggcagttatttcattcggaggaatccatccggaatgtgaaaattataaagaaatattaaaagagatcaaaaatctgggattgaagggaatcaaacttcatccggattatcaggatatgtattttgatgatatccgctatgaacacattgtcgatacagcatcggaacttggacttatcacggtagtccatgccggagcggatccgaaatgtccaaaagatgtacattgcacgccaaagatggcaagaaagcttctggatgatgtaaagccggaaaaactggtacttgcccatatgggtggaaacgaaatgtgggatgaggtggaaaaatatctgatagggcagaatgtatattttgatacgggtgtcattctggatagaatgccggaggaacagttcttgcggatggtacatatgcatggcgcagacaggatcctgttcggaacggattctccatgggccgatcagaagaaatttgtgacattattcgatcagatgccgttgacagaggaagagaagatggcagtcttttcaggaaatgcgaaaaaactgcttggaatataaaagataaaaaatatttctgataatgcttgcattttcggaaaacatatgctattatcttctagtatgccgcacagtgaggttgaagttctgccggaatcatcagtcagacaccgtaactggcgagtaatgataataggaggtgccatatgtacgcaattatagcaacaggtggtaaacagtacaaagtagccgaaggcgatatcattaaagtagagaaacttggtgtagaggctggagagacttttacatttgaccaggttcttgcagtaagtgacaacggattaaaagttggtaatccgacagttgcaggtgcaacagttgaagcttctgtagttgaaaacggtaaagctagaaaagttatcgtttacaagtacaagagaaaatctggataccacaagaaaaacggtcacagacagcagtatactgcagttaagattgaaaaaatcaacgcttaatattggagagcatccatgattcatgtaacgatctttcagaacaagtataaagagtgtgtgggttttcagacggaaggacatgctgaatatgcaaatccgggacaggatattgtatgtgccgctgcttctattctggtaatcaacacaataaatgcaattgaagaatttacggaagatgacgcaagtctgatttcggaagatgagacgggaatgatttcttatcatctgaatcatccttcaaaagatgcaagacttttgctgaatgcaatgattcttggcctggaacagatggtagatgatgacaactatgcagaatatattgatttaacattcgaggaggtgtaacaaccatgatgaaattaaaccttcagtttttcgctcataaaaaaggtgtaggttctacaaagaacggtagagattctgagtctaaaagacttggtgctaaaagagctgacggacagtttgtaaaagctggtaacattctttacagacagcgcggaacaaagattcacccgggaatcaatgtaggacgcggcggtgacgatacattattcgcactcgttgatggcgttgtaagatttgaaagaaaaggaagagataagaaacaggtttctatctatccagtagcttaattatgagttgaaaaagtgcgttgcaatgattaacttctttcggttatgatgcagcgcgctttttttgacttccgtttatttattatagatgaaaggaatacagtatgtttgcagacagagcaaggatatttattagagcaggaaaaggcggagacggtcatgtgagtttccggcgcgagaagtatgtagcgaatggaggtccggatggcggtgacggcggacgtggcggtgacgttatatttgaagtcgacgaaggactgaatacgcttcaggactacaggcacaagagaaaatttacagcaagagacggtgaacagggcggtaagcgcagatgccatggtgcggacggtgaagatattgtcctgaaagttccggagggaacggttattaaagaatcagaatccggtaaagtcatcgcagatatgtccggagacaaccgcagacagatcatcttaaaaggtggcaaaggtggtcttggaaaccagcattttgcaactgcaaccatgcaggttccaaagtatgcacagccgggacagcctgcaaaagaattgtatgttgatctggaattaaaagtgatcgctgatgtaggacttgtgggatttccgaatgtcggaaagtctacgttcttatcacgcgtaactaacgcacagccgaagattgccaattatcattttacaacactgaatccaaatcttggtgttgtagatcttccggatgcgaatggatttgtaatcgcagatattccaggactgatcgaaggagcatcagagggtgtcggacttggacatcagttcctgcgtcatatcgaacgcaccaaactgatgattcatgtagtagatgcggctggaacagaaggacgggatccggtagatgatatctataagatcaacaacgaattaaaggcatataatgctgacattgcgaaccgtccacaggtgatcgcagcgaataagattgatgcgatctttacagaggatgatccggtacagcgcctgaaagacgaattcgaaccacagggcgtaaaggtatttccgatttccggagtaaccggacagggaattaaggaattactttattatgtatcgaacgaattacagcatctggatcaggagacaattgtatttgaacaggaatatttccctgaggaagagattcctatgaacgatcttccgtatacagtcgaaaaagaagacgatatgtacgtggtagaagggccgaagatcgaaaagatgctgggatatacaaatctggattccgagagaggatttgcatttttccagaaattcctcaaggattcaggaattctggagcagcttgaagaagctggtatccaggagggagatacagtacgaatgtatggcctgcagtttgactattacaaataatagttcagatgcggtccgttgatggtataaagaggagattaaagatgacaacaaaacagagagcttatttaaaaggtcttgctatgaatttagatccgatcttccagattggaaagaacagcatgacaccggaagttaccaaagctatccaggaggcactggacgcaagagaactgatcaaagtcagtgtacttaagaactgcgcagatgatccgcgtgcacttgcagaagtgatcgcagaacgtacacattcacaggtcgtacaggtaatcggcaagaagatcgtattatataaagaaggcaaagacaaacacaagaagatagagctgccaaaataatacaggtaggagattcaaatgaagatagggattatgggaggaacctttgatccgatccataacgggcatctgatgctgggacatgctgcatatgaagcattttccctggatcagatctggtttatgccgaacgggaatcctccgcataaaaagagcgagacaataaaatccactgcagaagaccggatgaagatgaccagtcttgcgattgcaccgtttccagagtttgttctgcagccatacgaggcattgagagcggaagtatcctgttcttaccagacgatggaacattttagcaaaatatatccggacgatgaattctattttatcattggtgcggactctcttatggcaatcgagacgtgggtacatccggaacgaatctttccgacatgcacaattcttgctacctatcgcaatgaggtgaagacaaaagaggagatgaacagacagatacaatatttgtctgaaaaatatcatgcaaagatacgtctgctggagacgcctcttatgcctgtctcatcttatgaactgcgtgccagtcttcagtccggggattccgtctcggaatatatgccggctgctgtatgcagttatataaagcagcatcatttatatcgatagtatcagagaaaaaacaaaagaaggaatacggtaatggatgaaagaatcataaaaatacagcatgtgctaaagaaagaactggacgataaccgctaccagcatacgctgggtgtgatgtatacggccgcttcgatggctatgcgttatgatgtggacgtgctgaaagccctgtatgccggtttactgcatgactgcgcaaaatgtatcccgaatgataagaaactgcatctgtgcgggaaatacggctttacagtatcagacatagaaagagagaacccaagtctgctgcatgcaaaactgggtgcctgtctggctcatgaaaaatatggtgtgacagataaagagattattcatgcgattgaaagccatacaacagggtgtccggctatgacgatgctggaaaaaatcatatacattgcggattatatcgagccgggcagaagagaactgccgaatatggcggacgtaagacggcttgcttttcagaatattgatgaatgtctgtaccggattttaaaagattcactggtatacctgaacagcaggaagattgcggtggatcctatgacacaaaaaacgtatgattattataaaaaagaaatgggaaaggaggattaagtatggatcaggcaaaggaaatggcaaaaatcgcatttgaagcgttagaagataaaaagggtgaaaatgtatgtgcgattgatatttcatcggtatctgttcttgcagactattttgtaattgcaaatggtaacagtgacagtcaggtacgtgcacttgttgagaatgtagaagaaaagatgcataaagcaggatatgctgcaaaa

SEQ ID NO: 2853 - DNA, 11517 bp, Unknown
  gut microbiota DNA sequence
tttttttaacttcataatctttttcctccattcttttcaatatgtgtataaaaatacatatatatttaatattttatcatgttttaatcaaaaaacaagtggataattccacataatcgtgaaacatccactcgttttcttatacatttctatgcaattacagtctgaatgatcgtccaaagaatgatcagtgcccccaatacgatacggtaatatccgaacactttgaaatcatgctgcttgatataccccatcaggaacttgatcgcaataaccgacagaccaaatgatacgatacatcccagcatcagaagaccgaactctgcacctgtaaaatggaaaccaaacttgatcagtttcaaaagactggcaccaaacattgcgggaatcgccaggaaaaatgtaaattctgctgccacttcccttgatacacctatcagcagtgctccgacaatcgtagctcctgatctggatgttcccggaatcagtgcaagcatctggaagaatccaatccacaacagcatctggacgctgagctgtgaaatctttgtaacagaaggtttcctccctgcgttatgcttctcaacgacgatgaataatacaccataaacgatcagcatgatcgctaccggtaatggtttgtaaaagatctcatccagaatatcgttaaacaatattccaactattcctgcaggtactgagccgatcagtactttgatccacatctgccatgtcaacatcttctgtttatgactttttctcggtgaaaagggattcaatttatggaagtacaatacgacaaccgccatgatcgcacccagctggatcactacatcgaacatttccataaatgcatcactcatactcggctttaatacatttcctaccagaataagatgtcccgtactgctgaccggaagccattccgtgattccctccacaattcccaaaataattaccttaataacatctaacatgttgcgctcctttccttaatccagcacatatttttctataaatttcgcaacgccttcttcatcattggacagtgtcacataatctgctgcttctttcagcgatggaatggcattctccattgctacacctgttccgacttcttttaacatcttcagatcattatttccatctccgaatgccatgatctcttctcttgaaataccaagaactttcccaagttcgatcattgcctttcctttattgacgcctgcagcattaatctccagattcatcggaagcgcaccggtaatctcgattcccggaacctcttctatatcttttctggctgcatcacggtcttctaccgatgtaaataatgcctggatcttatctaccggctgattcatctcttcaaactttgccctcacatcatccacgggtacacgcgtagacgtaatataatccgccatcgccggtatattcagatacttgtcaattctggtcagcgcctctttggatgcatatccaatgccatgatagtaaatttccctgaacgtatcatagcgttcaaatacagtcagcattgcttctgcaatatcatacgcaagaagttcttccacgatcacctcatttttcttcatatctatgactcttgctccatttgcagtaactgcataacggatttcctgcagcctgatcagctctttcggaatgccggaaaaaggtcttcctgtcgccggcatgacaatgattccctgttctgccgctcttttcagtacatctttcgtgtatgcggtcagttctttattcgtcttcagtaaagttccatctaaatccataccgatcattctgatcttattcttcatatgtaactaattcctttctttctcttgagaaccggtacagattcttactgatcttattctcgccctgttcataagcctgttccccgtgatcgatcatcttctgaacagtctctttattgcccgccggtgcaaaaagaaccgcatcctttctcggaatcataatgatcagatcatcttctaatttgtctgcacacacctgccagatatgtttaaaacatacagaacttgcttcatgatgtccgtctgccacaattccaaatcctccgtaccaggtattcgcaactacaaattctacatctctgttcagattttcacaagacttatgatacaattctatgatatcacattccggcggaagcatattgtcttttaatatctcatatacatcttcggcccttttgattgcaaatacaacattcaaatccccaagaaaactaattaccggagcatcttttttggaaaaattttttccgttcaatgcatgtgaatctgtaagctctgtttttacccacggatagatcttatcgcagatattttcatatttataattttcttcttcatattttttcatattaaatattcctctctcacttagacattctcattatttattttatacacaaatctcctctgtgtaaaccttttccggatttgtttatataaagttctaaatatctttaatctgtcgaaagaaacaaaaaacttctgtcttttcttatgtttccggtcaaaaatttgctttatcttatgttttgtagtataatagatacgcattcgcgaaaagggaaaggatatgtttatgataagtatgaaaaagaaacgagcattacgatcggctttggcaattaccatctgtaccgtaacaattgcttctgttaatactccagtatattcggcaccttccacagatgaattggaaagtaccacctctggtttaaaaggtgagttaaatgatttgaacagccagttatcttccttaagtaaggaactggacaatacttcaagccagattgaggatttatctgctaaggttgaaaaatccaagctggatctcgcttctgcgcagcttgatgaagaagcgcagtatgattcgatgaaagaccgaatcaaattcatgtatgaaggcggcggcgcatctctggttcagattcttcttacttcagaaagtatgggagatttcctgaacaaggctgaatatgttgccactattagtcagtatgatcgaaagatgctggaagaattacagcaggttcgcagtaatgtagaacagaaacagaatgacctggaacagcagcaaagcaagctttccggccttcaggagacattaaccagcaagcgtgatgaattaaattcaaaaatttcatctacttccggggaactggcagattatcaggcacaattagaccgtgccaaagctgctgaggaagcattaaagcttgcacagaacgatgaagtctcaggatctgtaaaggcagatgacacaaaaaatactgagacaagcaacactaataccaatacgaataacgcgaataaaaataatcagacagcatcaacaaatacaaataagaacaacactaccaacaccaataccagtaccaacactaattctccaactgttaataatggtaattcaactccggcttcaaccacagatgttgccctgttagcggcaattctccagtgtgaagcaggcggttatgatggaatgttagccgttgcaactgttataatgaaccgtgtggcaagtccggcatatccgaacaatctgcgcgcagtcatttaccagtccggtcagtttgccccaacctggaacggttcattgaaccgtgttctcagcaaaggtgcttcctcaactgcttattctgttgcccaggcagcacttggcggcgcaagacattctgcagttataaattgtttacagttccgctcagcatctaccggcgtatctggtataaatgttggtggaaatgtatttttctgatttttagcagttgattttgtctcttatgtatattatgaaataaaaaaataagcctcgttcggaggcttattttttgtacgatttattcatactccataacatcgatccatttcatcagaaaatctttttccagccggatatctttctcaagttctgcggcagcaacaattggaagccattgttctacatactgtcttgcggtatcgcttttcttacagaataacttaagataaagatctgcactctcctgatcgtgtaatgcaaacagcaaatatgtcattgccgcatctgcgcttgcatttccctgtgaagaatgtgcccagtcaatcacagtcatctttccgttcttttcaacaattacgttacttggattaaaatcaccatgacacaattttgtatgtctcggcatagattccaatctagtcaaaagttcataacgctctgttgcatccaaaactttcagatttcttatcttatttgcgagtttatcttttaatttcggtaatgtttctgccgttttactctgtactttcagctgaagatctacaaaatctgacatatatttttcaagattggcacggtcaattttcatcatttcttccaaagtttttccttcccggttctcaatgaccagcgcccattccccattaatctgagttacctcttttagtttcggaatatccaatcctgtttcttcaactttcacagtgttcaatgcttcattaaatactgctgactttggatgatctgttacaaatattttaacaacaccttcctcggtcttataaactgatttgtaaggtctctctacgatcaaattcttcttttcgagcttcatacagattcctcctttttattgaatctttggcccttttccttcttgttatctgtattatataccttattgtcagatttttaaatagttttttgatatttttttcactatttttcatcctgcatatttattgttatttttttatcaatattttgacataagaaaaagtgcaacgtcaaacgctgcacttttcctatgctcaatacattatccaacctccaaacaaaaactcatggatattatatttacgccttttttattttccataatagcatttcaggtagatttctttcatctcactcataagaggatatcttgggttagctcctgtacactggtcgttgaatgcctgctctgtcatatcatccaatgtatccaggaagtatttctcatctacaccgtaatctttgattgtcttcttaatgccaatcttctctttgagttcttccagtttagcgatgaagttctcaaatacttcttcatctgtcttacctttgcatcctgcaaaacgtcctaattctgcgtatcttgcaagtgcatgtggatactgatactgagagaatgttcccattcttgtaggtacttctgcagcattgtaacgcattacatctgtcaggattacagcgttagcaataccgtgtggcaggtgatggaatgcaccaagtttgtgagccatagagtggttcagtccaaggaatgcatttgcgaatgccataccagccatgcatgaagcgttagccatcttctctcttgcgattggatcgttagctccgttctcgtatgctgatggtaagtaatcaaatacagcttttactgccttcatagcaagaccatctgtaaagtctgtagccatgatagatacatatgcttcgattgcatgtgtcattacgtcgataccagatgcacttgtcagtcccttaggtgctgtcattgcattgtcaacatctacgatagccatgtttggcattaattcgtagtctgtgataggccattttactcctgtatcagcatctgtgatgattgcgaatggagttacttctgaacctgttcctgaagatgttgggatagctataaagtaagctttctctcccatcttagggaatgtgtatactctcttacggatatccatgaagtccatagccatatcttcgaattttgcttccggatgctcatacattaaccacataatctttccggcatccattgcggatccaccaccaagagcgatgatcgtatctggctcaaatgctctgatctgttctacacctcttctagcgcactgcagagttgggtctggagcaacttcaaagaagcatgtatgctggattcccatctgatctaatttatcttcgatcggttttacataaccattcttgtacaggaaactgtctgttacgatgaacgctttcttcttatgcattacagttccgagttcatctaatgctacaggcatgcagcctttcttaaagtatactttctcaggtgttctaaaccacagcatgttttctctcctctctgcaactgtcttgatattgatcaggtgtttcacacctacgttctcagatacagagtttcctccccaagaaccacatccaagtgtaagagatggagcaagtccgaagttgtaaaggtctccgataccaccctgtgatgaaggtgtattgatcaggatacggcaagtcttcatagcctgctgatgtttctcaatcttttctgtctgtgatgggtggatgtaaagtgatgatgtatgtccgtatccaccatctgcaacaagctgctcagcttttgcaagagcctcatcaaatgtcttagctctgtacatagccagtacaggagataatttctcatgtgcaaattcttctgaaatatcaacagattctacttcaccgatcaggatctttgtagccttcggtacttcaacacctgctaacttagcgatctcatatgctgattttccaggaatcttattatttaatgctccgttgatgatgattgtcttacgaactttatcaagttcttctcccttcttgaggaagtagcatccacggtatgcaaattctttcttaacttcatcatagatgctgtccagtacagttactgactgttcagaagcacagatcataccattgtcaaatgtcttagaatggatgatggagttaactgccatcttaatatctgcggaatcatcaatgataacaggtgtgttaccaggtccaacaccaagtgccggttttcctgaagaatatgcagatttaaccattccaggaccacctgttgcaagaatctcatcagcatctttcataactgttgttgtcagctctaatgaaggaacatcaatccatccgatgattccttccggtgctccggcttttactgctgcatcaagaacaactttcgctgccgcaattgtacatgcctttgctgccggatgtggactgatgatgattgcatttcttgttttcaaacagatcagtgtcttaaagattgctgttgatgtagggtttgtagttggaataacagctgctaccagaccaactggttctgcaatctttttaattccgtatgctttgtcttcttcaatcacaccacatgtcttgtcatttttatacttattataaatatactctgctgcgtaatgatttttgatgatcttgtcttctacaagtccacgtcctgtctcctctactgccatcttagcaagtgggatacgcatcttatttgctgccattgctgcttcaaaaaagatcttgtctacctgttcctgtgtataggtagcaaattttttctgagcttctctcattgctttcatcttagcttcgagagcttctacgttgtcaataatctctggtactacattctcttttttctttgtcgccatgttgattatcctcctgtgagtttttgtttgttttcgatggtcttagtataaccatttgttaattctttgtcaatatgtttttgatatttttttcacatatttgataattctttaacaggttgcttttaccacctctttcattatacacaaagaagctgccacaggcagcttcttctgtacacattgatatttaaaaacgttccaaattgtgctcagtatgtaacagcatgtgtgatttcggcgaatttggttttacaaaatattcttcatacattttccgtacatcatgattttcatgtgaaaatctgcgttttgcattctcatccagatgatagagtttacgtcctctttcgtatgccatctcccttccatcatgaatcggctgtccaccgccgcctacacatcctccaggacaagccatgacttctacgaagtcgtaatgtacttctcctttgttgatacggtccagaagtgcccgtgcattacccaggccactaactgcagccgttctgacagttacattgtcaatctggaaatccgcctcctgaattccctcattctcattgaatccggtacttcttaccgctttaaaagcatcttccggcggattctcactcttaagcagatagtatgccgtacgaagagctgcctccatgacacctcctgttacaccaaaaattacacctgctcctgttccatcctgcattggccggtcactttctatatctgacagtgtatccggactgatatgcgctgatttgatcatctttgtcagttctcttgtcgtaataactgtatcaacatcatatcccgcatattcttgatagaacagttccatctccttttctcctttttttgccacacatggcatgactgatactgtgtaaatcctctgcggagatactccgagcttctctgcaaagtaagtcttcatcacagctccgaacatctgctgcggtgatttcgccgttgaaagctgtctcaccagatgtgggtactgcgatttgataaatctaagccatcccggacaacaggaagtaaacatcggacgctctttcaattcccctgcagtaaatctgtgcaaaaattccgtcccttcttccataattgtcaagtcagccgaaaatgtggtgtcaaaagcatagtcgactcccattctcttcaaagcatcaaggatctttccaactgttgcttcttcatcagaaagtccaaattcctcaccccacgctgttctgacagccggagctacctgtgcaactacaatcttgtccggatctgcaattgcatcccatatatcttctgtatcatctcttactcttaacgcaccaaccggacaatgtgtaatacactgtccgcataatgcgcagtcagcttcttctattgtcctgtgaccagccacattgatcgtagttcttgatcctgttccttccacatcccatacaccaagtccctgtactttttcacaaacctgtacacagcgcatgcattttatacacttggaagaatccctgatcaatgggaattctttattccatggctgtctttcaatctccattttaaacggaatatctataatattcaggtcatttgcaatcgtctgaagactacagtttccacttctggaacaggtaacacattcacaatcatgctgcgaaaggatcagctctaccgttgttcttctgtgtcttctgactttcggactgttcgtatggatgaccataccttcttttgcgacattattgcatgaagtgataagtttctcttttccttctaattccactacacagacacgacaggccgcaatttcattgattccttttaaataacaaagtttcggaatggggattccattctgggatgcagcttccatgatcgtggtattctcttttaccgttatctctcttccatctattgtaagatttaccataatgtctctctgcctcccttaaatataccgtatccgaagtgatcacagcgaaggcatcttcctgcttcctgtttcgcttctttttctgtcatacaattttccactgcctcaaaatcgcagactctttcacacgcttctctttctgtaagatttactcttccgcaaggtgtacgatcatccagatgcgcttccggaatttcaacatcgcaggaaatctcatgatgatatccaagatactcatcaatattagctgctacgacttttgcagctgcaattgccttaataactgaagccggtccgcttgcacagtctcctccggcaaatacacctggaaggttctcgaatgctcctgtgcttttggtaacaattttcccacgttcaaccggaataccagcctgttcaaagtgatgtgtttcaatattctgtccgattgctacgattaatacatcgcatggtatgtaaatatcttcttcacctgtaggtttgatgcttgctcttccatctctgatcgagctcaccatctgcggagtcacatagattcctttcacatgatgattctcatctacatcaatggatgccggtgctttcaatgtctgtaattcaataccttctgcaacggctccgtctatttctcccggaagtgcagtcatatccgcaacccttcgtctgtaaacgatacttactttcttggcacccagacgttttgctgtacggactgcatccatggatacgttacctccaccgataacagcaacctcttttcctgtcaaatccataatctgattctttcctacgttacgcaggaactgtacagctgataggattccgtctgcatcttcattttccaatcctaattttttatctgtacttgccccgattgtaatcagaacaacatcatattcctgtctcaattgctggatcgtaatatcctgaccgatcttcagaccatttttcacctgtacacctgtcttcagaatcgcacggatatcatcgtcaagtctgtctttcggaagtctgtagttcggaataccataacgaagcattccgcctaatttcggaagcatctcatatacagttgtctgatgtcccattaactgcagataataagctgcactcaaaccaccaggtcctccaccaaggattgcaatcttttttcctgtatccggtgcacactgcggaggatcaacttctcccgcaaaatctgctgctacacgttttaatccacggatattaatagaatcatccaccatatttcttctacatcttgcttcacatggatgttcacagataaatccacatgtagtcgggaacggattatcttttctcagcagacggatcgcatctgcatatctgccttcacctaccagtgcaacatatcccggaatatctacatgtgcaggacataaagatacacatggtaccggctgattataggtacaggtacatcttccgttctggatatgttcaacgtaatcatcacgataaccgatcaatcctttgtataccatattagcagcctcatatccgattgcacagtctgctgattccatgattgaaagtgcagtctgctccataatatccagcgtcttcatagttgcttttccatccagtacttcacggatgaaattgttcaattgacctaatccgatacggcaaggtacacattttccacaggtctgtgcatgacataactcaagaaatgctcttgccatatctacaggacatagtcccggaggacttgattcgattcttctttccagatccttataaaggccttccattacgatctttgctctttttggagaggcaatttccagtctgctcattctttattccctaccttccatctgtttgttttcaatttatagtatatatgaattgaaattatcagttttttgcacaatttactttaaatgtgatatcggtattatatcatttatttgataatttgtaatcatatttgttaatagtagtaaatttaacgccatagtcagatttttaacaaatctttaattgtccgtttatttacaaaatcctgtctgccactcttcctgtatcttttatacaaaaaaa

SEQ ID NO: 2854 - DNA, 16892 bp, Unknown
  gut microbiota DNA sequence
ttgtaattttttttttttttgtcagatatagaattccatcctttgcgtatgcacggaagccaagttttttatgtgtgtctttactttctaccgtaatctcatctgtatccggctgtgttttcagatgaatccttcctgcacctactgtactctttatctcccggatattctgatatgcagcctttccgtttccttctataattcccgttgcatctttcatcgtctctttctcctgtgatgctgctgtttcttcctgcttccgttcattttgatcatcttcttcgtcctgatcatcctctatatcttcttcatcttcttcatctgcatcatcccagtcttcatcttccgatatccagccgatcccatgtggaaattgacgcgcgatatctgtcagggtcgttcccattccccacgaaaccgaacaacatatgattccggccagaaacatcgagccgcacacgatccagaatattttccatcgcttcttcatcttttatgccaccacctttctgtgaaatggttttcttaatatatatacaattcctctgactatccccggaaatacgataatgcacagccttacaccgactactgttccgatcactccgattgcaactgccatcagtccggctccaagaactgcaagccctacgccgggatttgcgatcatgcatcctatccccgctgcgaaaagtacaacaccagccatcaccactgctgcaaacgcaagtacaatcgccacaaacacacagaacgccgcaatcacaattcctgcgatcaacgccagaagtccggctgcaagtggtatcacaattggacatccgatcacaacgattgccacgatcatagtccattttaaccatttattcgtccacggcttattctcctgacgctctccatactcatagcttccattatcctggtatattttattatctttttcatctccggatctgtcctcctgataatactgatatgtattttccgtatccgtctgagccttgtattcggaatctgaagttctttctgcctgcccttttccagtatctgtgtcatattcttccgtagttcctgtgtcttcccggtccgctttgatcttcatcgccactttttccggactctccagttcttcaatgacattctgctcattctcacttcctgcgtcatcgaagtaatcattataatacttcaatgcatcgatccgatcctcttccggaatatccagaagcagtctggacagcgtctccataaattctattctgttcattctagtctacctccctcaaacaattcgctgatcttcccggaatattctttccattctttctgatacatggcaagctggattcttccgctttctgttactttataataacgtcggtttcttccgtcaaactgcctgtcatagacttccagatattcccctttctgcagtcttcgaagcaccggatacaatgtagattctgatacatcgattgcttttcttacatcctgtgtaatcttatatccgtacgttccttcatcttcccgcgatactaccgccagcacaattgcatccagaagagctgcacctgtattaaaaaccatgctctcactccctttcgcactattatctaatattattttgttacgcatattatacgtcgtataatatagtatgtcaacacatattatgtatgttacaaaattgtaagatgctgatcatatgacactagcggattcttccaaatacataacgcaaaaagaagcacaccccgacttgggatatgcttctctttgttattttatataaatttctttcttcaaagtaaatgaatatataatcttttctttaaccttttttcctgtcatctgttccagtgccttagcataatagcgcagctgctcctggtacttctctgccagttcttctcctctgtctgccttatccgtcttataatccagcacaatcagtccatctggttcttcaaaataagcatcaatgattccctgtaccaggatcagttccccgtcttcttcctccggatacagctcttttgcattaattccaagtacaaacggctgttctctccagagcttctgatttctgtctgcttcctgcatccgttttcccgaatcacattgcagaaatcccagaatatctgtccaacggacacatgctgccgcctcttcttctatccttcctcttctgacctgttcctccagccatccggtgaaccattgtttccacggctcctgcataccggaaaaatccagtaactccatcacacggtgatacgccgtacctctcggtgctcctgtcagtccctcttcctgctgcatgaatttcggtaaaagcggcaccacttccggttcttcgtataataaatcaccctggccttcaagttcttcccggccgccatctaccgcaatctcataagctctttttttcaattccgtaacggtgaatttcagctttctttcactgctcttttcatatgggtaggaaaatgcgaactgttcctgcagcatctcgtgcaattccggttcatagatttcttctacattccagttttcaagaatggctcttgaaagaccgctcttttcttcttcctctatgctttcttttatcagatcctccatatgcaggatctgaagtctgaacagttcttctttctgactctttaataccgccggaagtatccagtcccagtatgtggaagcatggctaagctgggcgaatgataatgttccgtctgcgtttcctccaaacatctgatatccggtaatcttatcctctggttttgaaagtgttcctgtaatgatcagcttctctttcgcacgcgtcagggctacatataatacacgcagttcctcccccagactctcgagtgcttcctctttttgtatcactttcttgatgatacttggaatcttcgtacgatattccagattcaccgcatccagtccgactcccataccggcatggagtgccactgcacttcttgcatcctgcatgttaaaacgttttcccattcctgcaacgatcacaaccgggaactccagacctttacttttgtggatcgtcattacgcgcaccgtatccgcatgttcatcttcaatacttgcttcaccataatccacatcatatttctgcagctgttcgatatatcttacaaaatggaacaatcctttatagctggttgcctcgtatgccctggctttttcgatcagcatgtccagattcgctctgcgctgtgcgccgccgggcatcgctgccacataatctccatatccggttcgatccagtatcttccataaaagctcatgcatcggtgtatatggtacaattctacgtaattcgtccatctctcccagacacttttccagcttttcccggatcttttgttcacttccatgtactctgtactctgcaacgctttcaaagaacggcttatccagatacgcacaccggatcactgccagctcttcgtctgatatttccgcaaatgccgagcttaatactgctgccagcggaatatcctgtctccggttatccagaaccctcagataatccagaagcacgccgatctcctgtgtctggaaatatccttcactggttcccgcataggtcgggattccttcacggttcagcacttccgtaaatacatcggcaaatcctttaatacttcttgtcaggatcacgatatccgaatagcggacatctctcagttctccggtctccttatccgtaactttctgcgaccgcagaagttcccggatacgcatggcgatcatacgggcttccagctctctctcggaaacaattccctttcccgtatctttatccgtattaccagtgctgttttcttcttctactgcatcattctcctgatatccatccagatcaccgtccatcaccagaatctctgtctccagattctccgtcttcggatattctgctcccggatataatgctgcctgcttatcgtagacaatcccgcccagtttctccgtcataatctgccggaatatcgcattggcaccttccagtacttccttccggcttcggaaattcttgtgcaggtcaatcctctgggtctgactttcttctatattatatgtgtggaatttctccagaaataattccggtctcgacagacggaaccggtaaatactctgcttcacatcccccaccatgaagatattgtaccttccgcttctgcaggtcgatacactggtaaggattgcttcctggatcaggttgctgtcctgatattcatcgatcatgatctcctggaactgtttctggtattcttccgctatttttgacggtccaagtcccgcttcagtcttctctgtcaggatacgcagtgcatattgttccatatccgaaaagtcgatcatattctgtgcacgcttctgctcctcaaacttctccgcaaacagccgcacaagatctcccagttcttccatcgccggggcacatagtttcagatcctctaccagttcctgcggactttcataaaaatactgcccgctgatattctttacaattccttttaccagttcacggatcttcttaacctgctcaatcttttcttccgataccgtcttatctttatttgctgcgatccttgcccattttacgtttgcaaatgcttctgccatcttctcataagacagaatcccggacagctcctcgatcacctgcatgtctttatccagcgttgcctcatacaccgccggaccatccggacttaatgcgatcttctccgcatgagccagcagttctcttgcatcatccagattctttcggatatctgtcatcacctttttcatgaagctgctttcttccagcgtcttcacatccggtattccatatactttcacacaggaatccagccattcttcactatccggataacttctggaaaattcatagatcttcaatatcagatcttcaatctttttatcatctcttccggtgctgtaagctgccgcaaaatcaagaaaccgtttatttccttcctgatatttctcctccagcatctcctccagcacatcatgtcttaacagcttcagttctccttcttcaccgatccggaatcccggatcaatatcaatcgcatgaaaatgatcgcggatcacagaaagacagaagctgtggatggttgtgatctgcgcattatggatcagggttgcctgttgtttcaaatgctcatcttccgggtattccgtcagtttcttctcaattgcaagacgaatcctttctttcatctctgaggctgccgcctcggtaaatgtcacgatcagaagtttatctacatccaccggagggtcatcttctgtcagcatcgtgatgatacgttctaccagaacagctgtctttccggaacctgctgctgccgacaccagaatattacgatttctcagttgtatgaccttctgctgttcttctgtccatttcacacccattcctggtttcctcctttcctgtcattttcagattcacgctgttctatccgcattgccgccatggcctcttcttttcccattgttccgatatcacggtattcatatcccggaattttaacatcgaatccacagacatgcctgtatggacagtaatcgcatccactttcctgcccacgcttataaggaagggctcctgcttcaccattcaatatcttcgttcttgcatcttccatctgctttttggcatgagtcatcattgcagaaaaatcctctcccgcaaccactttggaataccctgatacgctgccgttcttattatattttaccggaactgccagagattcgcccgaagtattatgatccagatgttttaatatctctgtcccaagcggaatgataccatccggcttcaactgctttagaaccgcacgctctgctttttctttgtcttctgtcttatctaccagaggatcctgaatacggtaatagaacacaccagccgggattacctccttatccggatggcgctttttctgaaattcgactgctgcatccatatagatcataagctgtaattgtaagccatgatacaatgcaaccacatcaaatgccttacttccggtcttgtaatccataactttgacatatatctgctcttccgtctcacatatatcaatgcggtcaatctttcctccgaagaaacgcagttcatatgcctccggtacaaagtccccggctttcagctggttcgtaagtgcccatactgttctctccagcatctgcttcatgcgcacgatcatctgttcatttcttgccgtactgtataatacagaattgccataatctgtaatcgcttcttccacacttgcatcgatcagcttttttctttcttcttccggcaatactgtccaaccgcccgcctccgatgcctttttcgaaaacagttccagggccctgtgacagacatttcccagatcgactgctttaaattcatacagcggccgttccttcaggcggagcccgtaagcaaggaaatgtgcacacgcacaagtcgcataccgttccattctcgtgatgcttccttcgaaattctctccataaagttctcttgctacacgttccgataatggatcttccggacgtctgtagtaccatgcgcgcaaaatccggtccaccgcagctttccattccggagatttctgataccaggtatataattcctgccaggtgaggtccagattcttctcctgcagtccacggatcagataagcaactccacttttctccgtcagttctttttcctttagtttttttgcttcttcatcctgaacctttaactccggatataatcttgataattcctgtatcagataagacggacgctgtgctttccctcctgcagacactttactataataaatcttcagtttctccgacggcttagtcaggttcatatacaggtaaaacttttggacatatgctttttcctttccgcctgccgccagcgcatgatccgcctgccggaacttctctctgtcctgttctgttaacagaccggttctcataagtgctccgggaaggaagctgtcattggctccaagaaaaaagagtgccctgatgtcttttaatcttgttctctgcatatctcctgccactacctgatccacacttggaggaatcacaccgactcttgcctcttccagtcctgcatccagaagcttacaatattcattcagtcccaccggttcctcacccagaagttctacaaatttatcaaataattctataatgatccggtagacctgtgaatattccttcgccagtgccagctcacctgctttctgaaattcttcttctgttctttgcaggcgttcctggatattttccttcaccatgaactcatatactgccatcgtgatatctcgcaccgttttcctcttttgttttaatacaaacatcaggttatccactttttctaccagttgtacacggtaatgattcagccggtccagttcctcttcttccatccccttcaatctgcggatccaacggttctgccagcctttatatcccctgattcccagtccgagcacatagttttccagttcatcgacttcctcgcaggcgaatcctgcaagattcgttcttaagaagcggaatacactttcataagagaaattcttttccgccatattcagaagactccttatatattctacaaatgaattcaacaggatgcttctcttatgatccataaacaccggaatcccgtaattctcaaatgcctgttccagatagtctccatatacattcatatcactgacgatcacaccgatatctctgtatctgtactgctctttacgtaccagtctgcggattccctctgccactgcatctgcttcctgtcttgggttccctgctacatggatttccagattctccacagctttatcataccttccagacccgtaccggaagatatttctctccaaaaatgcaagttcctggttcttttcaaatcgtttcaccggatatccatacaggcagaccggttcttctacctctatatgatcttcccccgccattctgaccagtgtcgttaccatctgcttactcagtccaaacagctgatatggatgtttataagcatacggattctcccgttcatccatcgtaactgtcacccagacttccttgcagcaccgcataagttccagtatcagccggttctgcaccggtgtaaatccggtaaatccgtcaagaactacaacactgtttttcaaaagttctgattcttttacctgactgttcaatacatccagcaattcttccttcgtgatataccgctctcttaagtaatcctgaaaaccttcatacaaaagcctgatatcttttaacttgtaatacaatctggagtcttcatccagatgatccagcatctcatccatctcttcttccccgatatcatactgtgtaaattcggatatcacggattttacctcactgatatagccaagtttcttaatattccctttcaataccgtcagtttgttctcataatcccctgcaatctttctgaggatcaggttttttccctcatcatccagaacctgcatctgctttgtaccggtctcttcaaatacccggtaagcaagtcttgcaaaactcagtacatcgatattcatgataccgtgtctcggatgcatactgaccagatccttctgcgtctgcattgtaaactgttccggtacgagcactatgaaattcttcagtgggtatttttctgattcttctatgacatgctgatataaataagttgattttcctgagccggatggcccgaatacaaattttaaaggcataaggtttcctccttatgccctagtataacacgaatatatgtttgtgtatagctgtaaaacctgcttttatactgtcattcacgacagcttttgcaagatttccccggtatcttataatgcacgcagtctctccgcaaattcattactaagtgtcatcttcgcaacgtagaacacatctcctgtcatgtatacattccagtcatcttctacttctacctggagttctcctcccggcatatgaacgatcactttactgttcgtaagtcccagtttgtacgctacacctgctgccgcacatgctccggttccggatgctctggtgtatcctgcaccacgctcaaagatctcgatcgcaatattctctttatccatcacctgcatgatctgtgtattgattctgttcgggaaatatcttgcgatctcggaataatcaccgatcttgcataccagcggtttggaaatctcacgcatagggatcacgcaatgtggattaccgatggatacacaggtaaccggatacaacgtccttccgaataccatgtcctcgttgatcacttcacgcctctcgccgatgaccgggatctcatcactccaaaatgataattttcccatagatacacgcagccggcttccatcttcatttaagaatgtcacttccaccggaccgtttcctgtatataatttgaaattctttttctgtacgtaaccggcatctttcagatattttgcaaaaatacggacaccgtttccactggtctctgattcacttccgtccggattccatacttttacatgcataccgtcttctttcaggatcggtccttccagaactccgtcagcgccaagcccctcattacgatcacagatcatttttacatttgcctgatccagttctaattcattatgattcggatcaaatacaagataatcattccccaatccatgataacgttccaatactactttcatctttcttcctcctgatttttaatccccgtctttaattacatttaaaaatttcttctgttgtgtttttatttcttttgactgtatatagttcacacagagtattcgccgcttactgcatctgttagctgcatctttctctttatccatatcataacaggcattatttccataatctacacaaataatgccatgtttcttgcaaataatgccattttcctataaactgattacagatactattttcagctttttatctgtctaaaatcactctgattttgatattgtatttttaataatatatggaggatatatatggaacaatacgagaaaaaaggatatctgaacagtgaattcagactttttcacctgactgatcaggataccaaagaaatcgattaccattatcacgattttgataagattacaatctttattcggggaaaagtcaattatatgatcgaaggccgctcttacgacctaaaaccttatgatatcgttctggtaaaacagggagatatccataaactgacggtagacaattcctgtccttatgagaggattattgtctacatctctccgaattttatgaacgcataccagaccgaaaactacgatctgagttactgtttccagaaagctgatcaggagcactccaatgttctgcgcatcccttcacctgaaaagagttccctgttccgttctatctccaatctagaacactctttcactgacggcggctatgcttccgaactctaccggcaggtaatgttcctggaattcatgatccatttgaaccgtgcggtaagaaaaaaccgactggaatacattgacacggataattgtaacgaaaaggtgctcgccatccttgactacgtcggcgaacatctctgcgagaacttatcgatcgacctgatcgccagacatttttatatcagcaaatattatatgatgagattattcaagcaggaaaccggttatacactgggacaatatatctcccagaaacggctcctgcttgcaaaagaactattatcttccggtgtgccgggcacacaggtttgttacgattgtggatttaaagattattctacgttttccagagcttataagcaattgttcggtgtaacgccttccggacgtacctgcccataaagttctgccggaacgaatgcccgcacgaagataccatcttcccggtactcttcctcctgaagttctccgtacttccggatcttttggatctttccggcttctttatatggatacaatgcctcaatctccactttccgctccctcaatacagcttctatggactgaagaaatcctgtaattccttctcccgtctttgccgagatttttacatgataatctgcacgcaggtctctcggaacccaggtatcttccattcggtcaatcttattaaataccgtgatcaccggcttatctttcactccgagattctgcagtgtctcatatacggtatacatctgttcatccatctgcggattcgaagcatccactacatgcaggatgatgtccgcatattttgcttcttccagcgtactccgaaaagcttcgatcagatgatgtggaagctttctgataaatcctaccgtatctgtcatgagaatttcctgaccgcttggcaatttcagatccctggtagtgggatccagagttgcaaataatttatcttctgcaagaattcctgcaccggtcagagcatttaacaatgtagatttccccgcattcgtgtatcctacgattgctgctaccggaatatggcttctgcttctctgctctctggtcacttcccggtgttttttgacatcctttaattcacggttcagttgtgcgatccggcttttgatcaggcggcgatccatctccagcttcttctctcccggtcctctggttccaattccgcctcccagtctggacatcgctcttccccagccggtcagtctggtctgctgatacttaagctgcgccagttctacctgtatcttaccttcactggtcgatgctcttgccgcaaagatatccagaatgatcagggttctgtccatgactttcacatccagctcatcctgcaggttcttcatctgcgccggagacaattcatcatcacacacaatcccggtcgcacgcaattcccagatcatattttttaattcttctatctttcccttcccgacataagttgccggatgctgctgctcccggttctggatcagcattcctgccgtctccgccccggctgtcgataccagatcttttaattcttccaatgattcttttgtatcatcctgatccgagagtgcaactccgaccagaatcactttttctgtttcatcttttatttctatcatattctattaacgcgtctccaggaattctgcttcttttttagctgccttgtcatttgggtaactatccagatattcttccagttttacttccgcactctcccagtcttccatcttctcataagcaacgatgatgttatatttcatttctttcttcatcttcttgctgacgtcatcctgttccagtccgagattataatagttcaacgcttcttttgcttttcccaatttcagatcacagtttccgatgagattgtaaattgttcctgtcttctcagcattattatccagagccttcctgaatgcatttcttgcccctttataatctttctgttcccatttcacaatgccgattcctctccaggcatctccggtattcttattcttttctattgcctgttcaaactgttcaaccgcctgatcgtattctcctttttcaagatactcaactccctttttcgaaggatttccacaggcagtcagtaacagacctgcactgaatattgcaagtagtgcttttcctcttttcatactttttctatatactcctcatttactcaatctgccagtcaatcggttctattccgtgcgctctcagataatcgttcgtctgactgaatggcttacttccaaaaaatccgcggtatgcagacagcggactcggatgcggtgctttcaggatcagatgcttcggattattcagcatcctcgccttcctctgcgccggcgctccccataagatgaacacgattggacggtcctgactgttaagtgccatgatcgccgcatcggtaaattcttcccatccgatatccttatgggaattcgcctgatgtgcccttacggttaataccgtattcaacatcagcacgccctgctctgcccattttgtcagacagccgtgattcgggatcgtacatcccagatcatcatgcagttctttataaatattcacaagcgaaggcggcacatccacacctttttttaccgaaaagcagagtccatgcgcctgtcctacattatgatatggatcctgtcccagaattactgcctttacattatgaagcggtgtcagatgaaatgcattgaagatatcgtctgccggcggaaagatctgtcttgttctgtattcctcatttactgtctcaaataatttcttataatatggctttttgaactcttctttcagagcgtccagccagtcattattgattgctgccattgtcttttacactatcctttttatttttttatcctcgctgtcatacagactgcaaactacagacggacagatacaccttttcctcttaaatattcttttacttctctgatttctagttctttgtaatggaataaagatgccgccaacgctgcatctgcttttccctctgtcagtgcatcgtagaaatgttccagattgccggctccaccggatgcgatcaccggaatacttacttcttctgcgattgctcttgtaagttccagatcatatcccgctttcgttccgtcgcagtccatactggtcagaagaatctctcccgcaccaagtttctccacttttgctgcccattccacagcatcaattcctacatcgatacgtccgccattcttatagatattccatccgcttccgtcttctcgtttctttgcatcgatcgccactaccacacactggcttccgaacttttccgccgcttccgaaattaaatttggtgtattgatcgcggatgaattgatagaaatcttatccgcaccctctctcaggagagctttaaaatcatccactgtacggattcctccacccaccgtaaacggaataaacacattttccgctactttgcggaccatatcgacaactgtaccccgcgcatccgaagatgctgtaatgtccagaaataccagttcatccgcccctgctttatcatatgcctttgcaatctcgacaggatctcccgcatcccttaaggatacaaaattaactccttttaccactcttccgttatttacgtccagacatggaataattctttttgtatgcattgccttgtccccctataattccacaaagttctttaaaatctgaattcctatatcactgctcttttccggatggaactggcatgcaaacacatttccctgttctaccgaagcatggatatgtgtactatactctgttgttgcagtcacaatgccttcatcctctgctttcagataatacgaatgtacaaaatatacataggaatcttccggaatatctttaaataatcttccgttattttggaattttagtgagttccatcccatgtgagggatcttaagtccttcctgatccgggattcttaatatctctcccttcaagatcccaagaccttccacacccggagtctcatcacttcgttcaaataataactgcagtccgaggcagattccaagaaatggcgttcctttggctgttacgtctctgattacttcatcaagtccatactgtctgagttttcccatcgcatctccgaatgctccgactcccggaaggattaccttatctgcattcatgatcgtctctctgtctcttgtgattgttacttcctgtcccagaagctgcatggctttttccacgctctttatatttcctgcatcgtaatcgataatcgctatcatctcgtcatcctgcctttcgtgtgatgtgggactctccggccattcattccgtgcccattatcttttattgtacatcaagttcaaaccagaattcaactccattatcataattctttactccatattcctgatggaaagatttcataatcgcttttacaatagaaagcccgattccattaccgccatattcgcgtgtatgcgctttatcgactttataaaatttatcccagatatgtacgatatctgcttctggtatcggagttccggtattaaatacggatacccgtactttaccgtctttttgaaccatttttacctctatcaccatatccccgctgacatgatgacatgcattgctgacataatttttcacgacctgctctactttaaattcgtctgcccatgcatagatatcttcttctgtatgcaggagaatttttgcacctgcctgatctgccatgatttccatactctggagcacgcctcttacaagtgctgtaagattaaatctgtcaaacacaatatcctcatcgccgaattccagttgatttaatgtcagaagattcttaaccatctgattcatcttggaagcttcatccatgatcacctcacagtagaattccctgctctccgcatcttcattcacaccctcttttaatccttcggcatatccctggatcagtgcgatcggtgtctttaattcatgcgatacatttcccagaaactcatttctcatcttttccagcttatctttctgttcaatatctttctgcaggctgttattcgccttcttgagctccgaaattgtactttccagtttttccgacatccggttaaagttctcaccaagttccccaatctcattacttccaccactggtatatttcgcatcaaaatcaagatctgccatacggtctgataatcttgccagttcgcggatcggttctgtgatacgttttgcaaaataccagatcagcaggatagatacaaccatcaaaatacttcctatatataataagaaacgattcgatatcgccgcactctcccgcatactttccaccggacttctgagcaggaactgactgccatcatccaagcttccccacatatctacataatagttctgattccatggatcccatgactgattgatctggtaaacttccgtggaatccaggattctgctttctttctgtgcctgattcagaaaatatcccatcatctgattcttcagcatattcttatcatgcacatttgtatgtacatcattatctttttctatgaccagataagaaatattattcttttcagcgaaatgaataagtgaactatttttccttgcactgttccacttatcttcatttgatacattattcagcttttcataaagctctataaaacgggattccttcttactgatataatatggttccagaaatttgccattgatgaacattaatgtcactaccaggcagatcagcagtcctacaaacgccatgatcatctgcgtcttgatcgaatgatgcctgtttttgatctttgcttttttttcttcacttatgattttcattcttcatcaacctcaaatttgtaacccatcccccagattgtcttgatataatttcctttttctccgagtttgcttcttaacttcttaacatgtgtatcaatggttcttgcatctccaaaataatcgtaatcccatacattattcaaaattttctctcttgataatgcaatgccctgattctcaacaaaatacgtcagaagttcaaattctttaaagcttaattcaatctccttatcatcaatcttcacctgatgtgccgctttgtcgatcacaattccgccggcattgatctcattactctctcctattacattggctcttcttaagattgcattcactctggctaccaggatcttcggactgaatggttttgagatatattcgtcgacaccaagatcaaatccctgtaattcgtctctctcttctgatcttgcagtcagcatgataatcggaactttggatgactggcgcacttcgcggcatacctgccagccgtccattcttggc

SEQ ID NO: 2855 - DNA, 16785 bp, Unknown
  gut microbiota DNA sequence
tctgactctcttagtgtttcttatggtatggaacctgaacaagaagccttatctattgtttccttcaaggaccgagaggccgcttccccgttaataaattaaatcccaattacgcattcatcttcaatatcggactgatttttttataaaccaggaacacgatcaaagataccagtatacctttcagcagattgaatggtccgactgccagtatcacgaaagtcttaaggtctgtgatatgtttgtttacggcagttcccattccaaccaggccatcgatcggcataccgaatgctttggcatatgccggtagtaatacgaaggcattcaggaaacatccgactactgtcatgaatacggttcccgctgccattccggctactgctccggttctggtatgtttcttatggtagatcaatgcggccggcacaaccagtgaacagccgatcaggaagtttgcgatttctccgactcccgctgtcatagttccgttgattgcaaagttcagtaagatcttgataagttctattgccgctccggcgagtggtcccatcgcaaagcttccgatcaggatcggtacttcgctgaaatctatctcatagaaggacggggcgaacggaagcggaatttcgaacaacatcaatactgttgcgattgccgacaacataccaatctgtgccattgtcctgattttatttctgtttttttcattttgtcttgtcattacttttgtactcatctttctttctcctttaaattgaattatattctaaaggaagaaacttcttattttgaaccatacgatattcacattgcagacaaaaaccccgtcacccaaaaaggcaacggggcaatcatatcatactgataattctgtaaatatcatatcatccttctctcatccagactttactgtcggttccggaatctcaccagatcggctaatcatcatatatataacatctgtccagatatctctgaccagaaattctccaaatgaccagttcgcggactttaccgccggttgggaatcacaccctgccccgaagaatcttctttcgtcctatattatagtacggcatatccgtccatgcaaccattattttgtgctcatctcacggatcagttttctgattggaagtacgaatgtcggagatacggacaattcatcgattcccatcttaaggaatgtctctgtcagagtcatatctgctccaagctctccacagataccaacccagcatcctgccttgtgtccgttctcgatcgtttgctggatcatgcggagcactgccggatgatgtgcatcgtaaatgttgtcaagcttactgttctgtctgtcaatcgccagtgtatactgggtcaggtcatttgttccgatactgaagaagtctacctcttctgccagaagatcactgatcatcactgctgccggtgtctcgatcatgataccctgttcaacttcaccatactcgattcctttttctgtcagttctgccttgatagactctacgatcttcttgatctcttttacttcatctacagagatgatcatcgggtacataattccgatgttaccatatgcgcttgcacggagaagtgcgcgaagctgtgtacggaagatatctcttctgtccagacagatacggatcgcacggtatcccatagctgggttctcttcatgatcaaggttgaagtaatctacctgcttgtctgcaccgatatccagtgtacgcacgattactttctttcctgccatgttctctgcaaccgtcttgtatgcctggaactgtgcttcttcatccggatagttatctgcttccagatataagaactcacttctgaacagaccgattccggctgcatcattggcaagtacgcttgcaacgtcttttacgccaccgatatttgcatataatttgatgtgttttccatctacagttacgtcttcttttccctttaattcctgaagaagttctcttgctttgatgtcttcttctttcttttcctgcattttctttaaagtttcttcatccggatcaatgtaaaatgttcctgtgtaaccgtctacgactgccatctttccgttccactcttctttaatatcaacttcgatcaatgccggaatgttcatggttcttgcaaggattgcagtatgtgagtttgcagatccaagtctggttacgaatgcaagaagtttctctttgtccatctggacagtctcactcggtgcaaggtcttctgccacaacgatcactggttcatcaccgatagctccgccgctttcgttgccacttaagatatttaccatacgttcggaaatatcttttacatctgcagctcttgctttgaaataatcgtcttccatctccgcaaacatttttgcaaagttatcgcctgttgtagcaacggcaaattcagcatttacctgctgtgtctcgatgatatttacaacagaatcgatataatcatcatcctccagcatcatctggtgtacttcaaatacagctgcgtttgcttcgccgacttcttttaacgctttttcatacagtccctgtaactgctctgctgcctttgcacgtgcatcctcatatcgtttgatctgctctgcagtatcttctattttcatacgttttacaggttgttctcccttctggtagaacaatatttttccaattgcaattcctttaaatattgatttgccagtatatttctccataaatgatacctcgtccttccttcaatctttgttaacattctaactcacaatacctgtaaagtctagtttttcgtaagattcaattcgtcgtaacgcagcttttccattgtaaatccgcgtcctcttacctcattgatctgcgtgatcgtgataaatgctttcggatcgatctcctgaatcgcctcttttaccgaatacagctttctgctgtggataacacataatacgccctgctgcttctgctctccataaccggtctcgatgtctaccatcgtcactccggcatcaatatccgttaagactttctgacggatttctctgtatttgtccgaaattacaaataactggatctgtgacttcccaagaagcatcacccggttcagcacaaccgtacttaaaaacaaattcaaaataccatacagtatctgttccgaatctgaaaacagcatctgaaatcccagcaccgaaaaatctacgatatacaagaataccgctaccgggacatgaaaccatttgtgtaacacaagtgccagtatatcggttccaccggtagaagcacctactcttaccaccagtccgataccgattccaaggagaacccctccatataatgccgcaagcatagcattattctccgtcactttgtctattcccggaatggactgtgccatcgacaggaatattggataaataaaggaactgatgatcgttgtcaatgcaaacttctttcccaaaaatactgcaccgagaacgaacagcaccgcattgatcgccaaaataatcatcgataggtttacctgaaaataatggctgatcgtaagaccgataccagtcgcacctcccataatgatcccattcggcacgataaacgctgccacagcaaacgacaatacaagattgccgaccagaactcccagaatggttttgattattttttcccaactttttttcatgtgctccatcctctctccgtactttctttcccggattatgaaattcctttcatcgtaagctggatcctcttcttcttaagatccacgctcatcacttttacatccacgatatcgccaacgcttaccacttccagcggatgcttgatgaatttcttatccgtgatctcggaaatgtgtaccagtccatcctggtgcactccgatatctacaaacacaccaaagtcaatgacatttcttacggttcctttcaggatcatgccttcctttaagtctttcatatctaagacatctgttcttaagatcggtttcggcatttcgtcacgcgggtcacgtcccggtttttccagttctttcacaatatcccggagggtgatctctccaatctccagttccccggcaagtcttgcatagtctttgatcgtgagggaaagtccggttagctttcctccgctgatgtcttccactgaaaatccctgtttcttcagcagtttttctgcagcttcataggactccggatgtacactggttccgtctaacggattcgtaccattctggattctcatgaatccggcgcactgctcaaaggcttttggtccgagttttgcaactttcaaaagctgctttctgtctgtgaatcttccgttctcttctctgtatgccacaatattcttagcaattgctccggatattccggaaatataagaaaggagcggtgccgatgccgtattcaggtcaactccgactttatttacacagtcttccacaacaccggataaagcttcacttaactttttctggttcatatcatgctgatactgtccgacaccgatggatttcggatcaatcttcacaagttctgccaacggatcctgcagtcttcttgcaatggatgtcgcacttctctgtccaacatcaaacttcgggaattcttccgatgcaagcttacttgccgaatatacggaagctcctgcttcatttacaattacgtactgcactttctgcggaatctcttttaataattctacaatgaactgctcagattctctggatgcggtaccatttccaacagagatcaatgtaatgttatatttttcaataatctttttcagcaaatctttggatgcctggatcttcttcggtgtcgtcggcgctgtcggatagattactgtcgttccgatcactttaccggtcggatctacaactgcaagtttacatccggtacggaatgcaggatcccagccaagtacagtctgtcccacgatcggaggctgcatcaggagctgatgcaggttcttcttaaatacgctgatcgccccgtcttctgccttctcggtcagatcacttcggatctcacgttcaatggccggtgcaatgagacgcttatagctgtcctctgccgcctcttttaagattggtgtggtatgcggattatcactgtggatcatcttcttttccagatatcttaagatgtcgtcctgtggtgcctcaatcttcaccgtaagaaacttttctttttctccacggttcagtgcgagcactctgtgccccgcaagttttgtcaccggctcttcaaaatcatagtacatctcgtatacggactccgctttttcatcttttgcctgtgagattactttcccgtgctgtatagttgccttgcggatccagcttctgtaatctgcctcatctgataccgactcggcgatgatgtcttttgctccatcaattgcttcttttacggattttacttctttctccggattcacatattcttctgcatacacttctatcggtttctccgctttttgaagcgtgatgactgctgcaagcggctccagtcctttttcctttgcgatcatggcacgtgtccggcgttttggacgatacggacggtagagatcttctaccacaaccatcgtctctgctgccagaatctgcttttttaattctccggtgagttttccctgttcctctatacttgacagaacctgttctttcttttcttccagattgcgcagatataccagtctctcatacaatgttcgcagctgagcatcgtccaatgttcccgtgacttcttttctatatcttgcgataaacgggatcgtattgccttcatcgattaattttaccgccgcatcgacctgccatcttttgactccaagttccccggtaatcacctgattaatatccatatgttttgtctttccctttcttgccgtattcaaagaatttgtacttctttattacgcggataattataactgaattccccactgtatgcaatggcgtctataatacagagttcactctgttttcttgaaaatatattttctctatgttatactgaagctacttgaacttatcagaaaaacagaaatacttaaaggggcttttacttatgaatcaggaaatacaaggactctcaaaacaacaactcaaatccagggaaacacgtgccaagatctttcaggcagccaaacggatcctgcaaaagcagggttatgagcagctgtcgatcaagaatatctgcgaagaagccggtgtctccaatggaagtttttatcatcatttcaagacaaaagatgatcttctttcttattatattgaagaacagccgagtatggatcctgatcttcttgatcttccgtccagtgctgccgggacaaaagaggcaatcatctcggtttacttgaattatgttcactactgcgaagagctcggagttgaatttatggccaattactatacacctaagaatcagtccctgaaccctttgatccgtacggaaagaccatatccgatcatcaccgttcacgattatctgaaacgcgtaattgatgccggaatcatttcccctcctgccaatctggaggatatcacaaccgacatccgtatgatcgtaatcggaaatgtatttgagtggtgtttaaagagcggcgatgctgattttgagggcaatatgcgccgttcccttactacttatctgaacggattgttctgatcattttgaaatctatgaatttgcaaaggatgaatacggtatgtacacgtttattgccaatcccaatgccagatccggcagagggattcttctctggaaacagattgaaaaaattttgctggaaaaagaaatcgcatataatgttttatttacgaaatatcagcatcatgctacccgcctggtgcatgatctgacttccgacggtgctcctcatacgattgttgtcctcggaggagatggaactttaaacgaagtaatcgatgggatcagatatctggacaaagtaacactgggatatatcccgcttggttcaggaaatgactttgccagaggtctgggacttccgacggacatccacagtgctctggaacagattctttctccttcgcattacactgccatgaatgtcggtgtactggattatgaaaataaacaccggcgttttgccgtaagtaccggtatcggctttgatgccgcagtctgccatcaggtaatggtcacgccgctcaaagcttttctgaaccgtctgaaacttgggaaacttacctatctcggtgttgcacttcataaactgcttacattaaagccggtcacaatgactgtcacaaccgaaaccggtgaaacaaaaacctatcacaaagtctattttacagcagttatgaatctgaaatatgaaggcggcggattcaacttctgtcctgccgccagcgggaccgatgacagactggatatcatcactgtctcagaactgacacggcttaaggttctctgcctgcttccgacagcattcaaaggatggcatacccgtttccgtggaatcactctggacacctgcacagaagtcacgatcaccagtgaccgcgcactgcctgtacataccgacggcgagccggtctttctgcagtctgacatccatgtacatctggaaaaagagaagttacgtattattacgccttgtaaataattctgtacacagggaggttattttatgcgtttactaattgccggaattattatatttttcacagcattctacttttatctgatctggccgaggctgtcccacaaacaacagatccgcccatttctccatactatgttcgcacaccgcggataccactgtattgaaaagggaattccggaaaattccctttcttctttccgggctgcaatctcacacggatacggaattgaactggatgtacatctgtcaaccgacggaaaacttgtcgtatttcacgatgatgatctgtcacgtatctgcggacgcccggaagcagttgaggtacttccgtcaaaagaactgcagcgctgccggttacaggataccactgaaaccatccctcttttttctgaggtactttctctggtaaacgggcaggtgccgcttctgatcgaacttaagattccgaattcttctctcagtatctgtgaaaagacattggaagccctgaaaaactataacggtccttatatggtgcagtcctttaacacacttggcatctggtggttccgccgccatgcgccacatgtcctgagaggccagctttcttccaatctgactgcagacaatcttccggaaccatggatactgacttttattgtaaaacatctgatcggaaatgtactcggacgtcctgattttatctcgtataaactcgcagaccttccgagatttgaagtatggtttttaaagcacattctgcatcttccgattgctgtatggacacttcgtacaccagatgcgttaaagaaaggaacactttcttacgacatgcagatatttgagaaaaagaaaatgtattattaattttgttaatattccatgaacattattgttgattcatttttttcatgttataatgcgctttgaaacgagataagataataacaaaggcttaaaaaggggtagttcatatgaaagccattgataaagcaaagagttttttgaagaagtaccgtcatgcatgggtattatcatactttctgatctatatgccatggtttgtttaccttgaaaagcgcacagatgtacgacattatatgatacactctccaattgataatcatattccgtttattgaatattttattatcccttatttgttgtggttcatattcattgctgtgactgtggcttatttcctgattaaggataaatggggattttacagactatgtgcttttttattttcaggtatgacaatcttcctgatcatatgtacggtctttccaaatgcattaaatttaagaccaactgtatttccacgagacaatatgtttaccgatatggtaaaagttctgtataaaacagatacaccgacgaacgtgcttccaagcatccatgtattcaactctatcggtgcaggcattgccatctcacatagtaatgatctgaaaaagcacagatggatccagatcagtgcctatattctggcaacgctcattatcctgtccacaatgttcttaaaacagcattccgtgacggacgtgatcgcagcggttacgatggcatgtattatttatccattcgtgtatgtgacagcggataagacggcaccgaagctttcccagcagccgacgtaatatgaataattatgaatcatatagaaagatgcaggtaactgttatataactgacagttatctgcatctttttaatttccattgtttttccgatcactaccgttcaatccccgcataccctgtgtacttttcaaacgccgacggaatcgaatactccttcctgatctcttccggatgaataaacagaaatcctttctcattcgtcttctccagctcatctacgatcacctcatatcctgtcatgtgccattcgatatgactgaagatatgctttgcttccggaagttcctgcacacggaccggcatcagaccgatcgtcttgctatattccgtaacttcgtccatcgaaagcttaccttccacattcggaaattcatacagtcctgccagcagaccttttgccgggcgcttccggattgcaatctgcttaccgtctttgaatatcagaatggttctttcttcgatctttctggcttttgcctttttctttaccggtatctctgtcgttagattctccttgcacgcaatacaatattcttttaccggacattcctcacatttcggttctccgttcggcacacacacgattgctcccagctcgatcagtccctgattgaaatcactggcagcatcggatggtatcacctgttccagtgtgtgttcaatcttcttacggacactctgcttcatgatatcttcataacttccagtgatcctggaaatcacccggagtacgttaccatccactgccggcttcgggattccgtaagcaaatgcgctgatagcccccgccgtgtaatttccgattcctttcaattgcagaatttcttcataagtattcggaaatatgccttcatgatcaaccatgatctgctgtgctgccttctgcatattcctgacacggttataatatccaagaccttcccatagcttcaggagtttatcctcttctgcttctgcgagatccttcactgtcggaagtgcttttaaaaagcggtcgtaatatccttttacagcttccacccttgtctgctgcagcataatctcggatatccacacccggtatgcgtccgggttatggcgccacggaagatctcttttattctcgcggtaccagtccaccaaaggctgtacaatcttaacaaggtcttcatcttttttttctgtatttttcattttctattgcttccccatttattttactttctcgaacatatgattcattataacttatcattctatacaacgtcaaagcccttttcctggaaatgtcgtcccgatatcgacatcctcaggaaaagggctttaagagaagggaatgtggctgatccctgccactaacaatattatcgtttgatattattatattcctgtttcctctatatttccaattggttattctcatatatttatagaaagattctatatattttttaagctgattcttatttctttgctctatagagattatctattccagttgtctttcatcggaaaaagcaattggaaaatttaatcagaaaagtctatactattcatagaaaataaatatgaatatttaggaggtattcggtatgtcaattacagctgaaacagcgaaagcgcatgcaaatgatcctgccgtattatgctgtagagcagaaggcggaattacaattgaaccggcaaacttagaggatcctgcaatcttcgatgaattagtagattcaggtcttttaaatcttgacggatgtctgaagatcggacaggttcttggggcaaaattaacaaaaacaagtgattccctctgtccactgacagcagataacgtagaaggattcaaatcagatgacgatttagcagcagaagaagctcctgctgaagaggaagctcctgccgaagccgcacctgttgcaagtgttcaaggtgctgttactacaattaaacatggtaaagtagtcatctctatcaaagaaggaaaagatatttatcttgaacttcctatctaatttgaagagaacctatgaaagtatacgaatagcaaagggcagatatcattatacagatatctgccctttttatttccgctcccagacaggatactctctattcttctctgtccgctgcctcttcaacttcttccatccagttcattcttccgtaacgcaatgtcactgcatagatctctttctgtaatttcacagataactggttcttgcggattctccatttccagttggttccgaccgttgacggtgtattcatacggcacttgttatcaagaccaaggtaatcctgcatcgggatcacgcaccattttgcggcacttctcatgatcaggctgatcaacggcttattcagttctgcttccggtgtgtacgtatcacagagatactcgcgggtcagcttctgctcatccttactgatgcttccccaccagcctgcaagcgtctcattgtcatgtgttcctgtataagcaacactgttcaccggatagttgtgtggcagatagtcattcgcacatcccgaatctctcgagtcaaatgcaaattccagaaccttcatacccggaaatccactgtcccttaccagctcacgtacactgtccgtaacgtatcctaggtcttctgcgataactggtttttcacccagtgcttctcttactttccagaacagatccatgcccggtcctttttcccagtgtccgtctaccgccgtctctgccccgtatggaatagagaaatactcatcaaatccacggaaatgatcgattcttactacatcgtacaggcggaacacatatgccagacgagatatccaccactgatatcctgtttctttatgatatccccagcggtagagtggatttccccataattgtccggttgcggagaatccgtccggcggacatcctgcaacagcaaccggtacattttcctcatctaactggaacaattccggatgtgcccaggtatctgcgctgtccattgcaacatagatcgggatatcaccgatgatctgaatgccttttttgttcgcataggtttttaactgcatccactgttcatagaacttgaactgcatatactgatggaattcgatatcaaaatacagttcttcacgataataatccatcgcaggtccccagcgcagcttgatatcatctgcccacaatttccattccacgccgtcaaatctgtcttttactgccatgaataatgcataatccgacagccaccagctgttctcttttacgaactgctgatacgcttcattctcatgtacattacttctttcgtaagcttttcgaagaagcggataacgtccttcgtaaatctttttataatcaatactcccttttacttttccccagtctacagcttcacattctgcttttgtcagaacgccttcttccaccagtgcctccagactgatgaaatatggattgcccgcaaatgttgaaaaagactgatacggagaatctccgtagcttgtaggaccaagcggcagaatctgccagtaactctgtcctgctttttttagccagtccacaaattcatatgcactctttgaaaaacagccgattccgtattccgatggaaggctgctgatcggcatgagtatgcctgctgctctttcgctcatctttttccctcttcttttctgtttattttgattttcataccgtcatctttttcttctgccagcagataggtatctttccgtctaccgggcttacaatcttaccatctgccggaataattgcgactccgtcacctaagactttctaagaaaataccgaatccgggacttcacttaacggcactgcctttccggttaacggtgcaagaattacttgtggtatatttttactcttatcctcgttcccaaggaaacctcctcatgttttcttattacatttatttatgcaaccgtttgcgttaattatagtcagatttcgcataattttcaatgtattttcgtttataaaatgtaattctacctttttcacaatttaatctttccttttttgtgcaatccctctatataccaatgcatacgtttgcattgcatttccgcaattcaattgcaatattgatttgtttgctgtaaaatataagaaaaatccaaaagctacgaaaatataattctaacggaggttacttacatggcagtaacaattaaagatgtggctgcgctggcaggtgtatccccttccaccgtatccagaacctgcaaaaataatccttctatcagcgaagagacaaaagaacgtgtcagaaaagctatgatagaacttggatatgaaccgaattttcaggcaagcaatcttgcttcacagaattcacgtacgatcggcatcattctccctgcttctgccaaagaagtctacgagaactccttctatctggaggcagtccagggaatcagccattactgtaacggcagacagtatatgacgacaattgtaaccggccaggatgaagctgagatccttgaagcagtccgctctatgtcccgaagcggcaaagtagacggtttcatcgtactgtattccaagaaagaagaccctgttatcgattacctctttaacgaaggtcttttatatattcttatcggaaaagcaacacagtacaccaatcagacgatctatattgacaatgacaatctgcttgccggccgggaagcaaccgaatatctgtaccagctcgggcaccgccggatcgcctatctcggttccgacagttccctgatcttctccgccgaccgtaaggccggttaccagcttgcactcgcaagccatcagcttcctgtccgtccggaatactgtgcggaagtaaaaaatgcatcagagaataatgaagaagccatacgcggacttctgctccaggaagaccgaccgacagcaattctggtcagtgatgatatcctcgccgtctctttagaacgagtctgcctggaagctcatctgtccatcccggaagatctgtccatcatatctttcaacaactctctgtttgcaagactgacctccccgcaattaacttcaattgacatcggagccggtcagcttggaagtgaagctgcctcccagatcatcaaccacatagaaaatccagatctccccgcaaccaagatcatcgttccccaccatctgatcgaacgagacagttgttgcaaagtatagtttgaaataaaaaaggaaacatatcatgtaatatctttctgaccgcacagcgtgagaaagcgtttacatcatatatttccttttttcattctgcattataaaatctttgataaaaattcctgcaaccgcggatccttgggattgtcgaagaattcatctggttttgcctgctctttgatctgtccggaatctataaagataaccctggaaccaacctccttggcaaatcccatctcgtgtgttaccacaaccatcgtcataccttctcttgcgagctgtttcatcaactccagaacttctcctaccatctccgggtcaagagccgatgtcggttcatcgaacaggatcacatctggatccattgccagggaacgcacgattgcaattctctgcttctgacctccggataactgggatgggtaagaatccgccttctcggcaagtcctactctttccagaagttccattgctcttttatctgcctcttccttgctctttccgagaagcttgatcggagcaagcgtgatattttccttgatcgtcttgtgcgggaataaattaaaatgctggaacaccattcccatcttctgacggtgcttattgatatccacatgtttatctgtaatatccacgccttcaaaatagatatgtccctgatccggaacctcaagaagattcagagaacgcaggaacgttgacttaccagaaccggatggtcctacgacaacgaccacttctcccttgtgaatctcttcattaattccattcagcgcatgaaaatctccgtatatcttgtgcagaccttctactttgatcagcacatcatcattcttagtggtcactgtttctcaacctcctctccagtaagctgacaagcttggtaaagatcattaccattgccagatagatcagcgcaacggcgattagcggcatgaatgcatcatatgtacggctccggataatgtccccgcccttcgtcagatcctgtaacgcaatataaccggatacagaagtctctttcaataaagaaatgaattcattacaaagtgtcggaagtacattcttgaatgcctgcggcataatgatgtacatcattgtctgagcataattgaatcccaggcttcgtcccgcttcaaactgtccgttatcgattgacatgataccggaacggaaaatctccgcaacatatgcacctgagttaataccaaatgcaatgatcgcgaccagtactttgctgatgtccacacttccgaatatgataaagtaaatgatcatcagctgtacaacaaccggagttccacgaatcacagtcagatatactttacagattgcgttcagaatctttaatttaccggtcttatcatgtgttgtacggacaattgcgatcaagaatccaagtactacaccaatcaatactgcaaatactgtaaccaacaaagtgatcttcagaccatctgtaatatatctccagcggttatcttctataaaattcgaaataaaactacttttcaattcctgcatgttctcatcctactcttctggattatttcttaacgatgatcatctgttttcctgtgtaataggaatcagaaaaatctacctgtttctctctttcctttgtaacagtcataccagccgcaccaaaatctgcttttccgctgtcaactgctgcaatgattgagtcaaattccatatcatttacagtaagttccataccaagtttatctgcgattgcctgtgcaaagtctacatcaacaccaacaatcttgttatcttcataatattcatatggctcaaatgcagcatttgttgccattacaagtttaccattggaacggtcagcatctgccggagactcatatcctttatcttctgttccatcgatataatatccgatgattttgtcaaatgttccgtcttctttcagttctttgatcgctgcgttgaatttatcttccagctctgtgttgccttttttgaagcacattgcataatcttcttctacataaggtgtctcgaggatcttcagtccgtcatttgcatctacaaatgcttttgcaggctcgttatcaataacaactgcgtcaatcttaccttttacaagtgcctgaactgcatctgcacctttattaaaacgttccacatgatcatcaccgaaatcatcagagcagtagatatcacctgttgtacctgtctgcacaccgatctttgcatctttcagatcatctgcgctttcgattttttttgcttcttcttttttagaaccacatgctgccatagagaatacgcatgcaccaaccagcatgacactgataactttttttaacttcataatctttttcctccattcttttcaatat

SEQ ID NO: 2856 - DNA, 4634 bp, Unknown
  gut microbiota DNA sequence
tgtcatcctgtggcgaacgatacaccggtgagagccagattgcatctattccaagttttttcaaataatccagtctgctgataattcccgagatatcaccgattccatctccgtccgaatcttgaaagcttttcggataaatctgatatacaactgcatttttccaccatttattcttattttccatactcaattttgatatctctccggcaaattgtatgattctaccgggatatcctctcctttctttattttctctaaattctgtcccagttctattccacatttcttctttacctgagcgatataaagattagacaccttcattccacctcaacattatcatccggcttttatttcagttgggacaaaagaacaaccgtctctacatgtgttgagactaacatcggaacacacaccctttacctcgtcacttatatcggaacacatttttttcactttgtctccaatacctgatgacttcccgaatctttcttttgcgtttccaatttcattcttaaatcctgttttatatatgaaagtaattttataagaatctttgtttccatcttcgtctagtccgccgactattactttttcaactatactctcaaatattcctctgtcaaattcttctagcacctcattatgcgatagtgcttttttgaaatctgaaagcctcctttgcaatgaactcttttcatccgactgttgctgcagatattccagctttgctcttgtatttgtcagttcagtttttagttctacatccgtttcctcataaatatcctgttcaataatgcctttcagataattatcaagtagtttttttctctttaaagaaaccttgtcaatgcttttcttcagcttatgtaactgatcttcaatcgaattttctccaagtgctttctcggttcgcttcaaaaattcttccagaacatctttattatcattacacaacatcctataagactcaataaatgcttcttctatgacctgctctggaatgcctttgctatccggacaaaatctctttccttcttttgttgatttaacgcactgccatatcgtctttttatacttagagctactgtgccatcgcctacgagaaagattagagccacagaatccgcattctaccatacagctaaacgcaaactgccgactaaatttttcacgttttccaggagtgactccacatttccgatttccgtttctacgtcttctcatctcctgcgcccgttcaaattgttcctctgtaatgattggttcgtgatgatcatgtatataataccgatcttcctctccaagattttctaagcgtctttttgaaatcggatcaaccgtaaaggtttttccaagtaaaatatctcccttatatttttcattattaatgattcccataacactggatgaagtccagggatttcctctaattgtcagatgaccctgctcattcaattccctggctatcattgtgctgcctgctcctgccacatatctatcaaaaatgtaccgtacaaccacagcgccttcctcattgattgagatagattttgtttccacatcataatcatatcccaaacaaccctgaaatcctaccagttccccccgcttcattttcatcttcaagccctttttcacataagcagaagtattttcaacttcctgctgtgctacagaacttaaaatagtcattagaaattcgccgtcctttaatgtgttaatcttctcaacctcaaaataaacagcaatatttctctctttcaacatacgaacatatttcaatgtgtccagagtatttctggcaaatcgtggaaggcttttggcaataatcatatctatcttgccatccatgcaatcctgaatcaaccgctgaaactcttctctcttatcaacctttgtcccagtgattgccttatcagcatatatacctgaaaatatccattctttattattcttaattaactctgtataatgcgtaaccattgagttataactctttatctgatcttcatcgtccgtacttactcgacaataagccgccactctcaaccgctcaatcttccgtctggcagaaccgtcaaatgaatcatgtgctttaatcaattcaacttccatttcgccctcctttttgtgttcctaccatagcgttgattatattataatacaatacagatataccgtcaagcagtaatgttggatacgataccataatctttcattaatcttttttgtattacctgatattcagtttcattaatcaacttcttagaaagcaactgctttaacatagatagctgcatactatatctcaatatttttttattatccatatatatcagatacccctttctaaataatactctcctgcaggcggctgccgggcacagcctcattggtatcacaccatcctctcggaccgaagcagcttatctccggaagtttcattatcagaaagcagtatcttcgcacaaagtccccgttactttgcctgtgatcggatatttatcgctcgtgcctttacttcaatacccaaactggcattccttcgctctcaatgtccggcaactttgcgccacgatgtcgcaaagtaccagacacaggcagtcatggcgtatccatcacacagctccactgttttctgcgtcctgcaggaaaaatatgaaattgtcaaggtacgccaactctcattacttttcacatggacaaaaaggggcaaattcccatgttcaaaagtattaaagctgtattttaaatcccaatatcttcgtgatgagtttagtttccatccggcgcttcatatattcatcaattccatatcttgttcgcccgctctcatctataaactttctccgacatctactgttaatgtagggctgaaaataatcaataatctgatttattgctacagcatcgcctccaatggcatcctcaatcacttcaaatgcaatttgctctttcttttttctgtactgcatatgtatcactccaataatttctttaataatcgcagagaatccgctttatggtaatgcacagtactctgtacaagattcatacattctgcaatttctttttccgtcatatccagaaaataagacataagaattatcttccgtttcttttccggcagacggtacagtgcttcactgattgcttcatccttaacaggcacttccatacccataatctggaaatatcgaattttcataaattcgtcataagaacaaaacccgtctaggatttcttcccgaagttcagagaaattgatttcccgctcccagatcttgtccatttcatccaaataattcagtgcttcaccatccagcactttaatgcaatacctgataaattttctttgcacaacagctttttccagtcttgtcagattcaaggggatcacctcccctctgcctgaaagctattttcgaaaacatcttattgccccctttgtaacgaggacagtcaaaattttaaaaaaaatcgaaaaaacaagaagaaattttttaatgtttccgtatataaaaatgcgcccatatgagccattgcccatcggacgcactctatagctgtttcagttaccacccacattttaatacaactatgtatcacagacataaaaaaacgggaataatatcgctatcactcccggctatacacatttttttcaattttaaattttaatacaccaatacattgagaaatcaaaaccaataaaactgtcatagcaaccaaagataccatttctaaaaacctgccaagcgtacagaaaatagcaaaaacaagtatcccgcttatggttttctccgtaacttttttacaatgttctttctcattctgatcaagttcccggttgatattttctactggtgctaacatccaaaccatgctcagacctactacaatacaaatccatgagcaaattacaggaaaagtaaacttactgtttattactaatatcaacgtctgaacagaaaccgaacacaagaaacatgctccaaatctattcagatgcaaaccaccggcataagttctcaacagcataaaaacaatagtaaagactacaaattccggaatcatatgcaaccatatcgctatacagaagcatgtcagaaaacaacttaccatttcaagtcctatctgaaatccatactgatatatcgcatatgattcctcggaagctgcaccggttttaataacataatctgttattttctccgataaatatttcatatttatttttcctttaatgctttaagttctttcggcattttaggctgatggaaaatatatgcgcaggcgctgtctgccgatacttttccaatcttcaaagatgcacttgccaatgctttggcggactgcagttttaaatcttttgttttcatattttgaaactcctttcatttgtttttaacactttatcacaaaaaaacgcatccatttccttaatgtcaaaatatcgagtgttcatgtaacttttcccttccccacactttcagcttccatacagcactaccctggcaaggaaccgccccggctctgtggtgtcaacagacaacaccccctgatatttatccgccgccctacggacagatggcaggccgatcccatgattgcttgtatccgttttt

SEQ ID NO: 2857 - DNA, 16270 bp, Unknown
  gut microbiota DNA sequence
ggcataaagaataaaaaaaatataaaatctcaaatatcttttgaccatatatgctatagatgatacaattgaaacattgttggaatagaaaaggagtttattaattatggaacagaaagtaattgccacagttggcggacatcagattacagaagcagaagtagaggcattcattcgcagccttccgagagaacagcaggcatatgcttcacatccggattttcgtaaacagtgtgaagaacagctgatcgcagtttatgcatttgcaaaatacggagaagaagagaagatcgatgagacagaagagttcaagaatgtgatggaaaatgcgagaaaagacattcttgcgcagatggctatgagaaagctttttgcaacagtaaacgtaacagacgatgagatcaaagaatattacgaagcaaataaagggaaatattctaaaggtgcatctgtacatgcgaaacacatccttgtagataatgaagagaaatgtacagagcttttaaacgcaattacaagcggggagaaggtatttgaggatgttgcaaaagaatcttcttcatgtccttcaggagcaaacggaggagatcttggagagttcggaagaggacagatggtgaaagaattcgaggatgctgcatttgctgctgaggtcggacatattgtaggaccggtaaagacacagtttggatatcatctgattaaagtagaagataagaaagaagccggtgaatcaaatctggaagaagtaaaagaccagattcgtgcagaattatctcagaagaaacaggaagaagcttacagagctaaagtagatgaactgaagaaaaaatatatggattaatctgttaatccactaaagagataatataataaaagcaggggcatgatcattgaagatcatgcccctgctgcgtcttagatggcgatttgcgcctgttttatttggtttgcagtaatttatcaatacttacaagttttacgcttaaaacaaatattttagcagctaatttcagctcttttacagttggataagaaggtgcaatacggatattgctgtccttcggatcttttccataagggaaagtagcaccggcaccagtcattacaagaccggcatcttttgctttggcaacgattgctttggcacatccatccatagaatcaaaggaaatgaagtagccaccgcgtggagcaagccatgaaccaattccaagtccgccaagttctttgtccagtgtatttaacacaatatcaaacttaggacggagaatatctgcatgttttttcatgtgctgaaccattccgtgaatatttccgaaatatcttgcatgtcggagttggttcagtttgtcatgtccgattgtctgaatacgcatctgttttctgatatcagccaggttggcatcagatgctgcgattgctgcgataccggaaccagggaaactgatcttggaagtagaagagaacttgtaaaccatatccgggtgtccctctttcttacactccattaagatttcaatcagataatcctgtttatcttcatataaatggtgaataccatatgcattatcccaaaagatacggaagtcttctgctgcaggattcagttttgcaaaacgatgaactgtttcatcagagtaagtgatgccctgtgggttggaatattttggaacacaccagatacctttgatcgttggatcagtgctgaccagttcttctaccatgtccatgtccggaccggttggtgtcatcggaacgttgatcatctcaattccgaaatattctgtaattgcaaaatgtctgtcatatcctggaaccggacataagaattttactttatcaagttttgcccacggagtacttcccataacaccatgagtcatactgcgtgcaattgtatcatacattatattcaggctggagtttccaaagataacgatattatcttttggtacttccatcatatctgcaagcaactgtttcgcttctgcgataccatccagaacaccgtagttacggcagtcaacaccttcttcacatacaaggtctgagtcacttcttaatacatccatcatatccatggacagattcagctgttctgtggacggcttacctctggacatatccaagtgtagattctgtgcctttacatcttcaaactgggcttccagatcacttttcagctgcaataattcttctttggataattcttcatatgctaccactataccatcctccatatcatatataccattcaacattataatattttaacagaatttgacgtttcgtcaatggtttcttgcaaaatgatgagaaattatagaaaaatatgcaattcaagacttgtaaaatgaaatttttgtgaaaaagttatgcaaaaaatgtgatgtgataaagcatgcaagtgaaaaatacagtacctatccgaaggaacaatcaggaaattacggtaaaaataaaaggtgaattatacagggaagaagttgccggtggcagattccggagattagacattcacaaaaacggacagcctgtgttatgatatgctcagatgataacaaggaggaattaatatgagagacattaactgggcagtacttggcacaggcgttattgcaaatgagatggccgttgcattaaaaaagaacggaaagaatatctatgctgttggtaacagaacctatgaaaaagccgtcgcatttggtgaaaagtatggcatagggaaagtttatacggattataatgagatgtttactgatcgggatgttgatgtaatttatatcacaacacctcacaatacacataaaaaatttatgaaacaggcaattgagaatggaaaacatattctggtagaaaagtcgattacacttaacagtgatgaactgaatgagatggcaaaactggcagataagaatcatgtcatcatcggagaggcaatgacaatctatcatatgccaatctataaaaagttaaaagaaattctggaaaccggcgtattaggaaaagtaaatcttattacaatgaattttggaagtttcaaagaatacgatatgaataaccgcttttttaaccctgatcttgccggtggagcaatgttggatattggagtatatgcgctttcattcatccgctggttcatggattcaaaaccagatcagttgctgtcgcaggtgaaatccgcacccacaggggtagatgagcaggccggactgctgttgatgaacaaagaagggcagatggcaaccgttatgttatcacttcattcaaaacagccaaagcgaggcatgatctcctgcgaaaagggatacattgagattatggaatatccaagagcatgggaggcaagaattacctatgtggaaaccggagatgtagatgtcataagagcgggagaaaatgcagatgcacttgcttatgaacttgaagatatggaaaaagcaattgcaggagattcggaatgtatgcattttgactatacaaaagatgttatggatatgatgacggaattcagaaaagcatggaagttcacttatccggaagaggaatagtttgcagagataaaaaacagcacatagatatcagctgataatatctgatatctatgtgctgtttttttgtttcttagacatataaaaacgatgtaaaagaaattataaagtttctgattcaaatacaagaacttcacaactgttaagtgtaattatatcattggcaggaagagaatgctcagcactggccatattagaaagaagaatctgctttacgggatattccagcgtaagagaaactgcttctttcccgaagttggcggtgataaggattcgttgattttcagtctttcgataataagccatgaccgagctggtattctgataaacaggcaggaattcgccataagcaaatacttctttgtaagcaggagatttgcgcagtgcgatcagcttccggtaataatttaatacagaatcaggatctgtgtcctgcgtttccatgttgatttcggtataattatcatttactttcagccatggagttcccgtggtgaatccggcatttttttccgcattccattgcatcggagttctggcgttatcacggctcagtctgctgcatgcttcaagggcttctttatcggtgagcccggcatctctggcagtatgatactgatctatggtattgatgtcattatattcgtcaacagtgttccagactgcattttgcataccgatttcctgaccctgatagataaaaggaattccacggagaagaacactgattgttccgagcatcttagcacctgtgggattctgggcatagtcaggaagaaaacgagatacaccccttggttcatcgtgattttcgatgatatttgcttccaggccacatttctgaactctaagctgggagtcggtgattgctttacgccattctttgaagtctacaggtggtgcatcataccatccatgttctccttcactgagtatatgtgcactaaagtcaaaaattgtggaaaaatgaccattttcaccgataaatgcatcaagttcgccctctttcatattaaatacttcgcctacagtaaatgcttcgtatttctggaatgtatgtttcttcagatcttcaagaagttctccgacaccatctacttcgtctaccattttccaacagccggcaagtccatccggaccatccggtttgaaatccggaaagtccagatccttcttgatgttaatgattgcatcaatacggaatccggcaagtcctttttcaagccaccagttgatcatttcataaagcttttctctcagaagcgggttttcccagttaagatcgggctgttctttggcaaacatgtgcaggtagtatttatcagtacccggtaccggttcccagcagcttccgccaaagtaagaacgcaagttacttgggggattaccgtttctgcccttgcggaaatagaaataatcagcatattctccgtcgggatcggccagggctttctggaaccattcgtgctggtcagaacagtgattgatgaccagatccataataatatacatatcccttttcttcgcttcggaaagcagttcgtcaaactcttccatcgttccgaattcttccgcaattgcgtagtaatcagaaatatcatagccctgatctacaaaaggtgatttgtagattggagagagccagatgatatcaatccccaatttttttaaataatctaatttagaaatgattccacgaagatctccgattccgtctccgtttgtgtccaaaaagctttttggatagatctggtatgcgactttatcatgccaccatttttttatcataatttttccctttatatacgaaattaatttcgtaaatccctttctgttattgtagtcttctgtatgctgctttgccaaaatcacattgaggcataacagaaaatgtattatactgctattatatggggaaaaaagcctgatatcttgcagtatagtgttgttgtataacataatactgccttgtaaaagcagagaaagggaaaaagaaaatgaagaaacagtatttccatgcaccggagcaaaaagaagagacaaagcacggagagccgtactttccggttcaaaagtatattaccagactgtctgaagaatatccggcggtaacaacacactggcatgaagaggcagaacttacattgatcgtaaaaggaaaatgccattatcaggtagatctggttgattatgaagtgaaagaaggagatctgttatttgttccgccgctatttttgcatgcgatttcaaaaggaagatgtgaagaatttatttcggagacgtatgtatttcatttgaattttctcggaggtaattcaacagatatatgttcgacgcgctatctggttccaattatgaaccaggaattcgcaatgccttgtctgattacagggaaacattcggtctatgcttcacttagaaaagtctttgatcagattacttcgctttatgatgaaaatgtagatggatatgaactggcattgaaagcgttacttttgcaagcaatttttttattgctgcaatatagtaaaaaaattacaaagaaagaaaaagagcaacattctgagaaattaaaaagtgtactggattatattggagaacactatgcagaaccaatttcaatagcggaactggcagaattgtgctatttcagcgaatatcattttatgcgttttttcaaaaagcatatgaatatgacttgtgtggaatacatgaataattttagattggagaaagctgtggaattatttgaacaggggcatttatcgattattgaagtctcaatgtcagtcggattccggaatctttcttattttcatcgtgcatttaagaaaaaatatggtatgacaccacttacttttataaataaactgaaaaacactgtccgataacatattaagatcattggacagtgttatgtaatatctatgtgttttgaaaactgtcagagacagattccggatcgtcaactgataaaatttataaacttgcttcaaccagcacagctacagccagtgtgtcgtcttcagtaaatccctgtgcacaggtaaggattgtctgtacatagtcttttgaaagatcgagtttgtgagagatgacatccatatcataaccctcctgattcaattcggttacattctttacatccttgcggatctgttccattgataaatttgcgtccattttcatatatcctcctgtaaatttccggatttccttttttatactgtatttacattttgttcttaagctctaatattttatcaagcagatggaaggcaacttcttctttgctcatcagttcaagttcaaatatctgatctggtgtgatcatggtaacgatgtttgtatccgtttcaaatccggcgccttgttctttcagattattggcaacgatcatatccagattcttcttttccagttttttcttggagttcgtaagcatattctgcgtctccatagaaaagccgcataagaactgaccggcttttttgtgttcgccgagatatttcaggatatcatctgtgcgctccagtggaatagacatggtatcatcgtctttctttttgatcttttcatcagagacattgcatggtctgtaatcggcaacggcagcagccttgatgataatgtccatatcctggcttctggaagtgacttccctgtacatatctttggcagacacaattggaatggtattgacaaaaagcggtgcatcaagagcggtgcgtcctgttacaagggtaacatctgcgccgcggagcatgcaggcttttgcaatgctgtatcccatctttccggaagaatgattcgtaatataacggaccgggtcaagggcttcctgtgtcggtcctgcagttacaagtactttcataccggtcatgtcttttttgcatgcaatagatttgcagatatactggaataaagtttccggttccggcatctttccggcaccattatcaccacaggccagatgacctgtggcaggtgtaatgacttccattccataatgcttcagtaattccatattatcctgtgtgacaggattctcatacatagctgtattcatagcaggagcaatgatctttggcgcacggctggcaagtacggttgttgtcagcatatcgtcggcaagaccatgagcaagcttggccatcacatttgcagttgcgggagcaaccataacgacatcagcaagctgggcaagtgcaatatgttccactttgaattcaaagtttcggtcgaatgtatcagtgatacatttatgtccggtgagagtctcaaacgtaatcggattaatgaaattggcagcgttctctgtcatgatgacatgaacatcagcctgggcttttaccagaagacttgcaagagttgcaatcttataagaagcaattcccccggtcacgccaaggagaacgtgttttccttttaacataaatattcatcctcatttctaaataatacaatcactatagctctttttattcattcttgcaagtaatagataacgatgttataatcggattcgtaattgtattgtatcccggataccgggaatgataacaaggaggaagattaaacatgaagacaaaaaaacataacaccagctggatggtcagtgttgcacttatggcagcaatcgtaatcgttctggcgaacacaccgcttggaatgatacagcttccgatcattaaggcgacaacggtacacattccggtaattattggagcaattttgttaggacctgcagcaggtgcaatcctgggcggtgtattcggtatttgttcattgatcagtaatacaatggcaccgacgcttttatcattcgcattctctccgtttatgagcactacaggaatacccggagcggttaaggcagtctggatttcagtaggatgcagaatattgatcggtgtggcagcaggatggctttggattctcttatcaaaactgaaagtaaacaatatcattgcacttcctgtcgtaggattcgccggagcaatggtgaacacgatcacggtaatgggaagtatctacattctttttgcaaaacagtatgcagaagcaaaagatgtggcagtcagtgccgtatggggactggtaatgggaactgttacggcatcgggaatacctgaggcaattgcagcggcaattctggttcttgcaatcggtaaagttctgatcggtgtatttagaaaaatgaatatcggaaatgtatagatgaaagatggaatctccggctcggataaagaaagccggaggttttttagaatatggattatataagaaaaaacagaaattttgcaaaaaaataaaaaaaatgaaaaattctgttgacatatatggaactaatatggtataaataataagcactcagcaatgagttacaatataggggattggtcaagtggtatgataggggtctccaaaacctttggcgggagttcgattctctcatcccctgctcctagaagagtcagaaatgctttgtttataagcttttctggcttttttgtttttgctggaaaataactattgacttctttaaggtgcaagcgtaaattatagtcgttatagaagaaaaaatacagataagaaaggcaaaataaaaatgaagagaaagcaaaatatcagatggaataccatgaaaattctggtaattggttttctgagtgtgattgttctgggagcggtacttttatggcttccggtatcgaatgaaaaaccaatcagcttcctggatgcattatttacatcaacaacatcggtatgtgtgacgggactggttacggttgttccgaaatatcagttcacgataatgggaaagataattttattgattctgattcagatcggaggcctgggcataattgcatgtatcacagcattctttatgcttcttaaaagaaagattacagtaaaagagagaattgtcattcaagaagcttataatatgaattctcttggtggtctggtaggcatggtccgcagaattttgttcgggacggtagtggtagaaggcatcggcgccgttttttatgcaatacaattcagtcgggattatggacttgtaaaaggaatttggtatggagtttttcactcggtttctgcattttgcaatgcgggaattgatattctcggagaggacagcctggcaagatacgtaaccagtccattgatcaacattacaacgatgatgctgatcattcttggcggaatcggatttacggtgtggtatgacgtgattgataacggaaagaagatctggcatcgtgaaattccgaagaaatggtgttttaccagacttaagttacattcaaagatagcaattgttacgacattgatcctgctgatagcagggacacttttgaattttgtactggagtaccggaatccggaaacgattgggaatctgaataccggacagaagataatggcttcggcatttcaggctgtgacgaccagaacggccggatttagcacatttcagcagtcgggaatgcatgaagagaccggattcctgaatattattttaatgtttatcggaggatctccgggaggaactgcgggtggtctgaagacaacgacatttgcgcttttatttctcgcttttcacacgatgctcaggggaggtcatgatattgaatgctttcagagaaaagtggctgaagatagctttcgtgtagcgttcgtgacatttatgctggcattgggcatatatgtaacaggaaccacggttattgctgtgatagagccggatacaatctcgcttcagaaaattatgtatgagaccgcatctgcgatggcaacagttggcctgacacaagatctgacaactcatctgagggtaggaagcaagattgtgttgatgatactgatgtatgcaggacgagtcggaccgatgaccattgcgttattatttgccggaaaggtaaatttgcaggaaaagatgcggacacttccgacggaaaagattatgattggttaatgaggaggagtaactatgaagaaacaatttgcagtatttggtctgggcagttttggggaaagtattgcgttagaattacaaaaactcggatgcgaggtcgtagcagtagataaagatatggagcgcgtaaaaggaatcgccgactcggtatcgtatgcgatgcaggcagatatcggtgatccggattttgtcagatctcttggcacgaggaatctggatggcgttgtgatcgcagaagcagaaagtctggaagcaagtattatggcaacgctggtgtgtaaagaaattggtgtaccgaatgtgattgcaaaagcaaaaaatgagcgtcatgcaaccgtattgaaaaaaatcggtgcagactccattattttcccggaaaaagaaatgggaatccggatggcaaagaatcttatgtctgccagcttcacagattggatcgctttatcaccggattatagtatagttgagacaccgatgcctgtaaaatggagtggaaaaacgttgcaagaactggatgtgcgccggaattatgaagtgaatgtcgtgggaattaaaagtggggcgcacgtagaagtgaatccggatccttcagaagtattgcgtgaagatatggttctgatcctggtgggatctaataaagcattagaagcattataagaaaattccatgtctggagatgatcctggctggtgtgacgaaggttgtaatatcggctttgcaatcataacaagataatggtataatattcatactgatttgatctgaagatacgaaagctttaccgtaaggaggacatgaggatgaaagaaaaaataatacagggtgggatcgtgaatggcgagaagatgctggtatgtccgacctgggaagatgaatttcaaaaagcaatcaacagtacaggcggctgtttccgaatcagcatggattattctgctgtagatgtttcgtggtggaaagaactggaagcgattgctaaaaaatatggatacacactggattccgaatcattggagatcattcaggaatatgtacagaaatataaaaagtacgagaatcatttctgggaatatggaaagaaaatcataacatttgaacagttcagcaggatgttgagtaaaaaggcgggaatacagccaaaagaagcaaaagactatgtggccgctaatcttcagaatctggagcataaagagattttggaggcattgttgttctcgttgcagcttattaaatccgaaaagggactggagggaacgcagtggacaaaaccgacgtgcgattttattaagaaagaatttgagaagatgattgtaaacggggaatattaagaagaaaaagtggggagtcagtcagaacgattctccacttttgatgtaaaaggagataaagagtatggaattatgggatatttatgatgaaaataaagagcgtacaggagctacaatgaaacataatgactggaatatgaaaccgggagaatttcatctgactgttcttggtgtgctgatgcgcccggatgggaaatatctgatcaccagaagaagaatggataaagaatgggcagccggatggtgggaagtgccgggaggcggagtacgtgccggggaagattcgttggatgcagtgattcgggaaatcaaggaagagacaggagtcgatgtgacggaagcagaaggaggctatgcattttcatataagagagtaaatccggaagaaaaaaacaattactttgtggatatctacaaatttattctggattttgatgaatctgatgtgaagacacaggaggaagaggtgtcgggatttgcaatcgcagatatcgaagaaatcaaaagatatgcggatcaggggatatttcttcactatgaaagtatccgacaggttttcgagggataaaacaggcaggctgtatgaatgatgaagagagaatcctgaaggaaatcaaagatgtattaaaagaactggatgagcagggaagaatgaagtatacgcagaaatacatgcagcatagtgatatttcggtatataagcattgcatcagtgtggcgtatacaagcgtggaactggcagatcgcctggcgtggaatgtcaaccgcagagaactgatcagaggtgcgcttctgcacgattattttctatatgactggcatgaaaagaatgcagggcacagatttcatggatttatccatgccggcagagcgctgcagaatgccaggaaagattttaaactgaccatacgggaggagaatatcatattacgtcatatgtttccgttgaatgtcgtacctccgatgtgtaaggaggcatggctggtatgcctcgccgataagatatgtgcatccaaagagactgtggccggaagaatacatagaaaaaggaaacagcagagatgaaagatatggttgacttgttagatatcctactattataatagggaatattatgaaatatgagtggaggaacaaatatgttaaatcagttttccagaacacagcttctgttagggtctgacaatatggacagacttgcagatgcaaaggtagcggtctttgggatcggcggagtaggcggatacgtggtagaagcacttgcgagaagcggagtaggatcatttgtcctggtggatgacgataaagtgtgtctgacgaatatcaaccgtcagattattgcgaccagaaagaccgtagggaagtataaagtagatgtgatgaaagaccgaattctggaaattaacccggatgcagatgtagagataagaaaatgtttttatcttccggagaatgcgcatgaatttccgtttgaagaatattcttatgtggtagatgcggtagatacggtaactgcaaagattgagatcataatgcgtgcgaaggccgcagatgttcctgttatcagttgtatgggagccggcaataaactggacgcatctgcatttcaggtggcagatatctataagacaaagatgtgtccgcttgcaaaagttatgcggagggaattaaaagcacgtgggataaaaaaactaaaagtggtatattcggaagaaaaaccggtacgtccattagaagatatgagtatcagttgcagacagcattgtgtatgcccgccggggacagcaagaaaatgtacccagagaagagatattccgggaagtattgcattcgttccatccgtagcaggcctgatccttgccggagaagtggtaaaagacctgaccatcaatcagtatggacggggaacggaataatgggggatatcttttgacattttctgtaaatccgatataatagaaaacgtaatgttctatttgtagattgaggaggttatcaatatgaaaaaaaatagaagaaacaattcaagacctgcagcaatcacaactgcaaaagatacaacaaaggcaatcgagacaagagcaggcgtattgaaagaagcagaagatgtgaagaaagaggcaaagacaagcttttatcttcagtatatgggaaaagaaatcagcacagaggagattacacagaaagtacacgaagcatggaaaactttggggaaaaatgtagatgagatcaaaacgctgaatgtatatttgaaaccggaagaagcagcagcttattacgtgatcaatgaagaaacaaccggaaaagtagcaatttaatgtaataactatattgaacgtccggtatatggatacagcagtatagaattgttctatactgctgtatcttttttggacagaaatggaagtcgttacacctgtttaatgccaattgtatctagtattttgttacatcttcttcaagatgtgcaatctgttccaaaagcccggtagtttctttttcggaaagactttccaggatcatgttcatatcatccgcaatttttgcaggattataaggaacttccaatgcaaaatcactgaaagcgcgaatcttctggaaataagtgcgggtctcaggttcttcaccgccggtccggcacatctgatacatggtgacacagtctgtggcatcctgatcagtacattttttacagatccattttccaagataataataattacttccaatctgataaaggaatcccggaagctttaataatcgctctgataacatgacagaacctccttgcattgatgaagtccggttaagaggacttacttttttatgtttttagtatccggtgaagtgacagaaatgtcaagtcagatttgtctgaaaaaaatatataatttgaaaatactcgaaatatgtcgtattataaactataatatgataagatgttagtaaaagaaaattatatatgtaattgcagcataagtggagagtagaatgaaactgaaaaatgggggcatgctgttactgacagcatttatatggggaacggcatttgttgcccagagtgtaggaatggatcatctgggacccttttcttttaatggaatccgctgtctgataggagcggtggcacttttaccgtgtatatggtttttgaacagaatgaataaagatccggaaacagacggttcggaaaaagagaaatccggaaaagatctgataacaggaggtgttgcatgtggagtattattattcacagcaagcagtctccaacaggccgggattcagtatacaacagcaggaaaagcaggatttattactgctttttatatcgtgatcgttccggttcttggaatttttcttcataaaaaaattcaatggaaggtatggatggcggtgttactggcacttgtcggattatattttttgtgtattacggagtctttttctgttggaaaaggagatgttctggtatttttgtgtgcacttgttttttccgtgcatattctggtaatcgatcatttttctccaaaagtggatggtgtgaagatgtcctgcatccagtttttcgtgagtggaattctgtcattaccatttatgtttgtgctggagacaccaagacttgtagctgtggcggctgcatggatgccgcttctgtatgcaggtgtattatcctgcggggttgcatatacattacagatacttggacagaagaatgtgaatccggcggtagcatctctgattttaagcatggaatcctgcttttcagtgcttgcgggctggatcatacttggagaacgtttgtcattcagagaatcgtcaggatgcatactgatgtttctggcaattatactggcacagcttccggataaaaataatgggtagcaggaggagagaaaatgcggtttgtgattcagagagttacagaaagcagcgtaaaagtggatggaaaagtaatcggacagataggaaagggatttatggtcctgataggtgtggctgattcagatacaaaagagattgctgataagatggtcaagaaaatgaccggattacgtatttttgaggatgaagaaggaaagacgaatctttcgctggatgcagtgggaggggaacttcttctgatctctcagtttactttatatgcaaactgtaaaaaaggaaaccgtccaagctttgtcgaagcaggaaaaccggacatggctgaagaactttacgaatatattataagtaagtgcaaggagcatataccggtagtagagcggggaatgtttggggcggatatgaaagtgagtctggtaaatgatggaccatttacaattgtactggattcagacagattatgatgataaaatatagattatgataaggaaaataaaaaaacgaacaaatattcgggggggggg

SEQ ID NO: 2858 - DNA, 7908 bp, Unknown
  gut microbiota DNA sequence
tgagatcctggtgagtatgcttgagggcgaatatgatttgatacaggcagaggacggacagcaggcggtctatattatgtcagaacaccatatggaattatccctgctgttattggatatgaatatgcctgtaatgaatggatatgaagtgctgcaggttatgaaagaaagactatggctggatcgtataccggttatcagtatctcggcagattcctctgatgataatatcggacgcgcatataagcttggtgtaagcgattatttctcgcgtccatttgatgcggctgttgttttgagaagagtgcagaacacgattgcactgcatgataaatccatgggaaatattcaggatacattgggaatgctgtcagctttctattatgtaatattgaaagtcaacctgacaacagacagttatctgatattgaaagatggacttgacgatcaggaaaaatatttcgacagttttacatccttttcagggagactacgcggctttgcggacgtggattgcatttatgaagacgataaaaaagaatatcttgagttttgtaatataaaacgtctgagaaaagcgttcgcaggaggaaacagaaaagagatgatccgttaccgccggaaagtgaaggatgaattcaagtgggtatcacttacaatgatatgcagtgaggaatacgaagatgataatcagatcgtgatgttgtatgtaagggatattaatgatgactatctgaaacagctggatgaagtcatgagaaagacgacggattcacttggaacagtaacggtaaatgtaagtaagggaaagtgtatctcctgtgcagtaaagactaagagcattggaatcaggggtgaaaaagaaaatctagacgattacgtcagaagaatatcgatgtatgcgatcggctgtgaagacagagcaaaagcaaaccagttgtttgtacaggaaaatctactgaaagaatttgctggtgggagaacaattgtttcgtttgaaacagttgctcagggagacaaggatgagaagatccgtatgttccgcattacgatagagatgatccgaaactctatgacagatgacattgaaggagtgctttattttcaggacataaccgaaagttatctggcagaaaaaatcccacagcttctttaccaaaagaattttgaaaaggttgcattgatcgatgcccgcagaaatctgatcaatatggaatcgacagaggattttaatgcatacagatatcttcatatgaagatcgattataatacgtattgccgggaaatcctgggtacgatggttccggagcaggaaaaagagcatctgaagaaaaatacagacatagaaacgatatgcagtgaattgaatcaaaatggccgttattccttcactgtccatcagatcagtgaggatggagagatacgcctgaaagagtttaatttcatgtatatgttcagggaactgggaatcattctggctgtgacggaagatatcaccgagctttcaggcaaagatgtgctgaccggtggatacaacagacagggattcatccataattcggaaaacatattccggcactgtgatgacaggaccgattatgccgtgttgtactttaacgtccggaatttcaaagcggttaatgagctttttggagttgacattggtgataatgtgttgcgcacaatttataagaatctgcgatcatccagcctgaagccatgcgtagtggcgagggtggaggctgatcagttcacctgtctggtagagaaaaagaagctggattttgatgtgctttccggactttgcgagtggaatttcacaaagaatggaaagacgatgcacatcttctgtggttgcggaattttctttgttgaaaataaagaaatgagcatcaatggtatgatcgaccgtgcgaagcttgcaaaaaaatatattacagatgaatatgtaaaaccatataatatctatgatgcatcgatgaaatcatattacatcgatcgtgcggaacttgcaggagaactcagaaacggactggcacaggaacagtttaaagtatattatcagccggttgtagatgcgaagaccggagagattcggtctgcagaagccctgatccgctggatgcatccaaagagaggattcgtatcacctgccatattcattccggcattagaagagagcgggcatatctcggaactggatttttatgtggcaaaaaaagtatttgaattcatgcggaagcgatgcgaagacggtaagaaaaatatcccgatatcaatcaatctgtcatggatggatttttatgatgaaaagatgatgaaatggatcgaggaaaatgtagagtcatctcagaagcttggaatcaaatcaagatttgagattacagagacatcgtttgaggcgatgaagcagaaccgcaataatatcctggaatcattgcagaaaaaaggtgcggtgacactgctggatgattttggaagcggatattcttcttacggtgtacttcaggactataatttcgatattttaaagatcgatatgagtctggtacgtcagattgagaaaaatccgaagtcgagaagcatcttaaaatctatcattgcgatggctcatgaactggggatgcagctggtagcagaaggagcagagacggaagaacaggttgcattcctgagggaaaacgattgtgattgtatacagggatattattattccaagcctcttccggaagacgaatttttggaataccttggggaacattaaacaacaggtcagaatcagattttgaagatctaaactgtgtgagtgtgaaaactctccggaaatctgcgcgaaagtgtgggcttccggggatttttttaactgtatattagttagtgttctaaataaataaaatataaaacaaacaataaaaatataaaaaaaatataaaaacattgacaatattggtagaaatggctaatatgatcgttagaattctaattaataaaaggaggtggagaatttggaaaaagatatggaaacgtcaacatttttttccgtatttcaattaatgaaatttatgcaatatcagtcaatgaagcgtatggaaaaaatggacttgaaaccaagtcaggcgggagtcttgttttcattgaaacattggggggaacagtcgcagaaacaactggcagaacgtgtcggcattacaccgccatctatgactgttgcgttacggaagatggaagaaaaaggatatgtgacacgaagacaggatgaaaaggatcaaagagtggtaaaaattcatcttgcgccaaaaggagaagaatgtatagaaggaattcaaagagtaattcgtgaaatggaagaaatcgtttatcagggaatatcaagagaagagatacttctgatgaagcggcttctagcagaaatgaaaaaaaatctgttgaactcaaaggatttcaaaggtgtggatatggatacgatcatagaaaagacatgtccatcggcacgtgggagtttttagtaatagaatatacagacggaactgacaggacagatccgatgtatataaatatgaatgcagaaaggaaagacataagaaaatgggaaaattatttaagtttctgaaaccatatgcagctgctgtggcagcaattatctgcatactggttgtccaggcttattgtgatctgtctttgccgacttacacatcggatattgtgaatgtaggtatccagcagggcggtattgatgagactgtacctgatacaatttccaaaaaagatctgaaccatctgttactgctggttccgtcggacagacagaaaattgtaaaaaacgcatatacagagtcggtggaaaagtacgactataatggtactgtaatggaattaaaagcttctgtaaaagaagatgaaaagaaaatggacaggctttcagagattcttggaaagccgatgctcatggcagcaggatttgattccggcagtgatatgacacagaagatcgaagagcagatgcgtacacagatgtctggaattccgaatatcgataagatggatatctatgatatgttggagcttatgggagctgaaggcaggaatgcgctgatcggacagatggatcagcagatggattccatgcaggattcaattattgcccaggcagcagcagggtacattaaagacgcttacacccatataggaattgataccgatcagatcgaaactacctatattttgcatacaggagccaagatgctggcacttgcattcctcggaatggcagcaagtatactggtcgggctgctggcatcacgtgtcggtgccggtgtcggacgcagacttcgtgaaaatgtattccgtaaagtggttggtttctccaatgcggaatttgataaattctctacggcatcactgattacaagaagcacgaatgacattcagcagatccaattattacttgttatgatccttcggatggttctgtatgcaccgattatggcaatcggaggaatttggaaagtctttcatacgaatgtcgacatgtcgtggatcatcggacttgcggttgctgttattatagttatcgtaggattcttattcctggtggtaatgccgaagtttaagctaatccagaatcaggttgacaaactgaatcttgtcagccgtgaaattctgacaggactttcggttatccgtgcatttggtacacagaagtacgaggaagaacgttttgatgatgcaaataaagcactgacaaagacgaacttatttgtaaaccgcgcaatgacatttatgatgccgcttatgatgttcgttatgaacagtattgcggttctgatcgtatgggtgggtggtcacagcatcaatgacggagcaatgcaggttggtgatatgatggcatttatccagtatacgatgcagattatcatggcgttcttaatgatctgtatgatctcggttatgctgccaagagcagctgtatctgcaggccgtgtagacgaagtactgacaagtgagactatgatccatgatccggggaacccgtcacacattccggaagaaggaaaaggaaagattgtattcgaccatgtatcgttccgttatccgggggcagaagaagatgtccttcatgacatttcctttaccgcagagcctggaaagacgacggcatttatcggaagtaccgggtgtggtaagtctacgctggtgaatctgattccgagattctatgatgttacagacggtaagattacgattgacggaaaagatatccgaaatgtatcacaacacgaactccgggagaaactgggatatgtaccgcagaaagctgtattattctcaggcgatattgcttcaaatatcttatatggtaatccggatggaagtgaagccgagatgacagaggcagcaacgatcgcacaggcaactgaatttattgagcaaaagaagaaaaagtataagagtaccatttcccagggaggatcgaatgtatccggaggtcagaaacagagactttcgattgcaagagcgatagcaaaacatccagatgtatatatatttgatgacagtttttcagcactggattataagacagatgcaacacttcgtgcaaagctgaaagagaaaacatcagaaagtacggttatgatcgtcgcacagagaatcagtacgattctccatgcagatcagatcattgtgttagatgatggtcagatcgtcggaaaaggtacacataaagaactgcttaagaactgtgaagcatattatcagatcgcatcttcacaattatcagagaatgaattagaagaagatcttaaggaggtggaatcatatgccaagaggtagaggacatggaccgagaatgtccaatgaaaaggcaaaagattttaaaggcacgatgaaaaagctgatggcatatttgagcgcatataagattggaatattttttgtgattgtatttgccatcggaagtacgatatttaatatcgtaggaccgaagatacttgggaaagcaacgaccgagatatttaaaggtctggtcagaaaagtatccggcggagccgggatcgattttgacaagatcgcacatattgtactgactctgttatgcctgtatctgacaagtgcagtgttttcattcgtacaggggtatatcatgacaggagtatcacagaagctgacttatcgtctgagaaaagaaatctcagaaaaaatcaatcgcctgccgatgaattattttgataaacagacacatggagaggtgttatcccgtatcacaaatgatatagataccttaagccagagcctgaaccagagtgcaacgcaggtgatcacatcggtgacaacgatcataggtgtgctgatcatgatgctcagtatcagtccgttgatgacattggtagcacttctgattcttccggtttcaatgggactgatttctatgatcgtaaaacgttcgcagaagtacttcatgagccagcaggagtatctgggccatgtaaacggacaggtagaagaaatctatggcggtcatagtatcatcaaagcattcaataaagaggaggatgtaatcgctacattcaagcgggacaatgatattttatatacttctgcatggaaatcgcagtttctttccggaatgatgatgccaatcatgcagtttgtcggaaatcttggttatgtcggagaagttatcctgggcggttatcttgctatgaaaggaagaatccaggttggtgatatccagtcttttatccagtatgtaagaagctttacgcagccgatccagcaggttgcgcaggtggcaaacatgttacagtccacagctgcagcatctgagcgtgtcttcgaattccttgaggaggcggaagaagaccagacagtggaacatccggcatgtattgatgaaatggaaggaagcgtaagcttcgaacatgttcatttcggatataatccggatcacacgatcatcaatgatttcagtgtggatgtaaagccgggacagaaggttgcgattgtaggacctaccggtgcaggaaagacgacgatcatcaaattactgatgcgtttttatgatgttggaagtggttcgatcaaggtggacgggcatgatgtccgtgactttaaccgcgatgatctgagaaaaatgttcggaatggtattacaggatacctggctgttcaaaggaagtatcgaagataatatccgttatggacggctggatgcaacgcatgaagaggtagtggaggctgcgaaggcagcacgtgcacaccgctttatccagacccttccgggtggttatcagatggagttaaatgaagaagcaagtaatgtgtcacagggacagaagcagcttctgacaattgcaagagcaatgcttgcagatcctaagatactgatccttgatgaggcaacaagttcggtagatacaagaaccgaaattcagatccagaaggcaatggatcagttgatgaaaggaagaaccagctttgtgatcgcacatagactgtcaacaatacgtgatgcagatatgattctggttatgaaagacggagatatcgtagaacagggaaatcatgaagaacttcttgcacagaatggattctatgctgaactgtataattcgcagtttgaaagaagtgcataaaaacaggatcattgcgttaaagattgcggaatccttaaagagaaataaggcgctgtcagaagaaaatctgacaacgccttttgaatatgcacggaaacatgccggaaataatccggatcgttctgcattcataacgtttagagggcaaaaaagagtatgttactatgcaaggaaatatacggtcaatatccattgcatgaaataaacgaataaaaatcagaacgggaagatccggattcttttaaagaaaaatgaaagtgtgtaaaaaaactgct

SEQ ID NO: 2859 - DNA, 32249 bp, Unknown
  gut microbiota DNA sequence
ataaagaaggaagcacgaacgaagtgagcagagaaaaggagatttataaatgaatacttcattatcatggataaaagcgtatgttccggatcttgatgtaacagctcaggaatatacagatgcaatgactttgtctggtacaaaagtcgaaggttttgaaaaattagatgcggatcttgataagatcgtgatcggacagatcgacaagattgagaaacatccggacgcagataagctgatcatctgtcaggtaaatatcggaacagagacgattcagatcgtaacaggtgctccgaatgtgaaagaaggagacaaagtaccggttgtattagcaggcggacgtgtagcaggcggacatgaacctggacagcgtgtagaaggcgggatcaagattaaaaaaggaaagctccgcggcgtagaaagcgatggtatgatgtgttccatcgaagaacttggttcaaacagagagatgtatccggaagctccggaatacggaatctatatcttcgacgatgatgcagttgtaggcgagagtgcgatcaaatcacttggcctcgatgatgtcgttgtagaatatgagatcacatctaaccgtgtagattgcttcagtgttgtaggtattgcaagagaggcagcagctacatttaataaagcgttctatccacctgttgtcacaccaacaggaaatgatgagaatgcagcagattatatcaaagtaaccgttaagaatccggaactttgcccaagatattgtgcaagaatcgtaaagaacattaagatcggaccatctccaaaatggatgcagagacgtctggcttctgtaggaatccgcccgatcaacaacctggttgatattacaaactatgtaatggaagaatacggacagccaatgcatgcatatgaccttgatacgatcgaaggaaaagaaattgtagtgcgtactgcagaaaaaggtgagaaattcacaactcttgacggacaggaaagagagatggatgaatctgtactgatgatctgtgacggtaagaaatccatcggtatcgcaggtatcatgggtggagaaaactctatgatcacagacgatgttcagacaatgttattcgaagcagcttgctttgatggaaccaacatccgtaaatcaagcaagaagatcggacttcgtaccgatgcatccggtaaatttgagaagggtctggatccaaataatgcagaggcagccattgaccgtgcatgccagctgatcgaagagatgggagccggtgaagttgtcggaggaatggttgatgtatacagcaagaagaaagagcctgtaagagtaccatttgatgcggaaaagattaacaagctgcttggaacagacatttctaaagaagaaatggtcggatacttcaagaagatcgatctggaattcgatgaagagacaagcgaagtcatcgcacctactttccgtcatgacttattccgcatcgccgaccttgcggaagaggttgcaagattctacggatatgataacattccgaccacacttccaagtggagaagctacaacaggaaagttatcattcaagttaagagtagagcaggttgcacgtgatatcgctgagttctgcggattcagccagggaatgacatattcattcgaaagcccgaaggtatttgacaagcttctaattccggaagattctgatcttcgtaaggctattccgatcatgaacccactgggagaagattatagtatcatgcgtacatcttctttgaatggtatgctgacatcacttgcaacaaactataacagaagaaataaagacgtaaaattatacgaactggctaacatttatctcccaaaggcacttccacttacagaactgccggatgaaagagtacagtttacactcggtatgtatggagaaggcgatttcttcactatgaagggtgtcgtagaagagttcttcgataaagtaggacttcataagaaagaaaaatacgatccgaatgcaggaaaatcattccttcacccgggacgtcaggcaaacatcatttatgatggtgtagtagtcggatatcttggagaagtacatccggaagttgcagataactatggaatcggaacaagagcctacattgcagtaatcgatatgccagagatcgtagcaagagcaacatttgatcgtaaatatacaggaattgcaaaattccctgcagtgacacgtgacatcagtatggtaatgccaaaagagattctggtaggacagattgaagatgtgatcgaaagcaagggcggtgaatatctggaaagctattcactgttcgatatttacgaaggtgctcagattaaaacaggattcaaatctgttgcatattctatcgtattccgtgcaaaggataagactctggaagatgcagatgtatctgcagctatggaccgtatcttaaaggcactcgagggtatgggaatcgaacttcgtaaataaaaaaacatttattcatatcagataaaagctcggtaaaaagagcaagaggattacgtatgaagaaaaaacagatcataggtctggtagtagcggcagcactgttcgttgtagtcagtgctgccagcgtatttaccaatacaatttcaaaaaatctgcttcagaacagtgcagatgatataattaatctcggaggttcgtatcagtttaatccaccgtctgaagattatattgcaatcgtaagagtagaaggtacgatccaggaacagagtggaagcagtacactggaggcatccagtggatatcagcatgattcaacgatgaattatatcgatgaattgatggatgattctaacaataaaggaattcttctgtatgtagattctccgggaggaactgtctatgaatccgaagaactgtatcagaaactgaaagaatataaagagacaacaaaacgtccgatctgggattatatggcacattatgcggcatccggtggatatatggtgtctatggcatcggataaaatctatgcaaattcgaatacaacgaccggttccatcggtgtgatcatgtcaggatatgatatgtccgggctgtataaaaagcttgggatccgttatgtaagtatcacgagcggaaagaataaggacagcagcaaatttacggacgagcagattgctatttatcaggatcagatcaatgaagcttatgagaaattcgtgaatatcgtggcagacggccgtgatatgtcagtggaggatgtaaagaaactggcagacggaagaacttatactgcaaagcaggcgaagaacaacggtctgatcgatgagatcagtctgtatccggatatgaaagatgcaatgagcaaaaaacttggaacatctacattttatgagatggaatcagatgaaggacttttgcagtcgctgttttccaaagcagaatcattagttccgaagtcagaagcgcaggttctgacggaaaccgccaaaagtgtagaaagcggggtgccgatgtactatgcagaacagttacgataatcaggagaagttagccagacagaacagttgctgtgccagtgggaatctggagtatgcagggttctgggtgcggctggcggcttatatgatcgacagtgtggtagtatttgcaggcctcctgatcgtgcggctgatatttgcaggtatctcactggctggcggtggtgcgataacgggaacggatatcctgtttcattattcgttgaaagatatcatactgtatgctctgaaagtgttatattttattgcatttacctatttgacaggaacgacacttggaaagaaagcgatgaatctccgggtagtttcgaaaaatccggaagagaagctgacactgttcaatgtggtgtaccgcgagacggttggaagattcttatgtagccttccggtgaatatcggttatattgttgcaggaattgattcggaaaaacgtggatttcatgacctgctttgtgataccagagtggtctatcagaagaagataaaagcatggatggcgcaaccgggaacagttgcaccagaatgtgaaaagccaaatgtagaagagcagaaacagcagacatcagagggtgagctgtcaaaaacgcaggaaaatgtccaaatgaaagagtctgggatacaggaattgaaaaaaacagaaaatacacagagttctgtagttgagaaactgggaaaaccagtgtataatggctatcgtctggtagaaaataaatcagaaaaagaaatagcttcaaatgcaactgtaaatgaaaacatatcagaaaaagatacgtaaagaataaaagggaaaggaattcataattatgaaacgtcaggatttttattatgaattgccggaagaactgattgcacaggatccgcttgaggatcgttcgagctccagacttcttgtccttgacaaggagaccggggctttttcccatcatgtatttaaagaaatcacagagtatctgcatgagggagactgtctggtaatcaatgatacaaaggttattccggcaagactgattggttccaaagtagagaccaatgccaaaatcgaagtattattattgaagagaaaagaaaacaacgtatgggagacgctggtaaaaccaggtaagaaagcaaaagtcggagcaaagattagtttcggtgatggccttctgatgggagaagtcattgatgtggtagaagaaggaaaccgtctgatcaaattcgatttcgacggaatttttgaagaaatcttagaccagcttggccagatgccgctgcctccatatatcacacaccagctggaggataagaaccgttaccagacggtatatgcaactcacacaggttcggcagcagcaccgacggcaggactgcattttacaccggaacttctggaagagattaaggcaaaaggtgtggatattgcgagagttacacttcatgtggggcttggaacattccgtccggtaaaagtggatgagattaccgagcatcatatgcattcggaattcttcatgattgatgaagaagcggctgagaagatcaatcgtgcaaaagagacgggacaccgtgttatctgcgtcggaacgacaagctgcagaacggtagaatcggcagcagatgagaatggacatctggaagcgaagagtggatggacacagatattcatctatccgggctataaattcaaagtactggattgtctgatcacgaacttccatcttccagaatctacattaatcatgctggtatctgcgcttgcaggacgggagcacgtgcttgcggcttatgaagaggctgtgaaggagaggtaccggttcttttcatttggggatgcgatgtttattcagtagagttgctatttaatttatcatgtcggctgtcaccgatcggaataaacttacaaggtcctatcctgtgctgactccaacatggggaaattctaaagcaaaaaagttgacctaaaaacgagctcaccaaaaatccaaactcgactttcgtctcagacagtggattttttgtgagcaaacggtcaacttttttacttaagaattaccaaccatgagtccgtatgcacagaataggaccttgtaagtttattcctgcggtttcgcatgccataataattaaatggagaactgtaagcttttattagggttcggggatttggcctagtgaattaaatagaaaaaagccgcacatatttatactcttttgcataccataaatgcgaaggagcgtgataatatgatctataaagcaatccagggacttccgcaggcctatgctatgccaggataaaagggagcaaagaataccctgatattcgtggaaatgtatatctctatgaagtgtataatggcacagttcttttaggagaactgatgggaatcccggaggaactggagaagaacatcccagacatgcaggagatctgcagccggtattaagtaatgatggaactgcatggatggagatttatactggaagattctatccaatggatgttgtcggcaggacaatcgtacttcatgagatgccggatgacttcaagacccagccgtccggagattcgggaatgaagattgcatgcggtgaaatcaaagcatgggaacaagaatgtaagaacaaaaatggtaacgaataagtggagaaccgtcatacagataatttgacatgtaagtatgaaaacgctaaaattggtggaggaatgtagaaaactgcagtcctccatttttgcgtcaggggatattaaaaaagccaaaacctcgctccctgatggaaaggagtccatatgccgaaaaaagaattagcaaaagggtatacaaccggaacctgtgcacaggctgcaacgagggcagcaatgcagatgctttttacaggtgaaaaagtagagcaggtgtcggtagaactgccgcagggagaaaagctgcagttggatatcacagatatacagagaaaatatacagacagggaattgccggatatggtatcctgtgcggtcaaaaaaaacagcggagatgatccggatatcacgaatggagtactggtttacagtcaggtaaggctttctgaaacaggacagattcatattgatggcgggatcggggtaggaagagtgaccaggcccggactgaatcagccggtgggagaagccgcaattaaccgtgtgccaaggcagatgataagaaaagaagtagaagaagcctgtgaagaggttggctataccggtggaattgatgtagagatttcgattccggaaggggcaagactggcaaaagaaacatttaatccaagacttggaatagaaggaggactttcaatacttgggacaaccggtattgtgaatccgatgagtgaacaggcgctgatcgataccattgaagtagagatgaaggtatgccttgcggaaaagtacaggtatctgatcattgcaccgggtaattacggattggattttctgaaagaacagtatagtatagaagaaaatgatgtggtaaaatgtagtaactatattggtcaggccatagatatggcggtagaacaggattgtaaaggtgtcctgctggtcggacatatcgggaaactgatcaaggtatccggcggaatcatgaatacccattccagatgggcagactgtcggatggatttattcgccacggccgcattgagagcgggaattgccggagagaaggcagtcgaatttcttgactgtgtgacgacggatgatgcattggagaaatgcagcgaggaagaacgaacacgcattatggaaaaaatcatgatgcgtatggaggaatatctgaactaccgggggaaaggagagatacaggtgggagtggtcacgttttccaatgtatacggaatccttgggaggacagaaaaagcagaagaactgatagaaagattcagaaaagaacgacatatacaatagataccagagtatgcagaagaagttgctggtggcaggttctttgcaggacaggaaggagtcggaaaatgatacattttgtgggagcaggtccgggagccgaagatctgatcacggtccgtggacagcgttatctggagcaggctgatgtggtgatctatgcgggatcactggtgaatccggggctgttaaagagtacaaaggagacatgcgagatatataacagtgcgaagatgacactggaagaagttctggaagtgatggaacaggcagaccgggaacagaagatgacggttcggctgcatacaggtgatccgtgtctgtatggtgcaatccgggaacagatggatcatctggatgaactgggaattgcgtatgattcctgcccgggtgtcagttccttctgcggggcagcagcggcactgaatctggaatatacacttccggaggtgtcacagagtgttgtcatcacacgtatggaaggaagaacaccggttccggcgaaggaaaaggttgcagcgtttgcaagtcataatgcgacgatggtacttttcttaagtacaggacttttggaaaagctggaaggccagttgatagaaggcggttataaagaagatacgccggcagcaattgtatacaaagcaacatggccggaggaagaaagttacatctgtactgtcagtacactggcagagactgcgaaagcacatggaattacaaagacagcattgatcatcgttggagatgtggtgacacatcatgcgtatgaacgttcgaaactgtatgatccggaattcaccaccgagttccgtcagggagtaaaataagatgaagattgcaatgatcagttttaccggaaatggaagaagactggagagatctttagcacatgaactggaaaaagaaggacaccaggtgctgcaggcggtaaaatgcaaagaactggaatcggacaaggatgcggtaaaatgtagtgccagagaatggacaggtgaacagttccggacgcgggatgtactgatctttattggagcagtacagattgccgtgcgcttgatcgcatcttttataggatcaaagacaacagatccggcggtactggtactggatgagaaaggacaatattgtatcccgatcctgtccgggcacattggcggagcaaatgagatggctgaaagaattgcagagatggcaggagcactgcctgtgatcacaacagctacagatatccgcggaaaatgggcaatagatgtatttgccagaaagaatcatctttatatagaagatatgcagaaggcaaagcaaatttcggcaaagattctggaaggaaagacagtcgtggccgcgattgagagcggaagagattcgatagagggtactgtgccggaagaagtgaagatcgtaccggaaacctatgagaatccagatatctatatcgggatatatgaacgaaaattaagcagtcatgtattaaggctgataccacaacggatcacggtgggaatcggctgcagacgggggacatccgcagagcagatagaacagctggtggataagatactgaaagaatcacatattaataagaaaagtattggcaggatcgcaagcattgatctaaaaaaagacgaagagggattgcttacattttgcaacaaatataacatagagccggaattttatccggcagaagaattaaaaaaagtagaaggagaattcagtgtttctacatttgtaaaaaaggttaccggagtggataatgtatgtgaaagaagtgctgtatatacaggtggtacactgcggatcagaaaacaggcagaaaatggtgtgacagcagcatttgcctgggataattggagggtgaagtttgaataaggtatatgtgataggaatgggaccgggggcatatgaacagatgacggtgaaagcagtccggacgctggaaaaatgtgatgtgatcgtcggatataccgtatatatcgaattattaaaagaatattttccggataagagatatctgacaacgtccatgagacaggaggcagcacggtgcaggatggcattcgaagaggcagcaaaaggagctgtaacggcaatggtatgcagcggagatgccgggatatacggaatggcaggactgatgtatgaaatcggtgaggaatatccggaagtcgcgatcgaagtaatcccgggagtgacagcggcactgggaggttctgcggtacttggagcagcagtcggacatgatgtcagtctgatcagtttaagtgatcttctgacaccgtgggaattgatcgaagaaagacttcgctgtgcggcaaaagctgattttgtgatctgcctttataatccgtccagcaggaaacgcagtacctatcttgcaaaagcatgtgagatcatgctggaatataaggcggaagataccgtctgcggaatagtgaaaaacattgcccgcgagggagaaacaatgcagacactgacactgaaagaattaaaagagacaacagtagatatgttctctactgtatttatcggaaataaacagacaaaagtaattcgggaaaaaatggttacaccaaggggatatcgtatatgaaagacaaaaagattctattatatgcagggacaacagaaggaagaaaattagcatcttatctcggaagaagaggcgtaagactgcatgtctgtgtggcaaccgcttatggggagagtctgcttccggaagagaagaatataacggtgacacacgaccgaatggacagtgggcagatgggtgagtttatgagggtgtttgagccggattatgtgatcgatgcaacgcatccatatgccaaagaagtgaccaaaaacttgaaaagtgcctgcgaggttatgcaggttccgtatttaagactggtcaggggaagtgaagagaccaaagaaagcatctgtgtggaaaatatggatgaagcgataaagtatctggaaaaaacagaaggaaatattctggtaacaacaggaagcaaggagctggaatcctatacaagactgacggattacgaaagccgggtatatgcgcgcgttctgtctattggccaggtggcagttaattgtgaagaacttggattctccggacgtcatctcatctgtatgcagggaccgttttctacggaaatgaatcgtgccatgttaaaggaatatgatattgcttatatggtaacgaaagaatcaggacttgcaggcggatacccgcagaaatgtcaggctgcactagaagccggtgtgaaaatggttgtgatcggaaggccggaagaagaagagggaatgaattttgaagaaatgtccaaattccttcagaaagaactggaactggataatcactggaaagttacactggtgggaatcggtgcaggtgccagagaccaggttacattggaagcaaaaagatgctgtcaggaagcagaacttctgatcggagcaggcaggatgatcgaggcagtggcagaagtcggacagaccatatatgaagcataccgcccggatgagatcatttcttatatcaaagaaaatccggaatatgaaaatgtaacgattgcgttgtccggtgatacaggattttacagcggtgcgaagaagattctggaattgatgaaagatgacccacagattgagacaaaagtggtgcctggagtatcatccatcatatattttgcatcaaagcttggcgtaacatgggaggatgcggcactagtaagcctgcatggaagaaaagaaaatctgatggcggtcattaaggagaataaaaaggtattcgcccttgtaagtaatgcagaagagatccgtcagatcctgacaaaaatgacggaatatggaatgggcgaagtaacagtcaggatcggaacagaactttcttataagaatgaagagattcagacaggaacagcaagatcactgcttcattacaaaggagagaatctggcggtcctttatattgaaaatgaatccggcggcgaaagcccggtgattccggcaattccggatgatacatttgtacgtggcgatgtaccgatgaccaaggaagaagtaagaagcatttcgattgctaaacttaagattaagaaggatgcagttgtatatgatgtcggagcaggaacaggctctatttccgtagaggccgccatggttgcaacgcaaggtaacgtctatgcaatcgaacagaaagtggaggcgcaggaactgatccgtgaaaatgcaaggcggatgcacgtggataatctgcatgtgatagaaggtatggcgccggaggcactggaagaactgccggcacctgattgcgtatttatcgggggcagtaaaggaaagttgtatgaaatcttggatgctatccggaagaagaacccatttgtacgggtggtgctcaatgcaatctcactcgagacgatgatgcaggtgttaaaatatacggaagagaatgagatagaagaggcagaagtcattcaggtagcggtaagccgtgcgaaaaaagtgggcagttatcatatgatgaatggacagaatccgatttatgtgatcagctttacgagcagaccggcaaaaaaggaagcagatccggaaaatgaagacgatttcgttctggaagaaatcaatctggacgaggtggaaccggaagatatgaccggagatattgtggaggatattacgaaagtgatctctgtaggggatctgacaccggagaaaatccgggaagaaatggaggaatctgagtaatgaaacttcctagaattctgattactgcgatgagaagtggcgcaggtaaaaccatgctgacctgcggaatattgaaagcaatgaagatgcaggagataaatcctgcgtcttttaagtgcgggccggattacattgatccaatgttccacaagactgtgatcggcatcagcagctataatctggattcctttttgtgtggagaaaatggagtcagagagatcctgaaaaaaaatggtgccggagcagatatttccgtaatggaaggtgttatgggatactatgatgggatcgcagggatctcttcagaggcgagtgcttatgacattgccagaattaccgataccccggctgtgatgatcctggactgtaaaggactaagcgtgtctgcagtgccgtgtatccaggggtttttgcattataaagaagacagccgtatcaaaggcgtaattctgaaccgtttgtctccgatgatgtatggaagaatgaaagagatgatcgaggtgcagacaggaatcaaagtctacggttatgttccggttatgaaagattgtgcactggagagccgttatctgggactgaagcttccaaaagaacgaaaagatacggaagacaaactcacaagactgggagaacagattctgaaaagtgtagatatcgcaggccttctggaactggcagaaaatgcaccggagctgcaggaaaagaaaacgcaaggatatacatcagaaatggtagaaaatttggcagaaaatgcacagtatagtacagaatcggttagaacaaaagatacggtacggatcgggcttgcaagtgacgatgcattctgttttttctatcaggataatctggaactgctgcaggagatgggagcggaactgattcctttttctcctctttacgataagcagattccgggaaatctgtcgggacttttgttctatggcggttatccggaactatatgcagaagaactaagtaaaaatgagtcaatgaagacgagtattaaaaaagcattgaacggcggaatgccatgtatcgcggagtgtggaggattcatgtacctgcaggaatatatcagagatgaaagcggcacagaatttccaatggttggatttttagaagggaaaagttatccgacaggttccttaaagcgattcggctatgttaccctgacagggggaagaatattcggtaaagaagcaggaggtatcccggcacatgaatttcattattatgattcagaagtatacggggaagcatttttggcggaaaaaccaatgtcaaaccgttcgtggaaatgcatgatcagtaccgatacggtactggcagggtatccgcatattcattattatggaaatgaaaagattccggagaactttctggaacaatgtagaagatgcagggaacaagagaaaagagctagggaaagagatagaacatagagaacagagaggataaaaagcatggcagagcaaagtttagaacaactggaacaggaattccatcagattgtatctggcattcatccggcagatgtagtaacgaaaggaaatgcgcagaaaaagtggaactccattgcgaaaccgttacacagtctgggaaaactagaagatcatattatgcagattgcggcactgaccggcgatacagacgtgaatctgaaccggaaggcgctgatcgtgatgtgtgcggataacggagtggtagaagaaggtgtaacgcagacaggacaggaagtaactgcaattgttgcagagaattttctgacatgtaataccagtgcggcgatcatgtgtaaaaaagccggtgtagacatctttcccatcgatatcggtatggcagcggatacaaaagtcccaagatataaaacagcaaatggaaccgcaaatatgaccaaaggtccggctatgacaagaatgcaggcgttacaggcaatcttaaccgggatccatcaggtgaaggaaaagaaggaagccggatataagatcattgctaccggagagatgggaatcggaaatacgacgaccagcagtgccgtggcttccgtacttctgggagacgaaccggcagagataacgggacggggagcaggactgacgaacgaaggattggaaagaaaaatacacgcgatcgagaaggcgatagcggtcaatcgtccgaaatgggatgatccggtggatgtactggcaaaagtaggcggattcgatctggcgggaatcaccggactctatctgggaggtgctgtatatcgaatcccgattgtagttgatggatttatctcagcggttgcggcacttgcggccgtcagaatctgtgagtgggtcaaagatgcgatgattgtgtcacatgtctcgaaagaacctggaatgcagaagatcctgaaagagttacacatggatgcaccattgcatgcagatatgtgcctgggtgagggaaccggagctgtggcatatcttccggtgctgaatcttgcggcagaagtgtatggacggatgagtacattttcagaaaatgacatcgaagattataaagaattaggtgagaaagaatgatacatctggtgacaggcggaagcggaagcggtaaatctgagtatgcggagaactggctgacaggcagaaataagaaggatggtacttacatatatattgcaaccatgcagccatacacagaagaaacgatgaaaaagattgaaagacatcacaggctgagagccggaaaaggattccggacattggaaaaatatacagatctatcagaacttgagataccaaagaatcagggaatccttctggagtgcatatcgaatctggtggccaatgagctttacagagaagatggtacattgaatgatttaaaagaaacaaaagaaaaagtattggcaggagtacgcagactgagcaattctacgacacgtcttgtaattgttacaaatgaagtgaacgcagatataaacggctatagcgaagagacggaaaaatatcgggaatgcatcggaatggtgaatcaaagtcttgcagagcttgcagatatagtaacggaagttgtgtatggaattccggtatgcattcgtaaggagcaaaagaagtatgaagagtataaaaagaatatggaatagtttcaaaattgcgttttccatgtacagcaggattccgatgccgcgcagcgaatggacagatgaaaataaatcgtatgcaatgtgtttttttccatggatcggtgcggtgatcggacttttgtcttatggagtgtttcggttttcaaaatggtttgatgggaatggaggaggaaattattccttattttttgtaatatttctgattctgatcccggtatttattacgggaggaattcatctggacggatttctggatacacaggatgcgctgagttcctggcagacgaaagagcgtcgtctggaaatactgaaagattcccacgcaggagcatttgctatcatttcatgtaccgtctattttctgatgtatattggcgtgtattcttgtctgagtgtacggagtatggaagtgattgcatatagcttcatgttatcgagaacattgagtggactgtctgtagttacatttccacaggcaaggaagaaaggtatggtggcagatttttcggaaagtgcatcgaccagaattacaagaatggtattgggcatttatctgattgtactgtgtttcctgattccactgaccggagggatctgcggaatcggatgtgtgatctcggcaggcgtggtatttggatattattaccggatggcgatgaagaatttcggtggtgtgaccggggatctgtgtggatatttcctgcaggtatgtgaacttgtgatggcgcttgtcgtggtagtagtggatatcgtagtaaaaagcggaatcatcaaatgatgaacaggatggataaaagtgtggaaagaatgaagaaaacaagtggcagaaagaaaacagcagagaaatagtagaaaataacagaaagatgaaaatacaggattggaggaaggaaaagaagtcatgatcatgataataggcggcgcatatcagggaaaacttgcattcgcaaagaaaatctacccagatgtcacatgggcagacggtgcggtatgtacggaagaagaactatatagctgcgaagggatatatcatttccatcagtatatcgaaagaaagataaaggaaggagaaccggtagatgatcttgcagaagaactgattcggaagaatccggaactgatcctgatcacagatgagatcggatacgggatcgtgccggttgaccggatggaacgggaatacagagagcagaccggaagagtgtgcacgcgccttgcggcatattcggagaaagtataccgtgtgatgtgcggaatcggacaggtgataaaggaagtatgaggatttatctgatacgtcattcgatgacgaaaggaaataaagaaaaacgctatatcggaacgacggatgaatctttatgtctggaaggaatacagcttttggaagagagaaaaggaatgtatcctgaggttacatatgtctatgtaagtccgatgaagcggtgtgtgcagacggcagagatcatttatccgaagatgatgaaagcaggagcatatagctgtaatgaaaagttacgggagtgtgattttggcctgtttgaaaatcataattatatcgaactttccggctgcccggagtatcaggcatggatagacagtggtgggaagctgccatttccggaaggggaaagcagggaagcgttcatccggcggacactggaagggttccgggaagtcgtacgggatgcgcaggcacatgaccgggagacgattgcggttgtggcacatggcggaacgatcatgagtatcatggaacggtatgcagtaaaggaagacgggacaccagcaggaagttattatgattatcagataaagaatggagaaggatatgaacttagaatttcagagaatgacatatatgacgatcgcgatcgtggcgggctttgttctggatctgatcttcggggatccaagatggctgtatcatccggtgaggctgatcgggcatctgatatcgggaaccgaaagaattatcagaaactgtctgccggcgaataagacaggggaacgcatcggtggagggattctggtgctggtggttgtgacggtcagtacaggagttccggcggtgatcttatcggttgcatataagtatttctggcagcttggacttgcactggaaagcttctggtgttatcagatccttgcaacgaaatccctgaaagtagaaagtgacagggtctacatagcactgaaagacaagggcctggaggccgggagaaaggccgtgtccatgattgtcggaagagatacacagaatctgacggaagaaggtgtgaccaaggcggctgtagagacggtggcagagaatacatcagatggtgtgatcgcaccgttattttatatgctgatcggcggagctgttctgggatttacatacaaagcgatcaatacgatggattcgatggttggatataagaatgacaagtatcagtggtttggaacggcagcagcgaagttagacgatgtggtgaatttcattccggcaagggtatcggcagtgttgatgatcctggctgcatatctgaccggaatggatggaaagaatgcagcgtgtatcttccgaagagaccgctttaatcataaaagtccgaactctgcacagacagaagcagtcatggcgggggcgctggatgtgcagcttgcaggagatgcatggtattttggaaagctgcataagaagccgacgatcggagatccggtccgggagatggaactactggatatccggagatcgcataagctgttatatgggacggcaatgcttggtctgatacttggaatcatcctccggattctggttctgtagatgatattgataataaaaatcaaaaaacaaataatattatctgcaaattatgaataaaaagttagaattgtgcaaacaatgttcctgttgactaacatagtcagtgcaacttacaatataaaaaagaggtaaagaaggtgttagttatgcaggcattgtcaaaggcggcggctggaaaaagctacaccatcaagtggatgttcggcatcccggaagttctggataagatccgaaaatgcaagattgatgaaggcagtgagatcacagtcattcagaattccggaagagacctgatcatcagaagtggtgagaagcggatcgcaatgagcagcgatgcggcaacaagaattcaggtataagattccggttgactattttctgcaaagtgagtaagatggttgtagcaaaatagcagagagagcggctagccgcatgggtgaaaaaagttggcagaacagaaagagacagttcacggtggagacatttaccggaatccatctgttacagattattctgtaaacagtaacccactgggagttcccgaagcagtacgaaagagcgtacaggaaagtgcagacaggatcatgcattatccggatgtcagatgcgacagacttcgggagtcgatcagtgattttgagagaatagaaaaagaaaagatactctgcggcaatggtgcggcagagcttttttttgctgtcgtaatggcagtgagaccgaaaaaagcactggtgacggcaccagctttttccgagtatgagcgggcacttggcacagttggagcagaggtacaatattacagattaaaagaagaacaggatttccggatacaggaggatatactggaacagattacggaagatacagatatgatatttctgtgcaatcccaataatccgaccggacagacaacggaaaaagaactgctgatccgtgtgatgaacaggtgtaataaatgcggtacgatactggtcctggatgagtgctttatagagtttctggaagaaccagaaagatatgaatgccgggggtatctgacacagtatccgaatgtggtcattatcaaagcatttacgaaaatattctgtatgccgggtgtaagacttggatatgcattgtgtgagaatgcagctcttaggaaacgaatgagggcaatgctccagccgtggaatgtgtcggtaacggcacaggaagcaggtgtggcagcacttgttgattgcgaagcatatttaaagagaacgagagaatatataaaaaaagaaaagttctggatgacagagcggatgagaaagcttggtctgaatgtatggggatcggaagcaaactatatattttttaaagggaaatcaggtctgtatgagaaagcactggaggatggtctgctgatccgggactgcagtaactacgaaggacttacggaaggctattaccggatcgcggtaagatcagaagaagagaatgaaaggttgataacatggctggaaaaattatgatacaggggacaatgtccaacgcaggaaagagtcttctgtgtgcgggactttgcagaatattcaaacaggacggataccgggtggctccgttcaaatcccagaatatggcactgaattcctttattacagaggatggactggagatgggacgtgcacaggttgtgcaggcagaggcagcaggcgtggcgccgcaggtagagatgaatccgatcctgttaaagccgaccaacgatgtaggatcacaggtgatcgtaaatggtgaagtcttgaagaatatgagtgcaagagaatattttgcttataaaaagcagctcataccggacattatgaaagcatttcacaaattagaagaagagaatgacatcattgtgatcgaaggagcgggaagtccggcagagatcaacctgaagaaagatgatattgtaaatatggggctggcgaagatggtagatgcgccggtgcttctggtcggagatattgaccgcggaggagtatttgcccagcttctggggacgcttatgctcctggaagatgatgagaaagaacgtgtaaagggactggtcatcaacaaattccgcggggataagacaatcctggatcccggtattgtcatgttggaagaaagaggcggcattccggtagtcggagttacaccgtatatgcaggtcgagattgaagatgaagacagtctgacagagcgttttaacatgacaaagggtggaaaaggtgcagaagaaaggatcggtctggtggatatcgcagtcatccggacaccgagaatttcgaactttacggatttcatgctgttggaaaatgctccgggagtgaatctgcgttatgtaaagaatccaagagaacttagaaatcctgatatgattatccttccgggaacaaaaaatacgatgggagatctgaaatggttaagacagagcggaatggaagcgaagattctaaaggcgcatgccggcggctgtgtggtctggggaatctgcggcggctatcagatgctggggcagtcgctcagtgatccggaaggcgtggaagatggcggcagtataaaaggactcggccttttgccggtaacgactacatttaccacagaaaagaccagaacaagggtgaatggaacactccttcatgtggaggggaatctgaaagcacttgagaatctgaagtttgaaggatacgagatccatatgggaaagaccgaacttctggaaggatgtccgatgaatcagattcacgatacggtgaagaaaaaggacagacagattccggatatggagccggaaaacagaatagagaacagtacagacggaatctcgcatggaaatgtatacggaacatacatccacggcatttttgataaggagaaaattgtatcggagatcgtaaaatccctggcagaaaagaaaggactttcaatggaagaagtggaaggtgtagacctgaaagcattcaaagaaagccagtatgatcttctggcagatacactcagaaaacatctggacatgaaggcaatctatcagatcatgggaatgcagaaataatttttcgggattactatgtattcgtaaggagctgtagataccaaagtatgcaagagaagttgccgatggcaagttttgtagttagaaaagatgagatgtgggctatgacggactatgaagagaaaggaagaaaacgttgaatatacagaaaaataatcacgcagcacatactaaaatagagatagaaaatgttcttccgacagagatcgaaaagcgcagctttgagatcattacggaagaactggagcaggaaggcatcgtgcttcctgagattcaggcaccaattacaaagcgctgcatacataccagtgcggattttgattatgcgaagaatctggtgtattccgagcatgcggtggagaaagcactcgaagcgatcagaggcggtgcttccatcgtaaccgatacacagatggggcgttccggaattaacaaaaagagactggcacagtacggcggtcaggtatactgcttcatgtcagatgaagatgtggcacaggcggcaaagaagaatggaaccacaagagctgttgccagtatgaaaaaggcgtgtgaactgaacgaaaaactgatctttgccatcggaaatgcaccgacagcactaattcacctgtatgaactgatcaaagacggaagaatccgtccggagctcgtgatcggtgtaccggtcggctttgtaaatgtggtacagtccaaagaactgatcctgactctggaagataccccgtatattgtagcgagggggagaaaaggcggaagtaatattgcggcatgtatctgtaacgcactgatctatatgctgtagggaggaagaatttatgacattacagcagttaaggtatattaccatggttgcggagaaggggacgataagtgaggcggcaaaagagctgttcatttcccagccgagtcttaccaatgcgatccgggaactggagcaggagatgcaggtgacgatttttcaccggacgaataaaggggtgacgatcaccgcggagggagatgaatttctcgcctatgcaagacagatcctggatcaggtcggtctcatgcaggagaggtatctgaatgtaaatgaacggaacccgagattttccgtatcctgccagcattattcttttgcggtcaatgcatttgtagatgtgatccgtaaatttgatgcgagaaaatatgatttcacactgcgggagacacagacttatgagatcatcgaagatgtggcgaagctgaaaagtgagataggtattctgtatgcttcttcacagaatgagacgatcatcatgaaactgatccgtcagaatgatctgaaattcgaagagttattcgtagcaaagccacatgtatttatcagttcaaagcatccgttggcagataaggaagcactgacactggaagatctggaggagtatccgtatttgtcatttgagcagggggattataattccttttatttttccgaagagatattaagcacactggaccggaataagaacatcaaagtcagagaccgggcaacgcttttcaatctggcggtcggcctggacgggtatacggtaagctccggcgtgatcagtaaagagctgaatggagagaatattatcggaaaaccacttctggtagacgaatatatgcggatcggaacgattgtgcggaaagatgtggcactgagccggtatggaaaagcatatatggaagcattgaaaaaatatacaggcggattgtaaaaaaagaagaaaagcagtggagaaaggtttcatttgtaaaagaagttgcggaagaagtctgaaatgtttaatataaaattgaatatataaaaaagatatggaagatatatcaaatatacgtttcacatttttgatattctttcgtataatagtctgctgagggggatggatcggaaaacgtaagaacgtatgagaatcatcctccgtttttattctaaggagatgaaaacatgggagtaatgaaaagtttattttccggaaagcagatgtcggaggcattcatctgtagtgcatttctggccttgtcgggtggatttcaggatgcgtatacctataatacgaggaatgaagtattctcgaatgcacagacaggtaatgtggtgctgatgagccagaatttcatgacgggaaaatgggaggctggactgaaatatttatttccgctttttgcatttgctttaggtgttctgattgcggagcagatccagaataagtacaaatatgccaggcgcctgcactggagacaaggaatactgggagcagagatcctcattttgtttgttgtaggatttattccgcagcggggaaatatgatcgcgactgttctggtatcctttgcctgtgcgatgcaggtgcagagtttccggaaggtaaatggattttcatatgcaagtactatgtgtatcggaaacttacggagtggaacggcggcattatccttctatctgagagagaaaaagccggaacaattgcggcaggcaatgtattattttggaattatagttctttttgcggtaggagccggaatcggaggcaatctttcagccaattatggaatccatatgatctgggtatcctgcggacttttgatcgtcagcttcctgctgatgttcctggatatagaatcccggagaaacgaaagataaaaaagggacaaaaaagagacattgatccgtcatcagatacggatcagtgtctcgattagtttttgcgctgcaatgctctgtggtctggaagcattctgtacaagacagatttgtctcgcaggaagggattctttcagatggatctgaagaatttctccacgcttgagcggttcttctgcaagcttctccggatagaagccgataccaagattgtgctggatcaaagccaggcactggtcggtggatgtaacttcaagatccggacggaacggaagcccgtgagaagaaaagtattgaatatgaagatctctggtgctggtgttattttccagcgagacgaaagggtagtccgtaagttcttccagtgagcagatgcgggaagccggttctttgtatttcgggccggcaatcagaatttcccggaaagaacccagggagattttctgaaactgtttttgaacagaaagtggagttgttacaattgcaaaatccactagtccgctttccagggaagcaatcgcctgcggagtggaatggttggatatcttaagccttacgtgtggataatgattgtgaaatgcttctaatttggacagaagcataatacgaagtgcattttcactgactccgatggagatgagtccgcttgtaagactctggtcacgcttgagctcggcttctccgagttcaagctgttcgaaagcaatcgcaacgtggttaaaaagcttctggccttcaggcgtcagtgagactccgcggttcgaacggacaaaaaggtgacatccaagttctgtctcaagattattcatacaacgggtaatgttcggctggttattgtgtaatacctctgccgcttttgtaaaactgtgatgttgtgcaacatggtaaaaaatacggtaataatcgtatgtactcataatatcctccaaaataatatataaaattgatatatatatatagttagttatctttaatacggatgatgccagataagtataatatattctaggtgaaaagacaatgttaagaaaaaaaatatattacatagtagaaaaaaacgtagtatactgatttatatttttcttataaacagatgtgtttgtaatgaaaatgatggatacacctgagaggagagacttaattatgataaaaatgaatgtaaaatttgaaacaccggaacagcttgtagaattttcaagaatgtgtcagaaagtagaggctgataccttgattgaagatacagcacataaacttatcattgatggaaaatcagttatgggaatgatgacagttacgctgaatcagaagatgatttttgtagtagatggttctgatgcggaagaggtagttcatacatttgaaaaattccgcaccgaagaggcagtacagaagcagaatctgggttaacaattgcattttacaggtacttatggtatcgtagtcaagatgagaaaaatagaatgaaaactgcaggtgccggctggataagattgatagagccggtgaaaagggaaacaggtgcaagtcctgtgcgaactcgtcactgtgagcagggaatatcagaaaagaaaaaagtcactggataacgggaagacaagattctgatgtatggatctgtgagtcaggagacctgcctgtagtgtacatggaagtaaatccggaccacgagtaattggttgtacaaaaatggaagaaaattataataaattaacaaggccattttgtacccttttacggatgatttcgtggaagggtattttgattgacagaaaagtagtagggagagagtataagatgaaacataattccaagcaatttttggccttatttatggctgtgtctatggcagttgcaccggtatcgggagtgtatgcggaagatcagaatgcagctgtagaagatacattgagtgagaataaacaggatagtgatgaagttggacagacagagccggaagccactgccggacagacagagttggaagccgctgccggacagacagagacagaagccgctgccggacagacagaaagcagtgtgacgacagatacaagtcaggaagtcacaaaagaagccgggaaaaatcaggtagctgttgaaaaggtacagaatacgcaggaagacggaaccgtcccacagacggaaccaatcggcgaagacgaaatatttgagaacattactgatattagcggtatggcaggtgctttgaaagacggagaatatggtgttgatgcggatcatttttcggcaaaactgacttcgggtggttcaagcaaggtgaagattgagtgtcaaaaagtaatcgtaaagaatggaaaagcaacagcctggataaattttagcagttctaagtatgataaagtatgggtgaaagtgaatggaacccagaacatatatcatgcaaaaccgagagaaggcgaggccggagttacatttgagattcctgttaatttaaatagttcaatgacttttatggcacataccagttccatgagtggaaaaaatattgcatatacgatcaatattgcaatcccggaagatacagttccgtcgacaccatccacaccggatcagaccgttattacggaattaagtttcaaagagggatctgaactcagcatgaaagagggagaagttcaggaactgacacctcagttcacaccggcattatcagcatctgagacagcaccggatatgacatggacttcttctgatccagaggttgtaaccgttgcaaaatccggaacacaggctgagctgaccgcagtgaaagcaggaactgctgaggtgactgtgtctattaagaatgcggaaggaacagagcttaaagccacatgcaaggtaacggtaacagcatcggaaacagaaaataaaaccctgacagatggaaattatcaggtagatgtggatactggaaataagatgttcaaagttacgaattgtatcctgacatctgaaaaaggtaagatgtatgctgtaatcacattaagcggaaccggatatgattatctttatatgggatcagcagccgatgcggcagaagctgcagcaaaagactacatttcatatgtggctgatgaggcaggaaaatatacatacaaagttccggtagaaagtctggataaaggaattgcagttgcggcacattccattaaaaaagataaatggtatgaccgcacacttatattttcatctgcctctgcaaaacgtatcatagcagacggaacctatcaggtgaatgctgaagccggcggaaagatgttccgtgttacggattgtgttatgactgtaaagaatggacagatgacggcggcagttacattaagcggtcagggttataacagaatctatctgggcgatgtaaataacgcatcggatgatgaaaagaactggatccttccggattcgcttcttgcagagcagtatacatttcagattccggtagagaaactggatgaggtaatgacaattgccgttcatacgacaaagagtaataagtgggacaccagaacactgacatttcattcagaaggcatgactaagattgcggacagcaataatggaaatgcttcgaatggtaataacggaagcaacggctcattgacaccgggcggaaataataacaatccgggaaatggttccaacggaaataaccagggaaatgcagaaaacaataatggaaacagtggaactacaggaaataatacgacaaacaatggaaaaccggatcaggaatcaaaatacgagtctgatctgaataagtcaacagccagagtcaatagtaccacaggattaaaagacggtgtatacacaccggacagcttctcatggtcaggcggaactggaaaggtaagcatcacttgcagcaaggtaacggttacaggcggtcaggcatatgcaacgatcacattcagcagtccgcattaccagtatgtaaaagcgaatggaaatgtatattatccgagtgcgaaaacaggaagttctacatcctttgtaattccggtagaactgaataagaataactcggttgtgggtatgacaacggcgatgtctacggcacatgagattaaatatacgatttttgtatacattgccgaagcagcaaaagccaatgcatcagcgagagccaacggaaaagaagtaacggtaatcggtgcaaacggaagtgacagcagcaagacggcaacagcaaacaaaaaaatggacgaggtagcaccggagatcatcggcctggagtatcagtctgaaacaaaagccgagtatgcgaaatatttcaagatatatcattatgatcagggaatcacattgttggagatcgatatgaataaaaagaccggaagaaaagcagccggtaagaaatggaaagaagcatcagaaataagcggactgaatccggcagagcaggagcaggcagcactgtacctgaacaaagtgatcaaatatctgatcgttccggaaaatgtagagattccggcggggctggataaggaagtcattgtggtaagacagccggcagatcatgtttatgcaggatcgaataagacgatttccctgatggaagaactgggacagcttgataaagtgacaacagtcggtgtgaagaaaaataaatgcaagaatgaaactatcaaagaaaagatggctgagaaagaagtcatttatgcgggaacgtccggcaaattaaattataagaaacttgtaaaaaacaaatgtaatcttgcactcctttcatccagcgtgctgccggaaaaaagaagcagcaaaaaagcggcaaagaaaaaaatgacagcttatcgaaagatgacagagaagatgacgcttcttcagattccggtgatcgttgaccgtgcaaaagatgaaaaaggaaaagatgcacagaaagaatgggaaaaggtctaccaagtgattttgggatgtgacggccaaagtgcagaatagagattgcgtaagatagcagagtgtggacaatgctcttgtgatcagaaaaagtggagaaaaggatgaaaaagagaacatatcggctgttgtgtgtacttgcaggtacagtgcttctggtaacaggagcactgaccgggtgcagcacctcaggcaaatctggtgtatcgaaaggtgacggaatacagcagacggaagaagcaggggcggcagaaaaacatgctccgaagatagacggtcttgagtatgagaaaacaatgaagctgaaatatgctacgggttttgatgtctattattataaagaaggatataaattactggacgtacacgaagacaggcagtatctgatcgtgccggaaggtaagaagaaaccggcagatctggataaagaaattgtggtattaaaacagccattggagcacatttatcttgcagcaacatcggcaatggcattgtttgatgcgatggatgggctggacagtatccggatgtcgggagcacaggcttcggactggtatattgatcatgcgaagaaagcaatggaagacggcaagatcctgtttgcaggaaaatacagcgaaccggattatgaaatgctgatagatgaggactgtgatcttgcaattgaatccacgatgatcctgcatacaccaaaggttcaggagatgatcgaagatctggatattccggtgtttattgaccgttccagttatgaaagtcatccgcttggaaggacggagtggatcaaagcatatgcagcaatgctgaacaaagaagatgcagcagatacattttttgatacacagacagaagtgatcggcagtctgaaagattttaagaatacaggaaaaacagttgcttatttctttgtgaatacagatggaacagtgatcgtaagaagcagtagtgattatattccgaagatgatcgatattgccggaggaaaatacatttttcaggatcttaagaacacaaaaagcaagagtgcttctgtggaactgtcgatggaagagttttatgcaaaagcaaagaatgcagattatctgatctataatgcatcgatcgacagtccgattaatagcattgcagatctgacagcgaagagtgaattgttcgcagattttaaggcagtgaagaacggaaatgtgtggtgcaccggaaaatcactgtatcaggcaacggacattgtgggaaatctgattacggatatcaatctgatgctgacagatggagatgagagtggtatgacattcttgtatcgggtaaaatagtacagtataataatcaggtgggcgtttgaatgtgttcacctgatttttttaaaggagaaacgatggagaaagagaatttcaggcggcgttccagatacatcctggtattcggggttctggcagcggcgttctgtgttgtaacagttttaaatattaatacgggaaatgtccatatttcaatagcagaaatatgcaagatactgattcgaagaggcggagaaggaacagaggcaaacattatatggaagatacgacttccgagagtactgatggcggcaatcctgggaggcgcattgtcattatccgggttcctgcttcagacatttttctcaaatccgattgcaggtccgtttgttctgggaatttcttccggggcgaagatgatggtagcgctggtaatgatatttttcctggagagatatgcttttgtatcttcttatacgttgatcattgctgcatttgcgggtgcacttatttccactggatttatcctgttgttgtccagaaaaatggcacatatggcaacccttcttgtgggtgggatcatgattggatatatctgctcggcaattactgattttgttgtaacctttgcggaagattccgatattgtcaatctgcatggatggtcacagggaagcttttcgggaatgaactggagtaatgtagaggttgccgctactgtaatcggtgtgacggtggtacttacattttttctgtcaaaaccaatcggggcatatcagctgggggaagcatacgcacagagcatgggcgtaaatatcagatttttcagggtagcactgattcttttgtccagtgtgctttctgccagtgtgacagctttcgcaggtccgatctcattcgtgggaattgctgttccatacctgataaagcatgcgctgcagacatcgaaaccgttggttgtgataccgggaacatttatcggaggtgcagtattttgtatgatctgtgatctgattgcaaggatggcatttgcaccgatggaactgaatatcagtacggtgacatcgatattcggtgcaccgatagtcatatttatgatggtacacggacagaaaggcaggtaggaaatgaaagattattatataaagacgaaagacctttctgtaggatatcagggaaaggtgttgatccgtgatatcaatctggatataaaaaagggggagatcgttaccctgatcggaccaaatggtgcgggaaaatccaccatattaaagagcgttaccagacagttgaaactgatcggaggcgaagtctatctagattcagatgagatacgaaagctttcttataagagtatggccaggaaggtggcagtaatgctgacggaacggatgaaaccggaaatgatgacctgtcacgatgtagtggcgacagggcgctacccgtataccggaagattgggagtcctttccagggaagacgaaaacaaggtggatgaagcattgatggctgtgcatgctcaggaattaggaatccggaattttctggaaatcagtgatggacagagacagcgtatattactggcaagagccatctgtcaggaaccggaagtcatgatcttagatgagccgacatcctatctggacatccggcataaattagaactgctggaaatcttaagaaagatggcaaaagaaaaagaaataacagtgatcatgtccctgcatgagatcgatctggcacagaaaatttcagataaagtagtctgcgtaaaaggagacaggattgcaggctttggaaacccggaagaaatatttacggaagaaaaaataagggagctgtatgggattgataatggttattatgatccatgctttggaagtgtggaacttccaagggtagtgggaaaaccggaagttttcgttctctcatcctgtggaaccggaattccggtttaccggaaacttcagaaagccggaatcccatttgctgccggaatcctatatccgggcgagtgcgactatcagctcgcaagactgctcgcatccgagatcatcagtgaagaaccatacgagccaatatcctgcgagacctaccgaaaagcattagaaatgatggaacaatgcaaaaaagtgatcaatgccggagtcaaaaccggaaagatgaatcagaaagcaggggaactgcttaagattgcggaagagagagggatgttaatttaattgggatttaattcaggaaggctgtggatacccgaaccggaataaagcttggaaaggcgttcctgctcaggttccat

SEQ ID NO: 2860 - DNA, 15457 bp, Unknown
  gut microbiota DNA sequence
caaaaattaaatggcaaatgcgtaaccgtagtggcctccatcgggttacacttccgggcatttcatttattaacatccgctgctagtcacgacttgaagaaaacagtataaagtggttctggtgaatgtgaaatgctcttagaaaaagttagagagtcagaatcaccgttaaaggaacgaagcgaacgtgtttgaggcgaatgccgagtttgagcgtagttcctttgcttttaggagattctggctctcttagtttttcttagagcgtggaacctgaaccagaaccactttatactgttttcttcaaggatcgagaggccaactacgttaataaattaaatcccaattaaatttaatgtcgcataaaattccggataggacacatccacacactgactgtctataatctgtgtttctccgtcagcagcgagcccggcaatcgagaacgccatcgcaatccggtgatccagataactctggatagaagcaccgccaagatggccggttccctcaatgatcataccatcatccgtcggggtgatatcagcacccatagcctttaatccggcagtaaccgtatcgatacggttcgtttctttcacctttaattcagcagcatctttgatcactgtctgaccctcggcaaaagcagccatgaccgcaatcatcgggatctcatcgatcagagtcgggatggtatcaccttcgatcacagttccttttaagcggctgtgacgtacaagaagatccgcacgtccttccccaccttcgaaagtctggctgactgtctcaatgtcggcacccatatctttgcagacctttaagaatccggcacgtgtgaagttggtcccgacatttctgaccagaagctccgagccaggaaccagaagtgcggcagcaataaagtaagcagcagaagagatatctccgggtacgcagatctgctgaccgaaaagctctttacaaggttctacatgagcagttgcagttccgtctgtatgaagatctgttgcaacacatgcaccgaatccctgtaacatcagttctgtatggttgcgcgaaagagctggctctgtgacagaagtcggaccctccgcataaagaccggccaaaaggacggctgattttacctgtgcggatgcaaccggagattgataatggataccgtgcaattctcccggttcgatccggagaggtgcacaaccgttatcattcagactggtgatgtgagcccccatgctgtttaaaggtgtcataatacgtttcattggtctggaattcaaagaagcatctccggataatgttgttgcaaagttctgcccggatagaattccggagatcagacgcgtggttgttccgctgtttcctacatttaaagtagaagcaggtgcactaagtccccgcagtcctttgccatgcaccaggatgcaggatggtttcctctcaatctccacacccatcctgcggaagcagtcaatggtagacagacagtctgcgccttccagaaaatgtgtgatctctgtggttccaagtgcaatggaacctaacataatagaacgatgagagatggatttatctcccggtatcgttacttctccttttaatccctttacaggacggattgttctaacgttcatatacaatatacctaaatttctgcagtaatcctacggcgcgcttgctggaatcttcgtcgtaaaattcaatacgcagaaccccttcttcaaattctctgttgtgtacaattccaatatttttgatgctgatattattagatgcaaggattgttgcaatagcagcgataccaccggcttcatcaatgatatcacagtatacggcaaacgattttttgataggtcccgcagaggacgaaggcatggaattgcgataattcctggacgattcaaatcgggtataaagatccaggtcatcttcacgttcgaccgcttctttgaaatcttcgagggagtcgatgtactgatccagaatctttacgatattatccttgttcttcagacagatattctgccacatgaccggtgatgaagaagcaatacgtgtgatatctttaaatcccccggcggcaagattcttcatcatctcatctttggtgtcatgtgttttaacaaagttgacgagtgtagatgcaatgatatgaggcagatgactgatcgttccggtaatctggtcatgtacccgataatcaaggataaccgggagtgctttcaggctttctacaaatttttcataggcttccaccttttcatgggcgacctggttggtcggtgtcagaataaaatatgcattttcaatcaacattgccttggaattactgtatccgcttttttcagaaccggccatcggatgtcccccgataaagtattttccgataccgagtgtctgtacttcctcatggatgttcgcttttacacttcctacatctgtaagaatgcagtcatcatccagatattctgtcagttgtttgagataagcagtattagatgcaacaggtgcgcataagaatatatagttacaattatggaaattattgtcaatcgtggttgctgccacatcgatgacagattcctgggttgcaagggcaagggcttctttatttttatcgaaagccacaatttcgtaatcaggatagtactggcggacggcttttgcgatagaaccgccgatcagtccgagtccgataaaaccgattttttgtttcatgatagattctccttccggcaagttagaatatatttataaaaaattacgaataaacagtgtgaataattcataatcaaaaaacttagtttctattgtaacgtgcgacagatgaatttgtcaacactataatactttaaagcgaaaaagcgatgtgcagaaacggtggaaaatgatgcaaactatatgataaaattgtaaagaaaattcagaaataagtataaaattacatatatttaaaaataaatacgaaaatgatatggttaaagtgtataaaagtgttgtaaaaaaagcaaaagtttagtacaatatttacatgagattttacaaaaataaggaggcagctatatgaaagtttacagaacggacgaaatcaggaacgtggttctcttaggacacggtggaagcggaaagaccagtcttgcagaggccatggcatatgtatcaggggcaacaagccgcatgggaaagattgcagatggcaacacgatcagtgattttgataaagaagagcaaaaacgtgaattttcgatcagtacaagcttggttccgatcgaatgggagaaagcgaagattaatattctggatacaccgggatatttcgattttgtgggagaagtcgaagaagctgtaagtgccgccgatgcagccgttatcgttgtatcaggcaaggcaggtgtggaagtcggaacagagaaggcatgggaactctgtgataagtacaaacttccgagaatggtatatgtaacagagatggatgtggatgatgcgagcttccgtcaggtagtacaggatctgacggaacgttacggaaaggtgatcgcaccacacttccagccgatccgtgagaatgaaaaactggtaggatatgtgaacgttattaagaatgcagcaagacgttatacaggcgtaggacagagagaagaatgtgagattccggaatattgtaaaccgaatctggagatctaccgtgataaattactggaggcagttgcagagaccagtgaagcgtttatggaaagatattttgaaggagatgaattctctgtagaagagatccgttctgcaatgcgtacggaagttatggacggagatatcgtaccggttgcaatgggatctaatatccaggcgcagggagttgccaatttgctttctgatatcgtaagattcttcccgagtccggacagcagaagctgtgcaggaatcaaccgcaagacgaatgaaatctttgaaggcaattatgaatttgcaaaagcaaaatcagcatatgtattcaagacaatggtagatccgtttatcggaaagtattcgttcgtgaaagtatgttccggagtattaaaaggggacgatattttgtataacggagattccgatgcagaagcaaaacttggaaagatttatacaatggtgggaaataaaccgaccgaggtcagtgagttgtttgcaggagatatcggagcaattgcaaagcttgcaaatacaaagacaggagatacgctttctactaaaaatacaccggtgatgtatggaaagacagaatattccaaaccatatacatatatgaaatacgtctgcaacaataaaggagatgaagataaagtatctcaggcattacagaagatgatggcagaagatgtaacactgaaaacagtcaatgacagtgagaaccgtcagacacttctttatggaatgggagaccagcatctggagattacggcaagtaaacttgctgcacgttataaatgtgagatcagactggagacaccaaaggtagctttccgtgagacgatcaagaagaaatctgacgtagattccaaatataagaaacagtccggaggtcatggacagtatggtcatgtcaagatgagattcgaagcgtccggtgatctggagacgccttatgtattcgaagaagaagttgtcggcggagctgttccgaagaattatttcccggcagttgaaaaaggcttgcaggaagcagttgtaaaaggtcctcttgcaggatatccggtagtcggtgtgaaagccgtattatatgatggctcctatcatccggtggattcatccgagatggcattcaagacagcaacagtccaggcattcaagaaaggattcatggaagcttctccggtattgctggaaccaattgcgtctcttacggttacgattccggatgattataccggagatattatgggcgatctgaataagagacgcggacgtgtactcggtatgaatccggtttccggtggaaggcaggaaatcgtggcagatatcccgatgacgggactctttggatactgtactgtattaagatctatgacaggtggaagaggtgtatattcttatgaatttgcacgttatgaacaggcaccgtcagatgtacaggaagcagagattgctaagcgtgcaaaagaggagtaatcagttaagaaaatgttaaaatagaagaaaagcccgtaagggctttttttcttgaaacaaagatgctataatctcttgtattaaaataccggtatcttgatgacaaaaaagatatgcgtggataattgtgaggtcagggaatgaaaattgtgattattggggatggaaaagttggtcataaattgacaacccagctgtccgaagaaaattatgatgtggttttgattgatcaaaatgaggggaaattaaaagaagcagtgaatgaacttgatattttctgtattacaggaaatggagcagatgtagaggtgcagagacaggcggatgtaccgcatgcggatcttgtgattgcctgtgcatccacagatgaacttaacatgttgagctgtctgctggctaagcgattaggtgccagacatacgatcgcacgtgtaagaaatccaatctattaccgacagatcgatctgttgaaagaggatcttcatctgagtatggcggttaatccggaacgtgcggcggcaaatgagatatccagagtactgcttttcccggagacaagtaaagtagagacattcatgaagggacgtgtagaactggtagaatttgtcgtaagggagaacagtgcacttgcagggctttctcttgcggaagtataccggaagttccagattaaaattctggtatgtgcagtaaaaagagggaaagagatctatattccggatggaaattttgttctggaaaaaggagataagatgcatatcgttgccgcgcatcaggatctgaagtcatttttcagggcactgggtcatcgaaatgcaaaagtaaaaaaagtattgatctgtgggggtggacatgtatgcttttatctggcaatgcagttgctgcaggtcggcatgcaggtaaagatcatagaacagaatataaagagatgtgaagaactttgtgagcttcttcccaaagcaacgattattaacggagatgctgcggatcatgaacttcttgtagaagaagggatcaatgaagcagatgcattgatcgcattgaccggaatggatgaagagaatattatcatggcattgtttgcaaagctgcagggtgttaataaaattgtggcaaaagtaaatgaagattcccgtgcacagatggtagagggactgggaattgactctattgtgtcagcaaaaagtgcgaccgcagatgcgatcatgagttatgtaagagcaagaaatgaatctgcaagtaatgcaaacgtagaatccatgtatcagcttttgggtggtaaagtagaagcacttgagttcattgtgaaatgtgaatgcagttttacgaatgtaccgctccgtgaattgcggacaaagaaaaataatctgattgcctgtattggaagaaaaagacggattattatcccgaatggtgaagatcacctggaagtcggggacagtgtagtagttgttacaatggatcatgtggataagttcagcgatatcctggaataatatacagaataaggagacggacaaaaagttatgaatacaaaaatagtaagatatattttgtgtagaatgcttggagtagaggcggctcttttgcttgtacctgttcttgttgcagttatatatcaggaaaaatgtggaattgtctttctgataccaattgttatattatgcctgctgtttttgatggtcggaagaaaaagaccggaacatggccagatttacggaaaggaagggatggtgatcgttgctctggcatggattttgtggtctttattcggagcaatgccattcaccctttccgggtatatacctagttatgtagatgcattttttgaaacagtttcaggttttacaacaaccggatcaagtattatcccggatgtggaagtattgccccactgcctgttgttctggcggagctttacccactggatcggaggtatgggagtactggtttttgtgcttgtcgtgacatctctggacagaaagaattccatgcatctgatgcgtgcggaagtgccgggacctgagaaagataagttagtaccgaaagcaatgtctaccgcaaggattttatatggaatgtatctgatccttactgtgatagaaatggtatttctcgtcatcggaggaatgaatctgtttgacagtatgatattttcgtttggatctgccggaaccggtggattttcaaactatgcggacagtgtggcacattttaacagtgcatatatcgatggtgtgatcaccgttttctgcgcattatttggagtcaattttgcattgttctattttatgatattgggtgattttaaatctatcctgaaaaacgaagagctcaggacatacattttgctgattgcaggtgctacggcagcgatcatgctcaatatccattcgttatatccgacgattggaaaatctttccgctatgcggtttttcaggtggttacggttataacaacaaccggatattcgacggctgattttgcacaatggccgatgttttccaaagcggtgcttatgatgctgacggtaataggagcctgtgcatcctccaccggcggcggaatcaaggtgtcacgtctgctggtcggaatgaaatgtgtaaagagagagattgtgcagctggctcatccgaagtctgtgggtattatacgcattggcgggaaaaaggtaagttcagatgtgctgcgcacgatttatatttattttattgcatatgtaggtattctgatcggatcagttgtgctggtttctctggacaattttgattttgagacaacgttcagtgcagtactcactacacttggaaatgtcggaccgggtatggcgcaggtcggaccgatgggaaattttgcagggttctcaccgttttcaaaattaatattatgctttgacatgctggcggggcgtttggagatattcccgttcctggtactgtttacagcaccggcgtggcgcagaaaattctagaataacaggcggcttttttcgtgccgtctgattttctatatataaaaggatgcaggaaaagccgtaaatggcaggcttttttgcatgaaaggagaaaagtatgaaaggtaaaaccaaaatgatgatcgcagccgttgttgtgatcatggctggaatctattactatgccgcaattccggctatcaatattcattcatcagagacatggtttttcatcatgatctttttggtgatactggcagttttgtatctgggaagaaagaaaatgaacaggtatgagatcaaagaaaataaagtggtaaaaggcttcctgggagtagtggtggttcttggagtggtatatctgcttggaacactgctgtcttcaccggttgtaaatgcaaagaaataccagaaacttatgacagtcaaagaaggggaatttgcaaaagatgtagaggaactgtcatttgacaagatcccgcttctggataaagatacggcagcacttctcggtgaccgtaagatgggcagtatggtagatatggtatcccagtttgaggcagatgacatttacagtcagattaactacaaggggaatccggtacgtgttaccccgttaaaatacgcaaatctgatcaaatggtttacgaatcagggggaaggaattccggcgtatatccggatcaatatggcaaatcagtctacggagcttgtaaaactgaaacagggtatgaaatatacaacaagtgatcattttaaccgtaatatttaccgccatctgcgttttgcacatccgacatacatttacggtgaattgagttttgaaattgatgaaaatggtgatccgtactggatcgctccggtaaagaaatttaacatcggattattcggtggtgagacggttggaaaagttgttatatgtaatgcagtgacaggaaagacgaagacctatgatgtcggaaatgtaccacagtgggtagaccgtgtatattccgcagacctgctggtgaatctgttcgattattacggaacattgaaacatggcttctttaacagtgtactgagtcagaaagactgtctggagacaacggatggttataactatctggcattaaatgatgatgtatggatgtataccggagttacatctgttaacggagatcagtcgaatgttggatttgttctggcaaatcaacgcacaatggagacaaaatactacaaagtagaaggtgcgacagaatcttcagccatgtcatcggcagaaggacaggtacagaacctgaaatatcaggcaacattcccactcttattgaatattgccggtgagccgacttattttgtcgcattaaaagacgatgccggtctggtgaagaaatatgcaatggttaatgtccagaagtatcaaatcgttgcaattggtgacagtgtcagtcagtgtcaggagaattataatgaattactgttgaaaaatggtgtgaaagaacaggaaaaggatacgcggaaggaagaagaggtatccggaaagatcacgaagattgcgcaggctgttctgaatggaaattctcattattatctgatgctggagaattctgacgcgatctatgatgtatcagtagcagatatcatagatgtgattcggtgtgagctgggagaacaggtgacggtaacgtataaagaggataaggatgtcaatacagtgacaaagttaaataccggtaaagatgcaaaagaaaaaacagcttctgataaagaagaggcagatgcacaggaataatagctggcgatacattttaccgaaaagatataaggaacgagagagtcatggagattagtatacttcttgtggaacagatcatagctatgtttctgacaatggcggttggattcggagtggtcagagccggactttttaagacggaagacagccggatcatttcaaatatggttgtgtatatctgcaatccatgtgtagtcgtacatgcatttcagattgaactgacggacgacaagataaaagggcttatgatcgcggttgggatgtcggtaattgtgcatgtgatcctgatcgtgggttcggaattattatcatatataattcattttaacagcatagagaaggcatccattatttatacaaatgcaggatatctggtgattccgctggtatcggcggtactgggcgaggaatgggtgttttatacgacggcatttattctggtgcagacgatattgatgtggacacacggcgtaaatctgatcgggcaggagaagaacctgaatatccgtaagattctgtgtaatccgaatgtaatcgcaatgataataggaattgcactttttgcgttggagatccgtcttccggcagtgatcgacagctgtgtcagtgggtttggcgatatgatcagtccggcgagcatgatggtgatcggaatggtgatcggtgatgtagatctaaggtgggtgttccggcagaagcgtccgtatctgatctgtatgattcggctgatcctgttcccgttaattgcggcaattgcttttgcgggactggagcggaccgggttacatccggatgcggagtatattctgatgatcgtactgatcgcaactgcagccccggcagcagcaatggtcacacagcttgcacagatttatgaaaaagattccagatacgccagtgtgatcaatgtaatgtcagtaatatgctgtatcattacgatgcctttgatggttctgatttatgagatgctgattggataataaaaaataaaataagacagaaaaaaagcttcgcaagtatgtgcaatgcatattcctgcgaagctttttatatcgataacctgtcgatattataatcttataatccttcactatactgcgagatcttgtccagtacacgctgctttgcgtctccggtaagcggaacagggcagtagtcgttatagccgctggaagaagagatagaacaagggataatgtttaatttactgcttttcgttaattttccttttttattaaaagtaaatgtctgctgcacgatcatgctgtccgtatcacttggtgttgaattgccgccaaagcagaaattaccaagactatagcagatgtattttccattatattcttcaataccttcaagtacatgtgggtggtgcccgatcacaagatccgcaccttcatcgacagcaagatgtgcgagagccttctggttttcatccggtgtatactgcttttcgattccccagtggaaattcacgatgatgacctgtgcaccggcttttttcagggctttgatattttgcttcacctgagatgcacgtttttgatggtctgcaagttcatagattccggtgacaccgacttttataccttttatctttaaaatcttgatacggttataaccgaaggaagcaattccggcattctccagtgcggaaatcgtgtcggtataactcttctcgccataatcatgactgtggttgttggcgagattggctgcttcaatagaacttccggaaaggatggaagcatattcggcaggagctttaaaagcaaaggtttttgcctcacgggctgtctcgtcagtgagagttccttccatattgacaatggacaggtcgtcttttttaaaaacggatctgacatgctggaagaaataatcagcaccatgtgattcatagtacgcattcaggctggtagaatagttgaaactttcgtcggttccaagcgtacagtctccggttgagctgatggtaagagaaaccttgtccgtattgttctttccctttttactgagtgttaccgtttttaattctacggtgtctttttcagaagactttttttcggaaggcttctttttttgagtgttcttttttgaagatttcttttttttgctgcttttttttgcagtcgtttttttgctttttggggaaccggcagttttgtctgctgaggttgtgacagtaggaccggtgaatttatttacaacagcatggactgcggcccggatcaggaataggaatccgatcaggatcagtatcatggcaatgatcagcaggatacgctgaatctgtctcttgcgccttctgcgtgcccttttcttttttgcatctttaattccgctcatacgttttctctcctgtacatggcaggattgtcagacctgcctttttgctttttatatcttattgtgacataaaacgacagtccatttgtaaaatggactgtcggatcattctgtctcaataagaaagattagttcagatatttgcatccttctgtatttacgtcagcaagttcttctttgtttgcactgatgctgacatagaattcaacttcacattctttggaaacctgtttcaggcggtcaataaatgccggaatattatccagtgagatatcagcgtgttttaagataccatcgataaatacatactcgatatcgtgattagaactgtacataccatataaaaatccgatatattcgtcaatgtttgtgattgccgggaaatcatccatacaaattgtgcggatatcaaatgttacacttgctgtatcgcggtgtgtttttttgataaatacaacatttccgttacattttttcgcagcctcattggcctgctcgatcatctgctgtgtttttcctgttcctttcggacctgctaataaataaaccatggtaaacactctcctttatgtatcatatttactgatctgtatcagtagtaattacttatccttattatacactaagaaactggtgagaacaactaaaaaaatgaattttctgacaatttttttggctaaaatgttaactttgcgacaggaaaataattgaaagcatgtgatgaaaaatatgaggaatctgcgaggtatttctgtactttcttgaagacaggtcttgacttattttaacattcttcatataataatgaagaatattgaaaagacgcagaagaggagtattaagggtccggtgtctgataagagaactgtcggttggtgcgagacagcagacgaagactcccaactcacctcagagtccttttgctgaacggatttactgaagatcacataggcagaagcgggtgcttcccgttatagaagaaaaatgagtgcatctggcaggtaatgtcgggtgaagaagagtggtaccacggaatataagccttttcgtctcttataatgagatgaacaggcttttttatttttattataggatgtgtattcctgtaataaaatcagttaccatataaaaacaggaggacaaaaaaatgtcaaagatcccttataatcataaggcaattgaaaaaaagtggcgtgaaaaatgggaagaaaacccggtaaacgtccagtttgatgaagatggaaataagaaagaaaaatattactgtctggatatgttcccgtatccatcaggaaatggacttcatgtaggtcactggagaggatatgtaatctctgatgtatggagccgctataaattacagcagggctattacatcattcatccaatgggatgggatgcattcggacttccggctgagaactacgcaattaagatgggcgttcacccggagatctcaacagctgccaatattaagaatatcaaacgtcagatcaatgagatcgcagctctctacgactgggacagagaagtaaatacaacagatccgaacttctacaaatggacacagtggatctttgttaagatgttcaaagaaggacttgcatacgagaaagaattcccaatcaactggtgcccttcatgtaagacaggacttgctaacgaagaagtggttggcggaaaatgtgaacgttgcggcgctgaggttacaaagaagaaccttcgtcagtggatgttaaagattacaaaatacgcagacagactgttgaatgatctggataagctggactggccggagaaggttaaaaagatgcaggctgactggatcggaaagtcttacggagcagaggttgatttccctgtagaaggaagagacgagaagattactgtttacacaacaagaccggatactttatacggagcaacatttatggttctggcaccggagcatgaactggctaagagccttgcaaatgacgagacaagagaagcagtagaacagtacatttatgatgcttctatgaagtcgaatgtagatcgtatgcaggataaggaaaagacaggtgtattcacaggtagctatgcaatcaacccgatcaacggggcgaaagttccaatctggctgtctgattatgtacttgctgactatggtacaggagcaattatgtgtgtaccggctcatgatgaccgtgactttgaatttgctacaaagttcaatattccgatcatccaggtaattgcaaaagacggaaaagagattgagaatatgacagaggcttacacagacgctgtcggaacaatgatcaattccggagaatggaatggacaggaatcttctgtactgaagaaagaagctccgcatatgatcgaagagcgtggaatcggacgcgcaacagtgaacttcaaactgcgtgactgggtattctcgcgtcagagatactggggagagccaatcccgatcgtacattgtccgaaatgtggaaatgtaccggtgccggaagaagaacttccactccgtctgccggaagtagaatcttacgaacctacaggaacaggagaatcgccgcttgctgcaattgatgagtgggtaaactgcaagtgccctcagtgtggagctgatgcgaagagagagacaaacacaatgccgcagtgggcaggatcttcatggtacttcctgcgttacgtagataaccacaatgataaagaactggtatcaagagaaaaagcagatgagatgcttcctgtagatatgtatatcggaggagtagaacatgcagtacttcaccttctgtattcacgtttctacaccaagttcttatatgatatcggggtagtagattttgatgagccattccacaaactgttcaatcagggaatgatcactggtaagaatggtatcaagatgagtaagtcaaaaggaaatgtcgtatcaccggatgatctggtaagagactatggatgtgactctttaagaatgtatgaactcttcgttggaccaccggagttagatgctgagtgggatgacagaggaatcgacggagtaaaccgtttcctgaaacgtgtatggaaccttgttatggacagcaaagacgcagacattacagctacaaaagagatgatcaaagagcgtcataaactgatatacgatgtaacaacacgtctggaaagcttcagcctgaatacggtaatctcagcattcatggaacacaataacaaattgatcgagattgccaagaaa

SEQ ID NO: 2861 - DNA, 463 bp, Unknown
  gut microbiota DNA sequence
tcacaatcaaaacttcattcaataaattgaaatcaacaactccaggcggcagcagtttactgtcgatgattccctgatacaaacgacttcttttcggaagattatgcgtattttctttctgcgcctccacttcgtatatcacatcatcttcatccatagcatagacatctaaccggatctgccgattatccgtagacgttctttgttccttctctgtctgcggtggatgcttcagattcgtcttttgacttaatatgatgtctaacatcgtctttacattttcagggtcatccattgcttcatcgaatagaaatttgtccagcaagtttaattcttttaatgattttcttttgttcataaacagctctcctttcttatacagatataactcctttaaaagaaaaactgcttatttttatgaatatcatagcatacattttatatatataccagtatatatgaa

SEQ ID NO: 2862 - DNA, 3393 bp, Unknown
  gut microbiota DNA sequence
tgtagagctttaatttttctgattaaaatctgtctgttttatttttgtgaaacttctacaaatctcaaaaaactgttattaacttcttcatctactgattacgcatacaccgaaattataaccatcaacgactcatcccgtatctcatactgaaatattccctcatatttctctacaatatcccgaatattccgcattccataaccgtgtaatccattctcttttttcgtcgatataaatcccgatccattttggtctggtttctttgcaatcgcattggctatttcaatatagattaactgatttttcttttttatcttaattcgtatccatctttcttttcctttgatctgttcacaggcttccagtgcattgtccagtaaattcccgaaaagagatatgatctccctgtctgtgaacggaagcgtagagaaaacttctgtatcaatctgcatatccgttttttgtctctgcgcatctttttctttctgattgagaatcatatccaacatatgatttcccgtccagacatgaaaattatactctaatatatcttcactgagctcgttcagatattcatgcaagccgctccaattttgttcctgatcatagttcttaagcgcaaggatatgatttttcatatcatgaacaactttacggcttttgagcatttcctgataacgctcttccagtatctggacctttgtctgcaatgcttttttctcctgctcttccagttcggtcagcaacattgcatgctctgactcccatgtatctaacaacgcatcaagaatgatccatacaccaacaagtacaagcagcaggatcatatatatctcaccatataccggatataaagaatattctgtgacatcttcataagtaaaaccatcattaaatactgcaaatgcgatcataaacagtatccagaaaaatcccctgtaatcaccaggcctttcattgataaaaatatgatacaaccgcataaattctacaatctgaaaaaacaacatcaaaaaaagaatgcacaagaaaacaaaagcagtcggtttcgtatatccccatatctttttcaacgatggcaaaagcatttcgttatatgttctaacataatcgttcattttcagtgcctgatacaaatatccatacatcgtatgatgatggatccacggaactagaaaatacacctgaaggatgattcccatcacgatatctgcttttctttttctcgtccattctttcatgtcattttctcccattcttctcctgttttcaaattactcacataaatttctcatttgtttctaccttcttgatcaggaattttccaagtatccatataaatatccattccaacacaacataaccgagccacagtccgatacagttcttaacatatgctttttgtacacttaaattgtacattcttgcatggaatgttgccaacgtatacagcaccattacaactaccgccacttccatcggaattctgtaaaatacatacagttcatgttgtagcaaacgcatccgctctttctttttcatgcccatacatttcaaaaaatctgctctgttcttcttatcctctaactcagacagtacttttacatagacaaggaacatacttgcgatcgccatcgcactaataacaaatatatttacaatctgttttgttgcacgttctgtcttcatatctgcgaccgcagctgccttactgtaatagctgctgatctctgcatcgtagtccagatcagttttatgttttttagcaaatttctgcatttcattttcaatttccgatacacgttttttatcgacatggagcaaaacaagctttttcggtccctgcgatacagttactccatctatacgatcttttttatctgtaataatgcttccgtcaataatattcgtatacttccacattttttgcgcttttttgaagtattcgtccgagaacacaaccacattttccagttttccctgtcgaaagcagccaatcagactgccaaattcttctcctgcaattgtcctttgtatatatgtcggcgaatccagtttggcgcgaaacatagaaaatccttcacaggggattccgatatgtaaaaatggtttcttctttccatatgaccagtctaccggctgtgcctttaccgaacggtcctgctggtgcaccagatataccttatttccctttgcatctaacacattttgggataatttcgaagtctgtccattcgccttttttaacgcacggtaaatcgtctccgagattccgatctgttgtccctgcggtatcttttcttcccgaatactttccgacttttctgtcttgtctgcattggtcactctcaccatcggaaatgatgtgatatccgcatgatatgtttctttgatatgttcaaaaaaattatcatccctgtcatcagcaatacatacataatcatatggaaacagagattccggtttctctgcaatggtaactgaaacagccgggaaagcaaaataaaataatgcacaggtatgcaggatgactaacgcaaacatataccatgccgaagtctgcgatttgtgataaatctgattgtcctgtaacatatggtatatatacgttctcttctttcgcttatgccggatccacatactttccgtaaaacgtatcagcaggaacaatcctaagaacagaagagccattaactttatattctcatagtttctaagttcccggtacttaagcagactccatgcacaaagcacaaaaccaatgatcccgaataccggtacaaattttcgtggtactttttcttttcgtattcttcttaccgccgcattggtaatatcaaaatcagttgcaatatctctggtcgcagccagtgcaaccagataaatcagaaacatcacaagcagaacttttacatacgttttccaggttactgctgccagtaccatatctcttccgatctgaagatacaaacatttacgaagtatcattatgataccatttccaatgatacagcctgcaaaaagagaaccgataaatgagatcacaatttccagaccaatgatcagtaataatgctttcttacggattccaagtgttaaaaatatactgtaactctgcatccatttctgcatataaaaaatcagcacaaataccatcagaaatactgcacaaactccgattggaaccattgcattccacacgatcagtccaagtccttcccctatcagaaaattttctgcccggtgcaaccctgccatcatctgataagaaccaattccggcaaaaataagagctgtcacaatcgtcccgcataacagaaataaccggtagccctgccagtcatactgaaaatttttccagacaatctgataaaataatttcgtgtattt

SEQ ID NO: 2863 - DNA, 1056 bp, Unknown
  gut microbiota DNA sequence
cattctcttcccaaaatccaaatatacacatcaaattatttactttatcatatcacagcttctattgattcgccatcaacctttcaaaccaatcgctgccgcctgaattatttcttgatttgaccagtcttctgcaagatccatcgagtaaggttttatacccttatcataaaattgctggcaaacctatacgtattcttcataattttccggaactttgattccatactgatcaaacagtgtcttgttggcaataatcgtctgcggaattgcacagattggcaaccactgaatttcatcatctgtatccttataatattccactgcataggaatagtacttagaaaccacatcataagaagcaaaatccataagatatggctgtaaatcctgcgcatccgttccagagaatcgacgtactgtcatgatgtccggcaactcaccatgctctttaaaatagctatataaatcagtgtcattatttccaataataaattcaatatcctgatctggaaactgctcatggatataaggagcaatatttttcattaaacgattttcccacagatacacggtaaggtgatcgtcttttttagattgtccacatccagccaaaataccagttactaaaagtacaccagacaccaatgcggccagatttggtggctacacccccaagcccctgtagaataaataacgccagtactggatatcaaaaatcccgcaccggcgttatttattaaaatattttgttttttaatcttcaacactctctactgaagcttcttttttcttcctacttttaccagaaatcatcttgtgtcctgtataaatagccataatcatgcaaagcaaagaacttgctgcaaagtacttatggccttcttttgatcccttataacctgtataaaaagttccaagcattgtaatcagtgcaccgatagaccaatatttatgtgatttcattcagatacctcctgccgtttttcttaatcatataccttttaaaagatatatacaaactgaaagtttctttttcttgataaatggggatta

SEQ ID NO: 2864 - DNA, 16938 bp, Unknown
  gut microbiota DNA sequence
gcagctgaatttaaatataatggtatagagtatttgttaactggaacaatgaaacaggaagaatttgaaaaaatattaaaaaatttaatttttccaaaataaaagcgacagtttttgaaaaattatgtgtattaatatatgagggcagaaaaaattatgaatggaggtgagatatgaagaagaaaattgtgtctatatgtctgaccgcaatgctggtcggaggattgtcgatgacatccatacaggaggcgagagctgctgagggtaaagtaatagatggatctgtgctgacgcatgacgaagaatccatcggttatgatacgaaaggtacccggggcgtagatttgatgacaggatactccaaatgtacaaaattaggagaaggcaaaatttacgcaggagggacaacgattgcgagacaggtagtaaaaagtgtgcagatagcagtaatggtagagcgtgcaaaagaagaagatacagagtggtcatactatgatggttggcagaaggaaaacaaaaataccaacagagccatgtccaacagaacgctttacgttgacggtggttattactatcgcgtacgttgcacacatgttgctaacagcgatatgagcagttcctttactgatggaatttacatcgactaacaatcctaaaaagcatagaaggataagaacataagactaaaaaaagaagagcaaaacaaaaagattacaaatcaaaagatgaagagattaaagtaaagaagtggacggaaaaaccagaaaccatgcagaccatgacagtcaaacagtagttgggataaagtgaagattacagctgaatgaaacaggtaaaacagacaaagcaaaccataaggtaatgtaaataaaaagaagacgacaataaaaaaaccataaataaattcatcaaaaagtaagtgcacaatatgtaggagcggataataattagaaaatacaatgaaaaacaatgaaagaaatataataactattaataattatttattcgtaaccagtcaacggaagttttgacgagggaaaagcagggtgtgaaaaaagagaaaaaataccaaaattaaaaaatcaccaaaattaaaaaatcaccaaaatgaaaaaggatacaagtctcccggtcgggggacgagtatccttttttatctgcgttattcagatcagccgctgacgtattattcgccaagtgcctgtctcaaagctttggataactggtcaggacaagatgtcggtctttcaccacatctggttccttccaggcgcttgatgacttcatgtgcatccattcctttaacaaggctgctgattccggatgtgttaccggcacatccgcctacgaattctacgttagcaattttatctccgtcaagttctacgtgaatgagacgagaacagactccggttggtttgtaatccatatctattacctcctgataatgttcttgcatagttttagatgattcggtatcaacagacagaaaatatgttgactgccatacttcccgattataacagaaaaccatcaaattatccatacatttcgtcggttgaaatccattttcctatcgtctataataaggcataggtaaattcgtgaaacacaggaggatataaatatatgataggtattatcggcgcaatggaagaagaagttgcagaactgaagaaagatatgcagatcgaagagaccgtggagatggcaggtatggtattctgcaagggaacactcggcggaaaagatgttgtaatcgtaagaagcggaatcggtaaggtcaatgcaggaatctgtgcacagattctggtgagtcaattcggagcagatacattgatcaacaccggtattgcaggctcgcttgatgcacagattgatattggcgacatggtcatttccacggatgcactgcatcatgatatggatgcgactgtattcggtgatccggcaggacagattccgagaatggatacattgtcattcccggcagacagggagcttgtgaagaaggcggtagcagcgaatgaaaaagcgaacccggatattcatacatttacaggaagagtggcgagcggggaccagttcatttccgataaggaagtgaaagaaagaatcgtgtcattattccacccgatgtgtgtagagatggaaggtgccggaatcgcacaggccgcttacctgaacaaagtttcgtatgtcattatccgtgctatttcggataaagccgacaacagtgcgacaatggactatccgacattcgaaaagaaagcaatcgcccacagtgtaaggcttatgaaagaattgcttccgatgatctaagataacgggatgacctgcgcagtacagaatgttacaggatatgcacgaaagtgacagaaagcagcatttcccgtgcagaataggaagaacgaaataaagcgcccttctctttgatatacagtataatgcatatcaaaaaggagggctattattatgctggaaatgttattggacaagaagttgttatttgtgcttatggggatgctgaccggacttggagtggcagacaagtgtatcgtgagtatgacgatgaaacgtatgatagaggcggcgggaagtatgagcaaaagcaatcatccgctgatgcgcctggtccgggcgaaattcgaacatgcatgtatgatcagtgacacggtggaaaatgtaggggtatttgtggataaatatctgtacgaatacaaagtatgtggattacgtctgcattcgctccggagactggaaaagatgtgttccggtcttctgatcgtaaccggacttgcgggagcgggaattacctgtcaggtctatggaatgggagacgaagcgttgcggatgggcgctgccggctgcggactcggaatcctggtgtggctgttccacctgacaacggacgagaattactgtatggagatggcgaagaattacatggttgattatctggaaaatgtatgtctccgcaagtatgaaaagatgaatcagaaggagcggaccgtgcgtgtaaacatagaaaacggaccggcggaagaggaaatacagaagaataaaatacaaaaagacgaaatacaaaaagacgaaatacaaagagatgaagtacaggagacggaagccggaacagaagagacacctgccccggtaccggatcacagtgtagtccatatgcagcgtgagaacagacggagagaacggactcaaaataccgcaaaaaatctggcaaaagcatcggcaggacttgccggtatggacggaagtaaaagcccggaagcggaagaacagaaagatgcaccggaggagcttgcaaaggacgagatgatacgccagattctgcgggagtttatggcttgataatataatgttattttgttaaaatatatgcatgtataatatatttgataaactaaagaattatagtgattccgactactacgcattccacatgccgggccataaaaggaatctggatctgatggacgggacctccccgtacctgatcgatatcacagaaatcgacggctttgatgacctgcatcatgcagaagggattttgaaagaagcgcaggaaagagcggcagaggtgtaccatgcggatgagacacattttcttgttaacggaagtaccgtcggaatcttgagtgcaatattagggacaactgaaaaaggcgattccatacttgtggcaagaaattgtcacaagtctgtgtatcatgcgatatatctgaatgaactggatccggtctatctttatccaaagtttgatatagaactgggactgagtacagagatcgatgcagaagatgtgcagaaagcactggaagaacatccaaagatacgtgcggtgatgatcgtatcaccgacctatgacggcgtggtgtcggacatcgaaaagattgcagagattgtacatgaagcgggatgcctgctgatcgtagacgaagcgcatggggcgcattttggctttgatccgtatttcccggagagtgcgaatatgtatggcgcagatcttgtgatcaacagtcttcataagacgcttccggccctgacgcagacagcgttgctgcatgtgaacggggagcgggtgaaccgcaggaaagtaaagcggtatctggatatgctgcagacgagcagtccgtcgtacatactgatggcaagtatcgatgcgtgtattcatctgctggaagagacacaactgcagaagtgcagtattttcaaagaatatgcggcacatatcgataccctgcgggaagaattgaagaaactgaagtatctgaagattatccggacggagaatacagacagatatgacaggtctaaatttgtgatctctgtaaagcatgccccgatgtccagtcatgaattgtatgaaagactgcttcgtgattatcatttgcagatggagatgcttgccggaacctatgtcctggcaatgacgacggtaggggatacgcaggaagggttggacagattgcgggatgcattgcttgcaattgatgctgagatcgatacaaagttaaagtcaggatccggacgggaagatgccgggcaggagcagaaaccgatgcaaatgaccgacacggatctcccgctttccggaagacagccgtcactggaaaaggtgtggacgattgcgaaggcagtgaagtgcagagataagatgcagaaccagaaccaccagaaggattcagaagacattctgtatttggtgaacccaggcaagatggaaaaacgaaatttcaaggacagcgccggatgcatttccctggaatatgcgtatctctatccgccgggaagtccgctgatcgttccgggagaacgcattacgcaggaagcggtggagattctctgctggtatcaggaacacgatttttcaattgaaggactgcaatcagaagatagcatagaggtatggatagatgggtaagatattttacatgatgggaaagagttcttccggtaaggatacggtctataaagagatcagaaaagagcttcccgagctgaagacgctgacattatatacgaccagaccgatgcgggaaggtgaaaaagacggcgtggaatattattttgtttcgaatgaaatattagaacagtatggagaagaaggcaaaataattgaacttcgtacctatcagaccgtgtatggtgactggaaatatgctacaatagatgatggacagattcatctgaccgggtctgattacctgatgatcggtacgctggaatcttatatgaagatgaaagcgtattatggacaggagaatctggttccgctttatattgaagtggaagacggggaacgcctgatgcgtgcgatcgcaagagagcggcagcaggaacatccgggatacgaagaagtctgcagaaggtttctggcagatcagaaggatttctcagaagagaatcttgcggcagcaggaattacaagaagatatcagaatgacgataaagtacgatgcaaagaagagatagtagaggtaatacgagatgggaagctttaaagatgtggttggccacaaagacatattaaaatatatcagtagcgcagtggagaataacagagtgtcgcatgcgtatattctgaatggggagagaggttccggtaagaggatgctggcgaatctgttcgcaacgactcttttgtgtgagagcgggaacagtgaaccttgcgggaaatgtcattcctgcaggcaggcagagagcggaaaccatccggatattatccgtgtaacacatgagaagccgaacagcatcagtgtagatgatatccgtacacaggtgaacaatactgtggatatcaagccgtatcagggaccatacaaagtatatattatccctcaggcagatctgatgacacctcaggcacaaaatgcaattctgaagacgatcgaggagccgccggcatatgcggtatttttactgctgacggagaatgcagagatgttacttccgacgatcaactccagatgtgttatgctgaagctgcgtaacatcaaagatacactgatcagaaagtatctgatggagaatctggagataccggattacaaagcagatatgtgtaccgcatttgctcagggaaatgtgggacgcgcgatcatgctggcgaattcggagcattttaatgagatcagagaggaagcggtacagctcctgaagcatatccatgatatggaactgagtgagattgttgctgcggttaagaatatatctgtatataaattagagatcacggattatctggacattatcatgatctggtacagagatgtcttactgtataaagcaacaaaagagattgacaaggtcgtattcaaagaccagttacagagtataaaagaacaggcgagaaaaagctcttatgaaggaattgaactgatcctggagagccttgagaaagcgaaagccagactgaaagcgaatgttaactttgatctggttatggagcttttgttcctgaccataaaggagaactaatcatatgacgaaggtaataggcgttagattcagaaccgccggaaagatctatttcttttcgccgggaaaactggaggtagagacgggcgataaggttatcgttgagactgcaagaggagtggaatttggttctgtagttaccggaccgaaggaagtggaagacgataagatcacacagccgttaaaatccgtgatccgtcttgcaacagacgaagataagaaaaaagaagaaaagaacaaagaaaaagaaaaagaagcattcaagatctgcctggagaagatccataagcacgggttggagatgaagctgatcgatgcagaatatacatttgacaataataaggtgctgttctattttactgcagacggacgaatcgatttccgcgagctggtaaaggatctggcaagtgtattccgtacaagaatcgagttaagacagatcggtgtgcgtgatgagacgaagatccgcggagggatcgggatctgtggcagaccactttgctgtcatacgtatctatccgagttcgcaccggtatcgatcaagatggcaaaagagcagaacctttcactgaatccgacgaagatctcgggtgtctgcggaagactgatgtgctgtctgacgaatgaagaggagacatacgaagaactgaacagccatcttccggcaaatggtgatcatgtcacaacaccggaaggcttaagaggagatgtccagtctgttaacgtactccgtcagctggtgaaggttgttgtaacactggataatgacgagaaagagatccgtgagtatccggcagcagaactgagattcaagccgagacgtaagaagaaagacgtaagactttccaaagaagagatgaaggaactgaaggcgttagaagaaaagaacggagcgtcaaagttaaatgatgactaaattacttccgaatgaaagactggatgacctgcagatcagaggatacgagatcatccagagtccgggacggttctgttttggaatggatgcggtgcttttgtccgcatttgcaaatgtgaaaaagcacgaaaaagcactggatctcggaacaggaacggggattcttccgatccttctggaagctaaatatccgggcctgcattatacaggactggagatccaggaggagagcgcagatatggcaaggcgcagcgtcagccataacggactggaagagaggatcgacattgtaacgggagatatcaaggaggcagcatccatattcggagccgcctcttttggagttattacgaccaatcccccgtacatgatcggagaccatggactgaagaatcagaatacagcattgtatattgccagacatgaggcactctgcacgctggatgatatattaagagaaagtgcgaaactattgaaggtcaaaggaaggttttacatggtccacaggccattccggcttccggagatcatgacaaagatgtgcgcatacggaatcgaaccaaaacgtatgcggctggtatatccgcatatagacaaagaaccgaacatggttctgatcgagggtatgaaaggcggaaatccgagaatgcaggtggagccgccactgatcgtatatcagaaggatggaagttatacagaagaactgcttgagatgtacgggatgaacaagagcgagcataagatggaggagtaagagatggcaggaacattgtacttatgtgcgacaccgataggaaatctggaagatatgaccttccgggcggtgcggattttgaaagaagcagatctgattgcggcagaagataccaggaacagtatcaagcttctgaatcattttgagattaagacaccgatgaccagctatcatgaatataataagattgaaaaaggacacaaacttgtggaacgcctgcagaatggtgaagatattgcagtgatcaccgatgcaggtatgccgggaatctctgatccgggagaagaactggtaaagatgtgccaggaggccgggatcacggttacagctgttccgggagcctgcgcatgtgtgacggcgcttacgatatccgggcttggaacgagaagattcgcatttgaagcatttcttccgacggataagaaggagagacaggctgtcttgaatgaactgaaagatgagacaagaacaatggtgatctacgaagcaccgcacagactggtccgcacgttgaagacgcttcgggagacgcttggcaacagacgcatcagtatctgccgggaactgacgaagaagcatgagacggtatttgccacaaagatagaagacgcactggcatattatgacgtacaggagccgaagggagaatgcgtcatggtgatcgaaggaaaaagcagggaagagatccggagtgaagaaaaagccagatgggaagagatgagcatggaagagcatatggaactctatctcggacagggcatggataagaaatccgcgatgaaacaggtggcaaaggacagaggcatagggaaaagagacgtctatcaggcactgttacagacaccttgaccttaaataacgttccgttcgtcaacttgtatagaaaatgaaaaaaagattgttcaacttgggtattacccaggttgaactttttttatatactttttatcagaacgaaacaggtaacaaaatgaaataaaacgattataaatcaggaggattataacaatggcaagtttatcattaaaacacattaacaaaacttatccaaatggatttgaagcagtaaaagacttcaaccttgagattgaagataaagaatttatcattttcgtaggaccatccggatgtggtaaatctacaacgctccgtatgatcgccggtctggaagatattacttccggagaactgaagatcggggacaaagtagtaaatgacgtagagccaaaagacagagatatcgcaatggtattccagaactacgctctgtatccacatatgacagtatatgataacatggcatttggtctgaagttaagaaaagtaccaaaggaccagatcgacaaaatggttcgtgaggcagctaagatcctggatctggaaccactgcttgaccgtaaaccaaaagctctttccggtggacagagacagcgtgttgctatgggacgtgcgatcgttcgtgatccaaaggtattccttatggacgagcctctttcaaacctggatgcaaaactccgtggacagatgcgtatcgagatctctaaactgcaccagagattaggtacaaccatcatctatgtaacacatgaccagacagaagctatgacactgggaaccagaatcgtagttatgaacgcaggtattgttcagcaggtagatacaccacagactctgtacgattatccatgcaaccagttcgttgccggattcatcggatcaccacagatgaactttgttgatgcgaaatgtaaagtagtcggaaataaagtatacctggtagcaggaccttcagaaatcgagcttccaccggcaaaagcgaagaagctgatcgatggcggatatgaaggaaagacagttgttctcggaatccgtccggaagacgtgcacgatgagcagatgttcatcgaagcttctccaaatacagtaatcgaagcaaagatccgtgtatatgagatgctcggtgcagaagtattcttatacttcgattatgaaggatcaagtatgacagcaagagtggatcctagaacaacagcaagaacaggtgatactgttaaatttgctctggatgctgagaagatccatatctttgataaagagacacaggttacaatcacaaactagtctgtaatgaaggcttggtataagagccgcaattatcatgaaaaacagatgaatataagaggaccgggcgtaagaaagcgtccggtcttttcgtttttttcagcagacaataaaattttgctttgttaaagcatgattatctgctataatgtattcgtaatgcagttcgttagcgtgctaaaatgtatacaagtatgcaaaagaacacgaagaacagcattgcggataggaaatggaggacaatgcgtgttatcaaatcagatattacacaaaacagcacaggatatcagggagattacaggatttgactgtgcaatatgggatatgcaggggttctgtctcgtaaggacgaatgagactctgaccgggtatgagatccagatccaggatttccgtgatgacgaagaagaaccggaagagatgatcttagatgagatgggaatgttccgcatctatgaagacagtgatccggtatatgtattgatgctgcatggaaatgcagacggcatggaactggcaggacgtatgggagccagtcagcttcgtaatcttctttatgtatacaaagaacggatggataagaaccggtttattcagaatttgcttctggataatctgcttctggttgatatctataatcaggcaaagaagatgaagattccggcagaactcaagagagtcgtattcgtgatcgaaccgaagaatgaaggagatgtcctggtacaggaaactctgaaaggtctgtatgcgacgggaacaaaggatttcgtaacggcaattgatgaaaaacatattattcttgtgaagtcactgcagtctaccgacagctatccgcaggtagaacagatcgccaaagagctggtcacgacgctgaatatggaagccatggtaagtgtaagagcggcatatggaacaattgtagaagaattaaaggatgtatccagatcatacaaagaagcagatatggctttggaagtcggaagagtgttttatacagagaagaagattcttgcatacaatgaactcggaatcggacggctgatccatcagcttccggcatcactctgcgagatgttcctgaatgaagtattcgaagatggcaaggccgatattttcgaagaagaagaactgacgactgtttatacattctttgataataacctgaatatatcagagacggcaaggcgcctgtatgtgcatagaaatacactggtgtatcgtctggagaagattcagaagaaaacaggactggatgtgcgcgtatttgacgatgcactgacattcaagattgccatgatggtagcagatcatatgaaatatatgaaagaataatcaggttagcagatgtctggactcagacattttaatatattcataatacgatagtaggaggacaaaacatgctgaaattatatgacaagggagtctatttactgaatggaacagagattgtggaagaaaaagaagcagttgctgcaaaaacaggtaaagatgtgactccacaggaagctgcaaagaatacaatggcatataacattctggcagcgcataacacctcgggaaatatggagcgtctgcagatcaaattcgataagctgacatctcatgacattacattcgttggaattattcagacagccagggcttcagggcttgaaaaatttccgatcccttatgtacttacgaactgtcataactctctttgcgcagtcggaggaacgatcaacgaagatgatcacatgttcggtctcacctgcgcgaaaaaatatggcggagtctatgtaccgcctcatcaggcagtcatccaccagtttgcccgtgagatgctggctggcggcggtaagatgatcttgggatcagacagccacacacgttatggtgcacttggaaccatggctatgggagaaggcggaccggagcttgtaaaacagcttctgaataagacatatgatattaagatgccgggggtagtcggaatctacttagacggtgagccgatgaaaggtgtcggaccacaagacgtggcacttgcgatcatcggtgcgacattcggcaatggctatgttaacaataaagtgatggaattcgtaggacctggtgtgagtaagttaagtgcggacttccgtatcggtatcgatgttatgacgacagagacgacctgcctgtcatccatctggaagaccgatgataagattaaagaattctatgacattcatggaagaagtgaagattacaaagaactcaacccgggagatgttgcttactatgacggtatggtatatgtaaacttaagcgagatcaaaccaatgatcgcaatgccattccatccgtctaatgtatacacgatcgatgaagtgagaaccaacttaaaagacatccttcatgatgtagaacagaaagcactggtaagtctcgacggagcagttgactattctctgcaggataagattgtaaatgggcagttatatgtggatcagggaatcatcgcaggatgtgccggcggcggatttgaaaatatctgtgcagcagcagatatcatcaaaggacattatatcggttccgatgagtttacattcagtgtatatcctgcaagtacaccgatctacatggaacttgtgaagaacggagcagttgctgaccttatggaagcaggaacgatcgtgaagacggcattctgcggaccatgcttcggtgccggagatacccctgcaaacaacgcattctcgatccgtcactcaaccagaaacttcccgaaccgtgaaggctccaaacttcagagcggacagatcgcatcggttgcacttatggatgcacgttccatcgctgcaacagcagcgaataagggattccttacacctgcaactgacctggatgtggaatataaaggacagacttatcattttgataagaacatttatgcgaaccgtgtctttgacagccatggtgtagcagatccatcggtagagatcaagttcggaccaaatatcaaagactggcctgcaatggcagcacttccggaaaacttacttctgaaagtggtatctgagatccatgatccggtcaccacaacagatgaactgattccatccggtgagacctcttcttacagatccaaccctctgggacttgcagaatttgcattgtccagaaaagatcctgcttatgtaggccgtgcgaaggaagtacagaaagctgagaaagcaattgaagcaggacagtgtccgttagaagtattagatgaactgaaaccggttatggataagatccacgagacatatccggagacaggaaaaggtaatctcggaatcggaagcacgatctttgcagtaaaaccgggagatggttctgcaagagagcaggcagcatcctgtcagaaggtactcggcggctgggcaaatattgcgaacgaatatgcaaccaagagatatcgttcgaacctgatcaactggggtatgcttccttttattacggaggaagatcacgagaacttaagcttccgtaacggcgactatatcttcgtgccggagatcagaaaagcagtggaagataagaatgccgagatcaaggcttatgtggttggagattctctgaaagagatcacgctgaagcttggtgatatgaccgatgccgaaagagagatcatcctgaaaggatgtctgatcaattattacagaggataatatgttttatttttggtaccgttttgttttggaaaattttgatctgacattcggacttatgtatacagcaggaaatcacggatttcctgctgtttttccttattcggagatgcagacactgcctaaataaggaaaattcttgtataatatgataaaatacctgcaacaatgtgagtaggaaatgactcttatttatataggatttataataattaccggaagattaaaaatagtaataacagattcatatctgagggaggttacgatatgatatgcagtgtaaaaaggttctcggaaatgtatgaaacggtttaccgtgatctgtaccattacgcactgtgcctgatgaagaatccacaggaagcggaggatgcagtgagcgaggcggttgttgcggcatacgagaacatacataaattaaaaaaagaagaagcattccgcagctggatatttacaattctgacgaataaatgtaagaagagattgaagaaggcattaaaagaagagccgggaagagaggaagaacttccggaacagccggttgtaccggattatgatctggcaatggacgtcaggaaagcattcttcgtgttatcggaagaagaacagatattagtcggattatccgtattcggcgggtattgcagtcaggagatcggggaaatgatgcggctgaatccgaacacggtacgatcgaagcggagccgggcacttaaaaagatggaatgtgtgttaggcagttacggagaaacagagcagggaagaaaggagtgagaagtgtatgcggcgtgagaatgaacaggaaaaaaagcagaacggatactgcgaacaggatatggtggatcagattgcacgattgtcagaaaacacagaggtaccggacagtctgagaccggaaaatatagatcggttactaaaagggaaaaagcagaagaaacattttcattcataccggatcggacttgcagcagcctgtgtagcagttgtgacgggaatcatagtgtggcagtatggaagcctgcatcatggaatgacagactctaaaagggtgtcagcagataatgcagaaaggaagatcagcggcagcaggaagatcaggatagccgaaagttatgatgaaatctataaatatatcaaacggtcgcaaggtaacgaaggaattgcaatgtatgcaagaagtggaaatgagacatcggcagcagcggatacaggcagtgggaatgagacatcagcggcagcagtggacgcagatggcgggtattcgcagaccaatgtccggcagtccggtgtagatgaaggagatattgcaaaaacagatggaacgtatctgtatgtacgggaagataatggccggacgatcgacatcgtagatgcagggaaagggcaactgaaaaaatacagtgagatcacattggaaaaagaatatgcgatccaggagttttatataaatacagaccggaagaaactggtggcggtatgtcagaaagaatgtacagatgcagacaataaaaagcaggtcggtacagctgtccggcaacagacaaaaactgcggcagtcacctatgacatcagtgatatcaaaaagccggtaaaagaaggtgaagtaacacagagcggtacttacaattcatcgcgcatggcagacggatacctgtatctgttcagtgagtattatacaggaagtaatgtggttaaagataaaccggtcacctatgtaccgatggtgaatgacaaagcaatgagccaaagcagtatctgcctgcctccggaaaactgtggaatgatgtacgaagtgatcagttctgtggatatcagtaaaccggatgaaacggcagatcataaagcgatcctatctgaaggcggtcagatgtatgtcagcaaaaaaaatatttactattatgaatcagggtggcagcaggacaatcagactgtgacaacacttagaaaaatttcttataataagggaaaattaaaggcagcagcacagggaaaagtaaaaggttatctgaatgataccttttcgctggatgaatacaagggcaatttaagattattcacgacaaataatgacgaaaatctggtgacgatactggataagaaactggataagatcagtaccatcgaaaatctggcaaaaggcgaaaccatctattctgcaaggttcatgggcgaatccggatattttgtgacatatgagcaggtcgatccgttattcagtgtagacctgtccgatccgaagaagccaaagattctcggtaaattaaagattccgggattttccgaatacctgcatttctatggagaagacagactgctcggtatcggaatgtcaaccgatgaagaatccggcgtggcagaaggagtaaaaataacaatgttcgatatatctgaccggtcagatgtaaaagaagaatctacacttgtgctggatgatctgtacggaagccatgcggcatatgattataaatcggtgcttgccgatccggagaaaaacgtaatcggattatccggttacagccagaatggggaaagctattatctgctgatatacaaccggacagacaggaaatttgagacaatcctgcaagaagaagtcaatggaaatacatctcagggaatccggggaatctatatagaagatacgctgtatgtgatcagcggaaatattattgaagcttatgatatgaatacgggtgtgaaaagcggagatatcatattataaatttaacttgggatttaatttattaacggggaagcggcctctcagtccttgaaggaaacaatagataaggcttcttgttcaggttccataccataagaaacactaagagagtcagaatcacctaaaagcaaaggaactacgctcaaactcggcgttcgcctcaaacacgttcgcttcgtttctttaacggtgcttctgactctctaattgtttctaacggcattccacattcacaataatccttatctattgt

SEQ ID NO: 2865 - DNA, 38959 bp, Unknown
  gut microbiota DNA sequence
atatgccgagtttcaaattttgaaagcctgtttttagcagaattttgcccctttagaattgacccgccgatggaacctgaacaggaacacctttccaagctttattccggttcgggtatccatagccttcctgaattaaatctcaaattaattccgatactgtgtatttttattactgcagctggctcagacggctgcggagtacaggtccgacgatgatcgcaatgataatcttcgctgcgtcaccggcaagataaggaattactccgacagaaagtgctgcaacgaatgacattttcaactggatcgcaagccactctgtaccgaagatataagtgactgccataccgatgatcataccgacaactgccaggattctgttctttggaaatttatcaacgaacagtccggaaatcagtgcaaggaagatgaaaccaatcaggtatccgccggtaggacctgcaagctttcctaatccaccggtaaaaccggaaaatacagggagaccgacaagaccaagtaacagatatacgatgtaactgatggttgcatctctaaaaccaagtacatagatactgatcatgatcaccaggttggtaagactgatcggtaccgggctgaccggaatcggaatcgccataggagcgaagatacaggtgattgcagtcatcaaagcaatcagaaccagtttgcgggtggaaagctttttcgttgttgtgctatttactgtgttgtccatagtggtaattgtctgccgtatgacatggcagaactcctttcctttagttttatatcaaaaatataacagaagtataaaataaacaggataaaatgtcaactgtaaaagatgattggttaacaattggacatgcacaagcgtatgatgttaacaaaagcatacgatttgaaaatgtatagtattgtgtaaacattaaaataaataaagaaaaatcagataattcaactgttggaatgaaataatggaaaataaataaaattaattgcaaaaagtattgacaaaataaaagccgaatgatattatataatcaatccaaaggaaatccaaaataaacaaaaaagaattcctgacgagaaagggaatcttgaaaattgaatatcacatattttataagatgtatttttattataaattctcaattcgtttaagaatcgaaaaatacaggatatagatatgaaatatctggtaaggcatcggatatcaaatatcgtaaagtatattgtagagaaagagaatggatgaataacgattatagaatggtatcaaggggatatggatcataatcgtagaagagatgagataataaattccagcttatatcttaagtgataaaagaaaagtttatcaaggatgaagaatatttcatatgtcggtgagatatcgttgattggaaatttatgaaaaggaggcttaatccaatggacacagtagaatcatcgaatcaatatgttagtggtatggcaggtagaagttcccagagaataagcctttattataatagataaaaggccggtagaggagattcggaagaatagaacagacggagaaaatatacaccggacgataaaaagaactgcagacatattgaacagaataccacatatttaaagatattattaatatgtgtaaagaaacatgaatagtagatttgaatgaatgtgcaaagaagatgagtaaaagatcatcggaaagcatacaaaggcgacagggaataaaaattaaaaatcattctccgatataaaaattaaatatgataaaattgaatatgtaacagccatcataggaaagaatatgatggctgttttttacgttgatatcagagagcagccggcagatattttacagggataaaaaaattgtaatttttgtaatatttttttaacatatttggcgggatattttgacaataaacaggtcatatgataaacttatataagtaaaattgtagggaaatacgcttttttaaaataaacatttgaggtgagaaatattggataaatatgaatatagggtgaagaccgagcaaatgcttgatcatctggaaaagaaggagtaccagcaggcaaaggaaattgctgatggtatagactggcgaagagtaaagaatgcgtcaatgctcaatacagtcagtgagatttatgaatataacggtgagtttaagaaggggagagatatactgttcctggcatttgacagagcaccgggaagcagaaaaattgtatatcgtttaggcacactggcactgaagatcaaagatatcagagaagcaacggattgttatgaagaattcgtaaagctggcaccaaaagatccgaatcagtatattttaaaatataagattctgagaacacagggggcatcgctgacagatcagattacagcactggaagaatttaaaaaagcggaatatattgaaaagtgggcatatgaacttgccaaattgtatgatgaagccggaatgacagcagaatgtctggaagaatgtgatgatctgatcttgtggttcagtgaaggcaaatatgtataccttgcaatggaactgaagatgaagtataagccactgacaccacttcagcaggagaaatatgacagccgtccgggagcggttaagaagaaaccggaaccggagaaacaaccggaatcaacactggaagaagtggatgacgagaatgaatataatgaaggtacagaagagattgttgacgtacaagaagagccggtcagagagccagtgacagaaagagttgatgaatctgaagttcaggaaattcctccgcaggaagtaccgatgcaggaaactgttgtacaggaagagattccacaggaagtgccgatgcaggaaactgttgtacaagaagagattccgcaggaagaaattgtagaagaagctgcagaagaagtcgtggaagaagaaccggtatatactgaacaggaagaggctgtggaagaacatggatcaacgatcaaacaggttgtgacgggagctactttggaggaagctttagcgcagggcatggcggttgccaatggcattacaattgaagaagaagcaatgaaggagcgtgaagatgagattctggcgaatggtcagatgatgatcgatgatattcttcagaaatgggaagaaaaacagaaagaccacgaagcagcaatcgagaagcagaaagcaaaagatgaagagcggcttcagaaagaaagagaacaggctcgtatccgccaggaagaagaacgcagagaagttgagagaaaagcggcggaagctgaggcaagaagaaaagccgaggaagaagaggcagcaagaaaggcggccgaagaagaggcaagaagaaaagccgaggaagaagcagcaagaaaggcagccgaagaagaagcaagaagaaaagctgaggaagaagcagcaagaaaagcggctgaagaagaagcaagaagaaaagccgaggaagaagcagcaagaaaagcggctgaagaagaggcaagaagaaaggccgaggaagaagcagcaagaaaggcggccgaggaagaggcagaaccgataagcaagacacagagaattccggatgatattgtacgtctgatggaagaaatgggaaatgaagagtcggaagaagaactctatgaagaggattttgaagatggttcggaaacggaagaagacttcattgaaggaatcgaagaagaacttagcggaatcgatatgagtggaagcagttttgaagaagccgatttcggtgatgaagattttgaagaagctgatttcgaagaggaagactttgaggatgaagactttgaagaggctgatttcgaaggggaagactttgaggatgaagactttgaagaagctgattttgaagatgaagactttgaagaggctgatttcgaagaggaagactttgaggatgaagactttgaagaagaggacgaagaagaggctgatttcgaagaggaagactttgaagaggaagactttgaagatgaagactttgaagaagctgattttgaggatgaagactttgaagaagccgattttgaagaagaagacttcgatgctgattttgcggatgtagatgacgaagaagaagacttcgacgatgattttgcagatgtagacgatgaagagacagattttgatgacgaagacttagagattgaagacgacgaagaagcggatgaagagttagaaatcgaagagccatcagaggaagagattcaggcaagaatcaagaaatctaaaggcggtgttccgttcgatacaggatttgttgtaaccggaagatatgatctgagtgctacgagtgagatcggtctgaaagccggacttacagaagaacagaagaagttgttctcatattttgtaccggtgagaggaatgagcgaacagatcgttgaagtacttgataacgacagaagggcacagagagaaggaacatccaagacaggtaaccttcttgtgattggtagaaaaggatctggtaagacagtccttgcggttgatattgtaaaagcaattcagaaacagagaagtctgaaacagggtaaagtagcaatcgttacaggtgaatctcttaataagaaagagcttacgaatattattcagaagctgcgcggcggagcgatcatcatcgagcatgcaggaaaattgaatgcaagaactgtaaaagagttaaattatctgatggagaagaagacaggagaattactctttgttctggaagatcagagaaaacctctggaacgtctgatgacagcaaacccggatttcaagaagaagttcagttctaagctggagcttccggtgttcatcaatgatgagctggtaacgtttggtcagacatatgcgaaagagaatggatacaagttggatgagatgggaattcttgcactgtacagccgtatcgatgtaatgcagagagaagaccatgcagtatcggttgctgaagtaaaagagatcatggatgaagcaatctcacattcacagaaagcaaatgtaaaacatcttgcacgaagagtattcggcaagggaaccgacgattctgacagaattattctgaaagaagaagactttagaatttaataaaaacgaatgcctgtaagaagttgtcgatgacaggatttataggtcggaaatggaaagagttttgacaaactaaacggtcaaagctctttctttttgcctgtttgtaaagtataatgttcttataaatatgcagcagaatgcgaggggtaattatggctgaaaaaaagaaaaaaccatatgaaataggtgaattggatcaataccttttcggacagggcaatcattatgagatttatgagaagctgggcgcacatctggtacagaacggaaaacaaaaaggtgtgtattttgcagtgtgggcaccgcatgcgcaggcggtatcggtagtcggagagttcaatgaatgggatacagaggcaaatccgatgaagagggaagagccgctcgggatctatacctgttttataccaggtgtgaagaaggatcagatgtataaatattgtatcgagacttattcgggagaacagatatttaaggcagatccatatgccaattatgcggagttaagaccgggaacagcatccagggtcacagatattgagaatatcaaatggacagatgcagagtggatgacacgtagaaagacctggaatcataagcacgagccaatgtctgtctatgaggcacacattggttcctggatgcgtcacccgggaagggaagatgaaggattctatacatatagagaatttgccagggcaattaccaaatacataaaagaaatgggttacacacatgtggaactgatgggaattgccgagcatccgtttgacggatcctggggatatcaggtgaccggatattatgcaccgacatccagatatgggtcgccggaagattttgcatggatgatcaattatctgcatagaaataaaatcggtatcattctcgactgggtaccggcacatttcccgaaggatgcacacggactggcagattttgacggaacaccgacgtacgaatatgcagatccaagattgggagaacatccggactggggaacgaaagtatttgattttggaaagaatgaagtacggaacttcctgatctcaaatgcgttattctgggttgagaagttccatatagacggattgcgtgtggatgcagttgcttcgatgttgtatctggattacggacggaaggacggagaatgggttgcaaacaaatatggtgataataagaacctggaggcaatcgatttcttcagacatctgaattctgttgtacttggaagaaatccgggagcacttatgatcgcagaggaatctacggcatggccgcaggttaccggagatgtagaagaaggtggattgggattcagtctgaagtggaatatgggatggatgcatgacttcacagaatatatgaaactggatccatatttccgaaaggataaccatcatctgatgacatttgccatgagttatgcatacagtgagaattatattctggtattgtcgcatgatgaggtggtacatctcaagtgttcgatgctgaataagatgccgggacttggatttgataaatatgcgaatctgaaagccggatatgcatttatgatgggacacgcaggaaagaaacttctgtttatgggacaggaatttgcacagcttcgtgaatggagtgaagaacgggaactggactggttcctgctggccgaaccggaacatcagcagatgaagatgtgggtaaaagacctcttacacctgtataagaggcataaggcaatgtatgagatggatcagagctgggaaggattcgaatggatcaatgcggatgacggatacagaagtatctacagttttatgagacattcgaaaggtgcaaagaagaatctgttgttcgtctgcaactttacgccgatggcaagagatgattacagagtcggagtgccgagaaagaaacagtataaactgatcctgaacagtgatgaggagaaatacggcggaaccggagcagatcgtaagaagatatacaaagcggagaagaaagaatgtgatggaagaccgtattcattcgcatacaaattgccgccttacggagttgctgtattcgagttttaattatatgaagtcagtggcaaaaaactttgatgcctgcggataaaaatgccgggaagtgttgaaacttcccggcatttttcgttttactgtacatctttattaatgactgtatttagttggaagaactgttggctgaggaatcagaagcatcggaaccagaggcatcggattcactactgttttgagtgttgctctggttatcagactggttatctgtactgtcattcaatgaagaatcatcagcagagttgtctgttgtgccgtcatctgaagaatcagcatcgttgttcatagaatcgttctgtgtgtcgccagacggctcatcagtgttatcagagttatcttctgtaatggcatcatcgttactcttgtctgtatcgtctttcttagaattgcttccaccgaacagatctttgaagaacttcttgatcttgccccagaatccgctgtcatcactgttgtcatccgaagtatcatccgaagcggcatccgaagcggcatctgaactgtctgtgctgttggaagaattgtcggaagaatccagtgtactgttagttacgacatcatcaccgagtgcgctgtcatccgtgccgttaatgattccgccatcggaactgtcatccccgccgaagatacctttgatagaactccagaggttggagaagaatccgccactctttccgtcaatgttatctaatgtattcttcagagctttgacatcatagtcatactgggaaatgtttttcatcagatcggagatcttgtcgatctgttcctgtgtcagcgtgacgttgttatccttggcagcgttttcaactgcattctgaatgtcatctgcatccgttaatttgccctcgatcacatctttttttacatcgttcatgacattttccgctttgtcctggccgatgtcattggccaggtctcctgtggtgacaagttcatcggtcgcagctgctttctgatcgtcattcagagttgttccggtggctttctcataagccatcatgatacctgtcagtgcaccggttccggatacttcgatcggagaagcggcaacgacattacagtttttaacaccggatgtcagaagcgtactggagatcatagagcttgtaacataagttaggttggaaacctttacctggattccgccgcttgtggtcggttctacataagaacagctgtaggtacgggtaccgatttgttcgtcgggagcgactccttccagatattttctttcgtctgcattggtaacttcgatgacttctgctttatcagatgaagttccgaaatactcatacatagaattcttctgtgaatcagtcagattggcgccaagtgttacaactttggatgaatctgctcttacaaccagtggtgccgcagtagatccaagtacgattgccatggcaactggtaatgctctttttaattttttcataatgcgtggtgtgttcaccatgccccctttttattaaatatttttatccctgttacttttttaatataacataaaacagtgtgttttcctagaaaatataaattaactatttctaaagattttctgtagattgcgtccgcatctgcacagtcaacaacttctgcaggcgtgagtccagctccttttgcggtatcattccctgcatggtggcgatcagttcccggtctttgaaaatgagaaatgccggaagaagagcggtctgatattgcgcagcaagaagtgcggattcagaggtctctacttcaaaaaagcagatgctgccgaaatatttcttctgatatttcttttccagatcttctatgacagggcgcatcattgcacattttccacaccagacagcgtagaacatgactacagccagtgtgggatgctccggtccagcctttgccggtgtatcggaagaaaactgccagtggttcatccggcagatatcaaagttctgtgtcgtcagatgtaacataagcttccaccctttccatgagaaacaggagcataagatatgctctctattaatatatgaaaggaaagggaagaagtgcagacagacaggatcggtatataagtccggatattgcagcatgttatctgcgctttgcgatcagtttacagatcggattgcccatagaagagaacttggcttcatattcagtcataatattgccctgattcatcgtactgtcgttatgaagatcataggatagctgatccagaacgaaaagttcggaagtttcaagttcttctactgaaaagtcaaagagcggccggttgtcggttttgaattctaccgttccatctgcggtcaggacctggtcataaagcttgaagaattcattggaagtcagtcttcttcttgcatggcgggctttcggccacggatcggagaagttcaggtagatacgtgatacttctgccggggcgaatacggttggcaggtcatttgcatccatacagatgaaccggatgttggcaggagctttcccctctgcttccagttcctggaatttctcaacggcacgcagcagaacgctggaataacgctcaatgccgatgtagttaatttgtgggtttttggctgccagggtcagaagaaactgaccttttcccatgccgatctcgatatgcaggggctgctcttttttaaacgtctggttccagtttccgcgtaagctttccggatctttcacaacttctttgcaggcttcgagaacgctctctgcacgtggtatatttctaagacgcatacgtgtattcctccttataatcactggatttgcaaatcgttcttagtttagcgtctgtgcaggaaaaagtcaatggaagcagaaattgtcagaagaattgagaagaaataatacaatatatacaaaataattgtggtaatttaaaaaaataggtgtattattataacatggataaaaaaataacaattatttattgtgaaatatgcgaaaaggagggcggcttatgaactctgtaattgaaaaattggctgaagtagagacgacggcggagacgatcgtagagcatgccagacagcagaagagtgaaattgaaagacagatacaggaagaaagagatcaatttgaccgggatctggaagaagagacacagaaaaaactggagaagataaaagaaaagtcgcagcaggaagtagagaaggtcctggaccgggaacggaagaagaaccagactgcaattgatgcgctgaagcaggaatatgaagaaaatcacgagatttatgcagagaaaatcgtaagacatatgatcgaggtgtagtgtatgggaaatgtgatggcttacagtgggattacgacaaaggtacgtgcaatgtcggcaaagcttttggcagcggaggattatgacacaattgccggacttgggacagtaacggaagcaattgaatatctgaaagacaagacggcatatgcaccttatgtgaaccggatggatatttctctgtatcacaggggaaatgtggagaagatcctgtatcagtctctgttcgatgattattcgagactcttccgttttgccggaatgaaacagaaaacattcttaaaattatactggaaacgttatgagattgatctgatcaattattgtctgagaattgtgttcaatcattatgacaagccgtttgacctggaatataagaaagagttttttgacagatattcacagatttccattgaccggttgataacttcgaaaaatattgatgagcttgtggataacttacgggatacggagtattatgatgcacttgccagaattaaagattccggagcgggaacgctttttgattatgatctggcactggatctgtattatttttccaccatgtggaaaaagggaaaaagggttctgaaaggacatgaacagaagatatttttaaaagattacggaacgaagatcgaccttctgaatctacagtggatctaccgtgcgaagaagtattatcatatgcttccgccggacatttattcgatgacgatcccgattcattaccgggttcgtgtggaagagttcaagagcctggtagagactccgacactggaacagttcgaaaccgaagtgggaaaaacgtactatgcgggaaagtatgattatatgcaggcagataagacactggaacagatgtaccgtgactgtctgcggaaattgtacctgaccgataaaaggaatgatccgtattcgatcgcgatcgtcaatacgtatctgttcctgaaagaagaagaaatctataaactaacgacagcccttgagtgtatccgttacggtttgacgaagggagagacattaggatacttaggaggtgtgaatcaatgattgttaagatgaagttcttaagcatcagcggaccgaagaatgacatcgaccgtgtctgcgaggtgtatctgtcgaaatacgaaatgcagcttgagaatgcggcggcggagcttaagacgaccgacaacctgcagccttttgtggaagtcaatccatacaaagagccgcttgcgaaggcagaacagtttaacgcattgttatctgatgaagaccagcgaatcgatgtatcgatgaaccaggatgatatgctgagtctgatccgggatgtcaatcatgactatctggatcttgtggaaaagaaagagttaacgaagaagcaggtagacgaatacaaagaaaagcttctgatcatggagccgttccggacactgaaattggatatgcagaaatcattaaagtataaatatatgaaagtccggttcggacgggtagatgtgaattattacaaacgtctggaaaaatatttgtttgatgatctgaatgcggtatttatcgaaggtacgaggaatgaaaattatgtgtacggatgttatttcgtatcgaatgcagattccagtaaagtagattcggtattcaattctttgcattttgaaaggattgcaattccgtccgagtacataggaacaccggagcaggcctgtgaagagcttgaaaaggcaatcgaagaaaagcaaaaagagattgcagagatagaaaaacagatcagggagctgatggcgaagaatgccgcaaagctccgtggtgcgaaaaggcgtctggaagaactgtctacaaactttgatgtacgtaagctggcggcaaggatcgaagagggagataataaagaagattattacatcctgtgtggctggatgggtgaagaagatgtgaaaaaattcctggcggaatcgaagaacgatgataaggtattcgttgttgtagaagaagataaggagaagtttttcggagaaccgccgacgaagcttaagaatccaagattcttcaagccattcgagatgttcatacggatgtacggacttccggcaaatgatgagatagatccgacgatgtttgtggcactgacgtatacatttatcttcggtgcgatgttcggggatgtcgggcagggcttatgtctgttcgtattcggcgggcttttgtatctgatcaagaagatcaacctggcagggattatatccattgcgggactgttctcgacattttttggattcatgttcggaagtatcttcggatttgaagatgtgatacaggcacgctggttaagacctgtggatgcgatgacgaacctgccgtttatcggacagctcaatacggtattcgtggtagctattgcatttggtatgggactgaatatcctggtgatgatctttaacgtgatcaacgcagttaagagtcatgatctggaaaatatgttattttcccacaacggaatcgcagggctggtgttttatggattcctggtgctgacgatcgtgctttatatgacgggacataaggttccgggtaatatcatgatggtaatttttctgggggttccagtgctcttgttcgtattcaaggaaccgttgggcaatctggtgacaaagcagcataagaagatggaagagggcaaggtaatgttcttcgtgcaggcgttcttcgaactgttcgagacgatgctgagttatttttctaataccatttcttatgtgcgtatcggtgcatttgccgtcagccatgcggcgatgatggaggttgtgctgatgttatcgggcgcaagtgcgggacacacgaactggatcgtgttcgtgcttggaaatgtgctggtgtgcggactggaagggctggtcgtcggtatccaggtactgcgtctggaatactatgagatgttcagccgtttctataaaggaaccggacgggaatttaagccgttccacagtcagagtgacagaaagtaataaaattcaaagatatatttacaggaggacaaaaatatgagcctgacagttagagtattattcgttgtaacattgttgctgagtattgtaattccatttggatattttctgatcggacagaggacgaagaagcgttataagagggctatcggcacaaatatattctttttcttcagcactgttctgatcgcaggaatcatgctttttgcgggagatccggtacaggcagcggaagcagccggcaatacggcgtcaaacgcaacaggattcggatacctggcagcagcactttcaaccggtctttcctgcgtcggcggtggtatcgccgttgcaagtgcagcaagtgcggctctgggtgcaattagtgaagattccagtgcacttggtaagtcactgatcttcgtaggtcttgcagaaggtgtgtgtctgtacggactgatcatctctttcatgatcttgggtaaattgtaagatgaagatgtatctgatcagtgataatatcgatactctgacaggaatgcgtctcgcaggggtagacggaatcgtggtacatgaaagagaagaactccggtgtgcgatcgagaatgccatggaggataaagatgtaggtgtgattctgttgacggagaaattcggaagagaattcccggacctgattgacgagatcaagctggagcggacaatgccgcttctgatcgagattcctgacagacacgggaccggacgtaagaaagattttatcacgtcgtatgtaaatgaagcgatagggttgaaattatagacaggaagaaggtggcacatttgacaaacgaagaaaagatcacgcatatccgcacggcagcgatggaagaggcaagagcggaggcgaatgcgatcataaagcagcatgaggatgcgctgagaagtgtgttcgagcagcactggatcgaagccagacggcagtcggagacgagagtgcgtgcggagagtgtgactgcaaaacagcagctgaatatggcgatgtcaaaggcgcagcttgaattaaaacgtgagatgggtaagatacagacagaacttaagacagaactgttcgaagaagtacagttaaagcttctggcatttatgagaacagaagagtataaagaggttctgatccgttatatagagaaagcagcacagtttgcatccgggatggcgatgacgatctatatcaatccgtccgatgcagataagaagacatatctggaggagcgcacgggaatgacgctgacgatcagcaaagtggatttcatcggcggtgtgcgtgcggttgtgcctgagaagaatgttctggtggattatgcattcaaaggggcattggaaaatgaataccagaaattccggttccggggaggtgtaaagggtgagtagcggaaagacagaaaagatatatggcatcaacggaccggtcatttacctgaaagggaagacggattttaagatgtcggaaatggtccatgtgggagaggaaaagctggttggtgaagttatttccctggataaggaccggacgacagtacaggtgtatgaggagacttccggactgcatccaggagaacttgtggaaggtacgggagcggcagtgtcggttacgctggcacccggtatcctgaataatatctttgacggtattgagagaccgctggagcggattgctgacaagggcggggcatttatcacccggggtgtcagtgtggatgcactggaccgccagaagctctgggagacgcatatcacagtggcggaaggcgatatggtacagggtggaacaatcattgcggaagtgccggagacgcgggctatcgtgcacaaatgtatggttcctccgggagtggaaggaactgttatatctgtggttccggatggtgagtatacgattgatgagacgctggttacgattgaactgttcaatggagaaaaacgagaactttcgatgacacagcactggccgatccgtgtaccgagaccggtgagccggagattcccggcaagtgtgccgctggtaacaggacagcgaattctggatacgatgttcccgattgcaaaaggtggaacggctgcgattccgggaggattcggaacgggtaagacgatgactcagcatcagatcgcaaaatggtcggatgcggatattatcatatatatcggatgcggcgagcgtggaaatgagatgacacaggttctggaagagttttcggagctggtcgatccgaaatcaggaaatcctttgatggacagaacgacgctgatcgccaatacctcgaacatgccggtggctgcccgcgaggcatccatttataccggacttacactggcggaatattaccgtgacatgggttatgatgtggcgatcatggcggactcgacatcccgatgggcagaggcactgcgtgagctgtccggacgactggaagagatgccggcggaggaagggttcccggcatatctggcatcgagactgtcggcattctatgaaagagccggcatgatgcagacattaaatggtgcaaccggatctgtctctatcatcggagcggtgtctccgcaggggggagatttctccgagccggttacgcagaatacgaagcgttttgtgcgctgcttctggggactggataaatccctggcgtatgcgagacatttccctgcgatccactggctgacgagttacagtgaatatctgaatgacttaagcggctggtattcggatcatgtgtcgccgaaatttgttgattacaggaaccgtctgatggcgattctgaaccaggagagcagtctgatggagattgtaaaactgatcggcggggatgtgcttccggatgatcagaaactgatcctggagatcgcaaaggtgatccgtctgggattcctgcagcagaatgcatttcataaggatgatacatgcgtatcgctggagaagcagttcaagatgatggacgtgatcctgtatctgtataagaccagcaggaaactggtggcaatgggaatgccgatgtcggtactgaaggcggaaggtatatttgaaaaggtcattgcgatcaagtatgatgtgccgaatgacaacctgcagttactggatctgtataaattagacattgatgacttctataaccgcgtcatcgagaagaatgcgtaaagggagggacgtaagatggcaatagaatatcttggactgagcagtataaatggccctctcgtcgtgctggaaggcgtggaaaatgcattttacgatgagatcgtagaatttattgtagatcataatacgaggaaaatggggcgtatcgtagagctggatgaagacaaggctgtgatccaggtatttgaagggacagaaaatatgtcactggataatacccatacaagacttacgggacatccgatggaagttactgtatcggaggaaatgctgggacgtacatttaacggaatcggggaagcaatcgatggacttggtccgattgcagatgcagaaaaaagggatgtaaacggacttccgttgaatcctgtcagacgggagtatccacgaaactatatccgtaccggaatctcggcgattgacggtctgacgacactgatccgcgggcagaagcttccgatattctcgggaaacggattgccgcatgaccagctcgcggcacagatcgtaaagcaggcttcacttggagacgattcggatgaacagtttgcggttgtattcggtgcgatgggagtcaagcatgacgtggcagaattcttccgtaagacatttgaggaaagcggtgtggcagatcatgtgtgtatgttcctgaatctggcaaatgatccggtggtggagcgtctgatcacgccgaaggttgcgctgacggtagcggaatatctggcatttgagaaaaatatgcacattctggttatcctgacggatatgacttcttttgcggaagccatgcgtgaagtgtcttcttcccgtggcgagattccgtcaagaaaaggatatccgggatatttatacagtgaactggcaacgatctatgaacgtgccggtattgtggacggggcaaatggttcggtgacgcagcttccgattctgacgatgccgaatgatgatatcacacatccgatcccggaccttaccggatacattacagaaggacagatcgtactggaccgtaatcttcacggtcaggcagtctatccgccgatcagtatcctgccatcgctttcgcgtctgatgaaggacggtatcggaaaaggatataccagggaagatcatcaggatcttgcaaaccagttattttccgcttatgcgaaggtcggagaggcgagaaaccttgcttccgttattggcgaggatgaattgtcaccgattgacaagcagtatctgaagttcggtgaagaatttgaaaaacgttatatcgggcagggaccgacggagaaccgtacgatgatggagactttggatcttggatgggaactgcttggacttctgccgaaggaagaactggaccgtattgatacgaagctgattgagaagtattggaaggatacgaaagagacattggagacagaagagtaggagggatgcatatggatccgagagaatttcctaccaaaggaaatctgatgcttgcaaagaattctctgatgcttgcacgtcaggggtatgacttgatggataaaaagcggaatattcttctgaaagagctgatgggactgatcgatgaggcgaaagacattcaggaagagatcgatgcaacctttacaaaagcatatgcctgcctgcagcgtgctaatatcgaacacgggatcagtaaagtccaggaactggcatttactgttccaatcgaggattcgctgaagatgcagaccagaagcatcatgggaacggagatcccgcacatcaagtatgatgcgaagcagaatgatctgacgtattcgttcagcacgacacatgagtcggtggatattgcaagagaagctttccgggaagtgaaggaacttacgatcaagctggctgaggtggagaactcggcgtaccgtctggccgcaaatatcaagaagacacagaagcgggcgaatgcgcttaagaatattacgataccgatgtatacgaatctggtgcatacgatcagtaatgcgctggaggagaaggaaagagaagaatttacacggttgaaggtgataaagaggatgaaaatgtaacgacaaattttgcaaagtaattccacttatccccaacaaaagaggagttatccacgggaaactgtggataactcctcttttgtctgataattccgatgcatgaatcgacatagaatgacaacgattataatgaacgggatttttctgtacttacattaatgcattcgattacagcaccacgcatgccggctttttcaagagcctcgcagccttcgatggttgttccgccaggggatgtgaccatgtcttttaattcacccggatgtcgagtgcgccataaagaatggcaccgcccatattgccacatccgataattccgattttttttgtgatcataataattcctcctagtttggtcatgagatgttttagagcagatatttataaagtgtacagtatgcaatgacaggagctttaaggagtcagcttgtgcagttcccatgctttttcgatacttcccggagtttccatcaataatttcgttccttctgccatacatctcgcaacgtagaacatacctttctgtccgatagtcataccggcctgtctggcagcagcccagtgatgaagcggggtacctttacacatcgtagcggcacttaaggtgatcaacgggacggtgtggctgacctgtgaagcgtccgtgccgatagcgatcggaaccggttcatcttcaagcggttccaggccggagaatagtgtcccgtcattgatgagtccggcttcttctgtgatctgctttgcaaaatccagctcttccggtgtataagccggtgtcggaactctggtcatagcatcgtaatataattctgtcagtacccggttaactttcatctcactgcagcttgcgaccagttcgatatcgacggtggtgtctgtcataagagcggcacctctggcgcagttgtctacacgttcgcttgcatcttcggtgcgggaacgtaagtaggagcggatgaaataatttgtctttgcgatatccggaacaacatttgccggaagaccgttatcaatgtaggcataatgcatacggacatctcccggtacgtgttcacggagataattgacgcctacattcatgagttcggcggcatccagggcgctgcgacctttttcaggtgctttggcagcatgggaactaagtccgtggaatgtgtagttcttaatgtcctgtgcctgccagatatcgttgctgacacggttgcggtcgaatggatgccaggtaatagcaacatcgaggtcatcaaagactccctgattgttcatcatgatcttgccggacatgatctcttcggccgggcagccatagacgcagattgttccggctgcaccggttgcttccatatcggcttttaatgcacatgccgctgcggcaacggctgttccaagcaggttgtgcccgcaggcgtgtccgacacctgccagagcatcgtactcggccaggaatccgaggattggttttccgcctccccagactgcggtaaatgcggtgtcgataccggctgttttccatgttattttaaatccctggctttccagataatctgccaggcatttggaagaaagtgtctcctgatatgcaagttccgggtgatggaaaatgtaatcagcggtattcaccagttcttcctgatgaccgtcgagccagcgggcaatgatattgtcaggtgtatgttcagttgttagtgtattcaaaatatagatacctcctcatagaatcgggtgtttatctatcattttagcacagaaaaacaggatgtaaatagatttcatagttttcttatatgaaaagtaaaaactattcaaccggataaagcccgttcaatacatccagatattcctgtccaaatgtatctacataatcagtaagtgcaagtttcactgccgtttctcctttttcaccaagattatggatcagggcctggctgatagtatatttcaaatgtgccgtatggaaattaaaatctttcatacaggaagttccaagctcggtctttttctccgccagttcttttacctctttctgcgagagcggatgtccccagtcgaattcgcaacgatcaccgccccagctcatagatgtggcagtcggggtacagacgaagtcggaacggaaaccttggtaaacggcattgtctacattgacgcaataatatttcccgtattcggtaatattatgctttttccatgcttcacaccaggcacatttggcaatgtaagtctgaagtgtcggttcggtgcgaagtgttccgaagtccatttgtccggcgtaatccggtttccattcaccgtatgcctgattggtcattgtggtaagctcatccccgtgagcgagtgcatttgccgccatacgggcacctcgctcattgccgtatgtagtcattccggcaaggatagcttctttgccggcgtcaccgcataattcaattgcatgtttggcgagaaatgcgaacatcatggcgtgatgttcgattttgcagctgacaggacagactttattttcattttcactcatattaaaaactcctttcgacatttgtaagtgataatctatttattacaatactacattgtagtgaaaaagtctcgagaaaaggcttgataaaaaggaaaaaagcggtatgatagtaaaaaagaaaaagcaattacttaaaagtgagaataaagttgaaaattaaagaggaaaaaagtatgagcaggaaaaagttaaaaaatagaagacgaaaagatcgtgcacagagaaagattctgattgcagcagtctgtatagcagcagtgatcataggtgtgggaatcggcgggcatgttataaaaaagaatgccggtaaaacgatgacaacggccgagacggaaagtaaaaaggcagtatcaaagaaaaaagcaactgcaaaaaaacttacgatcaatgagaatgaaactgatgcatccaataaagaaaatcaaggccaaaaagatcaggcagctgacagaagtgaatttgcagttcaaccaggaagaaaagtgggtacaacagaacaatcggatgaaaaagttgtctatctgacgttggatgacggaccgtctaagaatacgcaggcggtgctggacattttggataaatacaatgcgaaagcaacgttttttgttacaggagccatgccggaatataaagatatgatcaaaaaggcttatgataaaggacatacgatcggaatgcatacatattctcatgattacgcaaaggtgtatgcatctgttgatgcatattttcaggatcttgaccagattggacagcttgtaaaagaagagatcggctatgttccgtgttttatcagatttccgggaggatcttcgaataccatatctgcaagttacacgaagggaattatgacaacgcttacgcaggaggttcaggcaagaggatatcaatattatgactggaatggaagttcgggagacggggccgtgagaacaacggaacagcttgtggatcaggcaaccagtttccatgacaataatatcatcctgctgtcacatgattccgagacaaaagatacaactgtggaagcgctgccgaaaattattgaatattatcagtcacagggatatgtgttcaaagcattggatcttaacagctatgttgcacatcatggtgtgaataattaattatatatgtagggaaatgtgttgatggttgttgtacttatgctgaatagaataacggaagatctggcggaaaacatgtaaatacaaagaagaaaaatgatgttatcaaccagagtgagactacaaagccaggttctgtctcgtgaggagaacgggtcttgccggaaatatattcagacattccaaatgaaaatattacactggaataaaaaagcaggatgtctaagatcaggaaattccggccgagaatcccggaatatgtgtaaaaaacagaaacagtaaaaaacattccgagaagcacacccagataccgacagtaaaagaacggtaaaacaaccggatgcagagacagatattcccatatgcttacgaataaaaaaggaaaatataaaagtttcaaatgttcccacacggattcattaaccgggcagaaaagtgcaatgattggagactgcccggataaaaaatacaggaaatgattcagtgttccgagaaaggcagcgaccaggacaaaatgcagagctgtgccttgaatgcaggagataatctctgtgcagacagtatgaaagatttttttgaaattggttgtaacataatggataatatgcttcataaattcaacccccatatcaatatatgagagctgtgaaaaaaatatgaaaaaaataaaaaaagtacttgcattttaaaaaaccttattatataataaatcttgtcgttacggagaacgtaacacagacaattgaagatgcgcgattagctcagttggtagagcacctgactcttaatcagggtgtccagggttcgaacccctgatcgcgcactaacaaatcactgtttttagaggcttagagctctggggacggtgatttttttgtgcctgaaaataggggctttaggagggataacacggaaattttaaaaatatcctattctcaaaattctcctgtgctataatagtctaaaatattgattgactatgaggaaatacagatggagcaaatattaatcctagaggacgatacagccttaaatcagggactgtgcaaggcattaaagacagagagccgaaagcttgtctcctgtgagactgtaaaagctgcaagagaccagttcctgtgcggctgtccgtctctcatattacttgacataaatctgccggatggaagcgggcttgattttttacaggaactaaaaaggaactatccagatataccggttattctcctgaccgcaaacgataccgacatggatatagtaaaggggttggagcttggcgcagatgactacatcacaaagcctttttccttgtcagtattaagggcaagggtaaatacccagcttagaaaggcggaaagcttacaggcacatacctctgccagtgtatacaggaagggctgctatgaatttgattttgagagaatgatatttttagtagatggacaggaaatcgagcttagtaagaccgagcagcgtcttttgaggcttctggttcaaaatgagggcataaacctccgcagagattttctcctggacagagtctggaatgacagcgcggaatttgtggatgccaatgccctctctgtgtctgtcaagaggctcagggacaagcttggtataccggacagcattaaaacagtatatggaataggatatagatttgaatgaatgactataacacagccatctgtatagtgggcatatgccttgtaattacagcacttgtaattttaatcaaccatctgcgcacgaagaaaaccattgatacaatagaaaatatgttaaatgaggcagtcaaagggaatttttctgaaaaaagctttgacgagacacgcttatcctcgcttgagaccaggttcgctcattatctgagtgcttctgtggtatctgccagaaatgtggaactggaaaaggataaaataaaatcgttgattgcggatatttcccaccagaccaaaactcccatagccaatctgctcttatacagcgagctattgcttgaggaggatacgggcaatttatcagcccagatgtgtgaaaatattgttcagcttcatgcccagtcggaaaaattgcagtttttaatcgactctctggtgaagctgtcaagacttgaaaacggcatattgcagctcgccccacaggaagaagcgcttaagccgatgctgacactggctgtaaaagagacagagtccaaagccagggccaaggggcttgagcttatactccatgacatggatgaaaaagcttattttgacagcaagtggactttggaagccatctgcaatatcctcgataatgctgtaaaatacacaaatgagggcagtataagcctgtctgtcacggcatatgaaatgtttgtaagaattgatataaaggacagcggaattggtataaaagaggaggagttttctaagattttttcaagattttaccgctcagaagataccaaaaatatggaaggcgtgggaataggactgtatctaagccggcagattataagcggagagggcggctacataaaggtgtcttctgtatacggacagggcagtactttttctgtttttctgccaagatcggcttaaatctttcaaaactgtaataatttaattatttccggaaagaatctggaaagaatctggaaagaatattgtgtaataatctgtatgtagtgaaaaattgctgcatacagttttttagtttttatggaggatatatggatattttacaagcatgtgatttgaagaaaacttatggaacaggtgaggcctgtgtacatgccttggatggcgtgagcctcaatgtagaaaaaggagagtttgtggctattgtgggtacaagcggcagtggcaaatctaccctcttacatatgctgggtggtctggacagaccaagctccggcaaagtattcgtggatggcaaagatatcttttccctgaaggatgaggaacttaccattttcagacgaagaaaaatcggctttgtatttcaggcatataatctggtgcctgtactaaatgtatacgaaaacatcgtgcttccaatcgaactggatggcggtaaagtcgataaggaatttgtaaaaaaaataacagagacactggggctcgaccagagacttgacgctcttccaaatcagctctcaggaggacaacagcagagagttgccatagccagagcattggcggcagagcctgccataattcttgcggatgaacccaccggaaacttagacggacgtacaagtcaggtcgtattgggtcttctgaaggtgacaagccagaagttctcgcagacgattgtgatgattacccacaacgaggaaatcgcccagcttgcggatcgcataataagaattgaggatggacatattcaggagagagcagtatgagagtaaagaacagaaaatgtatccgcagacttagcttcaagtctctgtgggcatccagaaaaagaaatattattgcaatttgtgctatagcactcacaactttgatgtttacatcattatttaccattatgctgtctgtaaactcaagctatgagacctacaatttcagacaggcaggtggctatagcgatggcagctttaaggatttatcaagagaacaggctgataaaatagccgcccacaagggaatcaaggcatctggtgagcgtatcgtgtgcggcttcagctcctctgacgtattcggcaaggtagcggcggaagtaagctacatggataaaaactgtaccaagtggagctatgccaccccaaccacgggaaaggagcctcaaaaagaaaatgaaatagctatggacactacagccttaagactccttggggtagaaccgaagctgggaacaaatgtgacgattacttatcaggctggtaatggaacagacaccgggataccacagaccgacagctttaccctcgtcggctactgggagtatgatgatctgatgcctgttcactatatcaacgtatcaaaagcctatgtagataaaatcaacgaaaagtgtatagccgctggtgatgaagctcttgacatagacttaaatgtcatgcttccttccaagcttaatatcagggagcagatggaaaaaatagatacagacttaggttatgactggaatacaagagaccaggagaacagtgccagaatcggtgtgaactggggacttactgcctcatctgtaagctctgacatagatttctcactggtagctgcaatcattgcctttttcctgcttattatatttacaggctatctgattatatacaatatatgccagatttcagtgacaggggacatcaggttttatggcctgctaaagacaatcggcaccaccccaagacaattaaggcgcataatcacacaggaagctctgtttttgtgtattatcggtattccggtaggattacttctgggctacggcattggtgcggttttaactcctattgcattagagaccacaagtattataggcacaaaggctgctatcagcagctcgccgcttatttttatcggttctgctgtatttgccattatcactgtctttttgtcctgcaggaagcccggcaaaatggctgcaaaggtatcgcctgttgaggcagcaaaatatacagaaggcatgaccggcaaaaagaaaaaacgccacagccgtggggctaaggtatatcagatggctttttccaatcttggcagaaataagaagaaaactatcctggttgtagtctcgctgacactttccgtaactcttttaaatgtgcttttttcacttgtcaatggctttgacatggataaatatgtggacaggtcaacctgtgcagactttatcgtgagcagtacagactatttccgctataatacggcagatgagtatataggagcagataccattgatgagataaaggaaaacacagatgagactgtctctggaagcggctatgacctggcagacatatcccctatgatgtggatggagacagaccagtatagtaaattggcagaaaactatctaagcggcaaagagctgcagaaggaactctctcactacgagcagaaaggtgacagcatacttgtcgacgccagtatagagggctttgacgatggactttttgacaagcttactgtagtaaaaggctccctggagccactatttgacccggatagccacgcaatcgctgtagctgtatccacagatgattacggcaatatagtaaatctcgacagctatcctgagctgggagacacttataccgtaaactaccagattggatatgacatagacagccgaaccggcgagcgggcagaccaacagaccacgcctgaggaatatttggagtaccatgaggaagaggcaaaagaggtggagtacagtgtatgtgctcttgtgactgtccctgattccatcagcttccgttatacaagtctgggttataacatggttttgccggtagagaagcttaaggaggacagcggtacagatgtcattccgaagttttatatgtttgacacaccggattctcagacagaagcaagcgctgaacagtatctgcaaaagctcacagcaggagatacatctactctcatgtatgagagcaaggcatctgtcagacgtgaatttacccggtttaaaaatatgtttttaatctgtggtggtgccctctgtgccataatcgggcttgtgggcatacttaactttttcaatgcaattatgacaggaattttgtccagaaagagagaatttgccgtattacaatctgtgggcatgaccaacaggcagctaaaaaatatgcttgtttacgaggggttattttatgcggtgggctccatcatagcgtcccttatactttctgtggcgatcagtcctatgcttggcaatgtgatgagcgatatgttctggtttgtcagctaccattttaccatcatgcctgtaatcgtgattataccggtatttcttctgctggggtggctgattcctgctgtgctttaccatgcaggcaagaggcagagtattgttgaaaatctaagggaactttgaaatgctttttaagtaataaggacaggcccggcttttcgggcactgtccttatgattactttaagattaatttttcaaaatcttcctggcacatcggtctgtaataaagaaatccctgaatctcgttacaaccctcgtttttcagaaaatcagcgatttcctgcgtctctacaccttcgcacacaatggattttcccatacgttttaacatatggaagacttcctgaagaacgattctggcattttccgtcaaggtgtcaccgaggaacttgcggtcaagcttgacttcatcaaataacagatcttttaatgtattcagtgacgaataaccggaaccgaaatcatccatggaaatccggatgttgtattgcttaaaactacggatgacctgattgactgcgtcagtattatttacataagtggactctgtaatctcaaatgtaagatgagtcggatccacctgataggtacgaagtagttcctgaatcttatcaatgaagatctgcggctgttcaaaatgaagcggagagacattcagtgagatctggaaatgttccggaagtgtatcggaatatttctgaagccattggaatgttttcccgtaaacgtaataatccagagaggcaacaaatccattctgctcaaacagtggaatgtaaatggcaggggaccacagcatctgtccgtttcgtatccagcggacaagaacttcggcactggagatggctccggtgcacggtgtaaccttcggctggaaatagatttcgaattcctgatgctcaagtgccgaatgaaaggaatgaagaatttctgcctgcatcttttcctgctggtcgatctcatcggaataaatgcagcagtgagagatcattttcttggcaaggcgtcttgccacattggcataggaaatgagtgtttccggcggagttgttggatctgggatacagcagatgccggaattggtccggaagaaactgatatgataggtatcctggatccggtggcagatgcgtttgtctaataattgaatttgtgtcaacaatgcatcgttagataagcgttccatatcggcaatactgataaagacgtcagaaaagacgcgggtggtaaataaagtaagcgaactggctgcaagttcatcatatacaatattcagaatttcatttccgagaggataaccatatttgtcattgatgtaatgaaaattttctacatcagtagaaataacggcaatggtatggctgccggttgtaccttgttgaagctgatggatcttttctgcaacgaattcggaagagccggttggaataacagcatttgtcggtgggattgtggaagaattctgcttgatagctgccagttttttctgtgttttgtcctgatacatttttttatcggcggcattgatcagatcttccatcataaaatagtgattctgtcgactgatctcatagccggttgcatagctaagcgggagtgtggactgattattataatcatgaaccagatttgccagccggtgctgcatctgcttcagatgttcggaatccgtatcggtctggatgataatgaattcatccccaccgtatcgggcaaggaaactgttagaatccagtatccttgtcaggcagtaggcaaatgcctgtatgaattcatcacctttttcgtgtccgtatgtgtcgttaacgtgtttcagattgttcaggtcgaacattataacaccgattccaaaggtgcttggaagttctccgagctcagcgattttattttcaagagatgttttattatgaattcctgtaatatcccggaaagcattgaccagtaatctggaaagtagttcacgctggatcagtgtcagggcaagtgtcagtaccacaagcagcagaatcagctggatcaggtgaagcataggggaataggagcctctgagagactgtaagtatttcacaagatatagtgtggatataagtatcagcagaagaagcaaaaaggtggcttcgcaaagatgtaatatgctttttttctttttcatgtaaatctcctcataaataactattcggcctggacgatgatcatcttggcaagatcttttccgattccgatcttgctgtctttgatgcggacaacgtaatagccgaaaaatgcggacaggatgcagatagatgcaccttcaacaaaaccaagcgattctaagtggtggcgttcttcttcatttccacaagttttttgtacaatatagtcgatgccgatgacggccagattcagtggcataattcctccgatttcaatacaaactaacgatgattagtaacgactaacattataatacatagaagaattatgtcaatcatttccggacggtaatttacaaaataccggataaagcttgagacggaaacacgttcgtgttagtataatcataatttacgatagaagaaaagagtgagaagatgagcagtcatacactggaaggaaagaaaaagacacagaatggcgtgaaacggctgatgttttcagtgctttcaattttgctggaagtgctgttcctggttgggatattcaaaggattgaatgaatatgcggtattcatagacaatctgaccagaatatttgccgtcatactggttctgaaaatatatgggagaaatgagacttcctcgatgaagacaccgtggatcatcctgatcctgacatttccgatccttggagtagcactttattttatgattggtatgaacggtggaaccaagaagatgcggatgcgttacaaaaagattgatgagaagcttctgccacttttgccggaaaataaagaagtgctggaacgtctgaatgtgtcagatccgaaagcgggaaatgtttctacttatatagaaagaaatgcgtgttatccggtgtatcagaatacggatgtgacttattttgatgaagcggtcaaaggactggaggcgcagcttgctgatcttgcgaaggccgggaaatttattttcatggaatatcatgcaattgaggatgaatatgcatggagcaggatacagacggtgctggaagaacgggtgaaggccggtgtagaggtccgggtgttctatgatgacatgggctcgatcggattcgtcaatctgagctttgcgagaaaactggaagaaaaaggaattgcctgccgggtattcaatccgctgcttccgggacttaatatgttcctgaataaccgtgaccacagaaagattacggtgattgacggaaaagttgggtacacaggcggttataacctggcaaatgagtattttaattacacacatccgtacggggaatggaaggatacgggaatccggctggaaggagatgcggtggcttcgcttacggcagcatttctggaaatgtgggaagcatccgggaagaccccggccggtgcggacgttctgaatatagaggcacagaaaaaatatctggtacaacatccgtatcaggcaaagcagacgggatatatccagccatatgcggactgcccattagacggaatccaggttggagaggatgtctatatcagtattgtcaacaaagcggacagatactgctggttcatgactccttatctgatcatcacggatgagatgacacatgcactttcgctggcagccaggcgtggcgtagatgtgcggattatcacaccgggaatcccggataagaagctgatctacagtatcaccagatcgttctatcacaatctggtacaggatggtgtaaggatctatgagtggacaccggggttctgtcatgcgaagatgagcgtggcagatgattgcatggcgacttgcggcacgatcaatctggattaccggagcctttatcatcattttgaaaatgggtgttttatggcagattgtgatgcggtgctggatatccggcgggatatggagcagacattggaacagtgcagggaagtgacggagaagtataagtccggccggagcgcgactctgcggctgggacagttgttcctgcgattgtttgcggagctgttgtaggaaagaagaaggtaaagggactgggaatgcaggtttgcatttccggttctttttattgtatattgacatatatcgagatacgatatataataaaaccaagaagaaagcaaatttttttacactcaactatcgaaagccgatatataatgaaagcaaatataagaaaggagcaatcactatgaaagtaaacaaaaatatggtctcaggaaataccgcaatgttaattctcaaattgatctcagaaaaggatatgtacggatatgaaatgatcgatacactctcaaagagatcggacaatgtattcgaattaaaggtaggaacattgtatccgctgcttcacagcatggtacagtccggatatttggaaagttataaccaggaggcgaacgggaaactcagaaagtattaccggatcacacctaacgggaagaaatatctggagaaaatgattgaagaatggaatgcttatgccaatgcagttacgagcatgatccagtattccgtatagcacaggtaaggcagtgaaggtggcagaaaaggaaggtgttagatatgaaggaaagagaatatctgaaagaacttgggaagaagattaccgattcgtctgcaagaaaagagattgtaaatgaatatgaagcgcatatagaagactgcaaagccgcattaatggaatcagggatgacggaagttgaagcagaggaagaagcagtccgccagatgggcgatccgcaggaagcaggtgaagcaatggataagatctatcataaagtgtttgattccaatatgtttctgtggatgctggcactgggatgtgtaccgattgtatgtgtgtgcatttcttatcttatcgcaagagatccgaacgcatttttatggttgtggaatgatgcgcttggcctgaataaaatcccggcagttatacaccggaatatcggaatcggattagctgtctatggaatcggattgagcttctgggagaaatacacgggcaaagctttattctatgcagtcggaagagactgggggcagggatgttacgttgcaaacagcgggctggtactttttatctcggcattatgttttgttccgagtttcccggtgaagggatatgcaggaatcctctgctgtgtattgatagcatgtctgctgaatatggtactgagaggatttatgaatcttttgcagagcagaagagagaccagacttttatgggagattggaacggcagataccaaaatcaattggaagggaaaaggatatctgtgtggacatcatatgaaagtaagagtacagggatctgagaaaggaacggagatcccggcaggagcaccggtgatggttgtcggaatggagggatttaagccggtggtggcgcaggtataaagagagagacgttagatcttggatagtaagcgtatatgaagagagacgttagatctcggataataagcgtgtatgaaaaatgagaggcaaaagttatgaataagacggaaaagcgaatgaagatattcacgctgatcatgcaggtgatcatccaggcagtgctattatttccgtggatgaacatggggacatggaaatgcaatgtaccgggatatctgataaaattggctgcttcgggcgatgggatgagttacataaagaaaagtctgaagcctttgggagtactggacggtgcagatgaacagatgatggttcagatactgatgctgttcatctgtgaactggtaatggtactggtaatccaggtgataggaattgtgaatctgatactggctttaggcaatcaccataaactgcttctggatatcatgtcactgatcgcaggatgtatgatatcatttcttggggcagatggggcagtattttcagatccgctgtcacaggtgtatccatttttactggtagtgcttctggtgatcaatttgatcggtgcgaagctgattgattcgtggcaggaagagaaaaagatacaggaagaagttaaagccagagagaaaaattacaaagaagaaaaggaaaagcatctggaattttcggggaagtatccgaaaggattctatacggccctgtggaagaattttaaaagttcaaaaagagattttattgtttacgtaagtatgaacctgcttccggcgacgttgatattttccggagtcggaatggcacagatgctggcaccatttaataaagaaggaaatatactgacggggcatggaatcacggcaattctgctggaattcctgatcgtgagtctgatcgcatcgctgatgctgatgatcacgaatctgttgtcatatttcagaaaacggatgagaaattacagtatattttctactctgggaatgcggaagtctacactttatgaagtgcttggagcagagattgtggctggaattctgggaatgctgatcgggggagcctgcatcggaagtgtgatcctgtgtatcatccgcagaattttcatggcaagatccggagtgggagcacagccggcgaagattacaggattcacatatttgatcgcaagtcttatcatgatcggaatatccgggattggactgatgatcctgcgggatttcttcctgtacagggaactaaaaaaaatgcagctgggcgatgtggaaaaggagaagatgccggaaaaacggatcggtctgtggcttacaattggcctggtcattgtggtatttggaatagtgaatttcggaatgcggaagaatgccgaagggttacggatacttttatttatcttcctgggcatttatctggcggaaaagtttggatttggattgttcctgaaagtgcggaagcataaaaagagttattatgcaaagttgatcccatataattcgttttattaccgtttcaagagtacattccgttatgtgtacgtgatcagtcttataccggtactgatattgttcttatttggaaaagatatgatctcagcgaagatcgcgcaaaagccggaaggactgttcccgtatgattttgtatgtatggcaacggaagcggatgagacattctggaaacagctgcaggaaaaatatgacgtgaaattccaggagtatccgatggtacgcgtgacgaatgtggataattcggaaaagctggatgatgccagagcagtgatcatgccgcagggacagcatataggcatctcggagacgacgtataaagaactgaataaggcacttggaaagaaaagtgaaaaaatgaatctatctgctgacggaaaggaaatctatattatttatcaacaggataagagtacgaaggcacatccactggattacctgaattcgagaaaagagccgtacctgcacatcggacagccgatagaatcttatggatttcttgatcgggaaaagatctatccaacacgaaccgtaaagggtgaaaagacggatatcctgacaggtgcatttcggcagggaagtgaggagaatctggttgtattttcggatgaatattttgaaaaggttcaggacgactggaagaaatataattggatcaccggagatccggttgaggagggtgaagcagaagaaggagtgacgatccatcactggccgacaaagcttgtccttttgaatgtgaaaaatgtagattatcagaagatagaaaaagagctccaggcttttcggaaggtacataaagaggatgaaagatttgacaaggatgtattatcctgctattccaaacgtacaacgatggaacagattgaaagcgaacgctttatgacaacggtagtagatatatttatcatgggagcatttctgctgggaagcgttctggtcatttacttgaaatatgaatctgagatgacggacaagaagaagcggaatcatttcttaacctgtattggaatgagctcgaaagaaagagaaaagctgatccggacagagacgggaatctttttctggatcccggcagcagttgcggttgttatggtgccggtgttaaccggggagatgtggaacatgcgggaatatacgaaggctgacggtgtacattatttgcgatatctgttgatccttgcagttatatatcttgtagtgcagggcatcggtgtaaaggtgattgagcagtatacaataagaaaggtagaaggaaagcatgaaagaaatattaaaggtaaataacctgatcaagaaatttccaaaagccggtggggagattgatgatgcggatgcgatttcggtactgaaaggcattaactttgatgtagaacagggagagtacgtcggaattatgggaaaatccggctgtggaaagacaacacttctgaagatcctgggatttatggatcagcagacggacggagatgtgatctttgacggtgcgaatacgaatgagctgtggaaagaagaacttacggatatcagacgtagaaagatcggatttgtattccaggattttaatctgatggacagtctttcggtaaaagaaaatatcatgcttccggtattgctggataaaaaggaacagaaagaatgtgaagagaaagcggaaacattggaaaagcagtttgggattgaacatcttcaggaaaagaatccttatgaactgtccggcggtgagcggcagagagtggcaatctgcagggcgctgatcaatgatccgagtatcatatttgcagatgagccgacgggaaacctcgactcaaaatccggaaaagttgttgcggaggaattccggaaaatcaatgaggagttagggaagacccttctgatggtaacgcatgatccacagatggcaagccggtgtaagagagtgatatttctgaaagacggatatgtgatgaatgatgtgagaaaagagggcacggaagaagaattttacagaacgatcattggggagatggagaagttttaagatgagataatatatagatggtgatatgggctatgcggcggaagataattctgccgctttttttacgaaaattaatcttgtaatcatatgaacaatatgctattctgaattcacttcaaagagtgacttctacaaactcttaagtatttctaggccaaaaggcatcaagtttcgaccgtttcacacctaaaaatgtctgaaacatatttccgacttgagagaacacgaaaattttataatctattcaggaggacgtgcctatgacaaacaaacttcaacagtatttcccgatgattcggacaagggaggaggtgttgaatgagattgaaagtaaaagcagattaaaaaatttattttatgagtggacagaggaaaatcaaaatgaatttctggatttttgcaccggagtgaaaggtataaaaatcatgtatgatttcatgataaaagaaattctgaatccggagaatacaccggagagggtaaatgaattactcacactgctgcttggacaaagagtgagaatcgtagatgtattaccaaatgacgggacaagattagcggatgaatctacgcttcttattacagatatggtagtgcaactggaagatggaagtattgcgaatctggaaattcagaaaatcggatactattttccgggagaaagaagtgcctgttactcagcagatctgttgcttcggcagtataagagagtgagaggaatcaaaggaaaacgattctcttacagagatatcaagcaggtgtatacgatcgtgttatttgaaaaaagtccaacagaattccagaaattttccaataattatatccatcgttttatgcaaaaatctgatacaggagtaaatataaatttattacaagaatatctgttcatacctcttgacatattcaaaaagaatcagcaaaatgaaaatagaagtgtaaaaatagaaaaccggctggaagcatggcttgcatttttctgcatggatgatccggagacgattatagatattatagagaaatatccggattttaaagaaatgtatgaacaggcttatgatgtctgccggaatatcgaagaggtgatgcagatgttttcgaaagaattgctggagttagacaggaatacagtaaagctgatgattgatgatatgcagaaggagatagactgccagagagagcagttgagtcagaaggatgaggagatgttagaaatgaggaaagaaatacaacgattacagcagctattggataaaaaatagcatgaaaaatgtcaaaagaattgttttagatacttataaaaataactagtcagttgaaagaggtgatgtagatgttttcggaagaattgttagaattagatcgaaatacagtagaattcatgattgaagatatgcggaggcagatagaagagaaagatgagcagataaaacaactagatgagcagataaaacagaaagatgagcagtcaagacaactggaggaacagataagacaacggaataaacaaataaaagaaagtgataagcaaataagacaactggaggaacagataaaagaaagcgataggcagataggacagttggaggaacagataaaagaaagcgataggcagataagacagttggatgaacagataaaacaatcagaacaagaaatacaaaaaatggaggaagcaaaagagtaatacatagcctggctgtctcaggaacgtgaaacagccaggagagtgtaaaatattttgtgtaaatctctta

SEQ ID NO: 2866 - DNA, 2781 bp, Unknown
  gut microbiota DNA sequence
ccaatgcttttacttggaatgtagcgttttcagattatttataacctcttaagttcttcttaagatttttccgatttctttaaggaatttaacatactttagacatatttgttttttataataaactcagatagttgagagagacaaaatcaactatctccccctcataaagtagcacaccgggaatccggtgcaacactttactctcattcctttagataactataaaacaacgaagcccgttagcccttgtggttagcgggttttcgctgttctgtacttgttgcaaaatccgcttcggtcaaatctcggtcaaataattttctaaagaaatgttgcaccttttctattctctttcttattcttgttctgattatatgatttccttatacaaattctgtaatttatccatttccgattttgctttatcatctgtgacgtgcgtatacaaatccagtgtgattgctatggaataatgtccgaggaatccttgtactacctttgcgtcaatcccggcttcaaaacaacgcgttgcaaaagtatgacgaagtgcatgtggataaaaatgcggaatcggtataaacactgtcttgtttttctctgcctgcttttttcgttccttattgatagatttttctatccagtctaacgtcacttgaaaggtgtgttctgtaatcggttttccgttctttccaacaaacacaagattttcaaatccctctaatggttgccattcactagctgacaactgcatttctttcaactgaatccactgacgttttaaagccttatacacactgtcctgcatgggaatcgtccgtatactgttctttgtctttggtgtctggtacttgaatacatacttctttgtttccttatctttgatatacaccaacgttttatttacagaaatttcccgtttccgaaaatctacatcatcccatgtaagcccaagcagttctccgccacgcattcccgttccgagtgctacctgtatgagattctcgtgtattctctcctttgcgtgttccaatacttcccgttgttctttcacagtcagtacccgtatctgttttgtctttgttttgggaacttccactcctgcacatgggttgaatgtaagaatcctgttatgcactgcatatttgaacatagcattgagaatattatacacatcccgtatagtctttgtgctgtaatcatcatctgccatattctgaagcagacgttccaaaataatcggattaaaatctgccacacgttgttttcctatctgcttctttatgtaacgtctgtaaaaatcatcataacgtacttgtgtactctccttgatagtccgcttcttatgggtattcagccagatatcaaaccatgtatccagagtgatattatcgccctttcctttcaacccatgcttgacttcatagcgtaaatcttccatttcttgaactaacttttttaagtccgcattatcttttgtatacgtttctcctttgtaataaaaccgccctctgtaaattccgctttttctctgcataattcccggcggtaatggatttccttttaagtccttgcccaatctgcacgctcctttccgtgcaaggactatcagaactggtctgacagtattatatgcttatttgtgtttatactgcaattacttcatatttatttttcagattatgcccttcgtttttcttcaaaaactggtctaaaacctcagagcgtataagaatcttatttccaatccttatgaccggaatcttctgccatgtaatcagctttcgcagattatttcttccaattcccgtatactctgacgcttcattcactgtaagggctttctttgtctgtatcgtgttctgtgtatgttctgtcaaagattctcctttcttcttccctcaaaaggaaagattttttatagtcctcatatatgcgttgttgttcttcgttcatctgcccccgttctattagctggcggatataatctctgttatccagttttccgattttatccattagctttaaagagggcgaaactgctacgttcagccactgccatgttcgttccagtgtctttttctctggattcatggtcaactttatcttccctacatcctgcatgagttcttcccacgggggataagtaggataaagccgttttcttgtaaccgtgctgttttccggcttctgtaaaaaccgcactttctcgtttaatacagacaacgcaatccgtgccacatccctgtctttcagaagttcttctactaatctgaccgcttttttgtgccggcatcgaagttcatatctgttccagtccgggttgagttcttttccgaacttttctgcctgttcatatcccttttcatagaatgtaatccgaaaatcactgtgtttactgccgagatatagtgtttttccctgcgcttctatttcatcctctttcagtctatcagaacgattctctgctgtatcacgcaactgactagatatcagcccctcgtttttcagacgaatcaattccgggatagacagataaggctttgtatcgtcgattgccaagtctatcctcgggaaattcaccgggtatctgcaaactctttccagaaaatcaaaccatgtttccttattcatcataaggaaattttcataattcctgcaccccgaaccactcataagaatctgaaatccctcatactgtgcatttcctgtcggtttcagaatcttgatattgtcaaatcttgctatcagttcgtgtccagcaattcctttttccttacc

SEQ ID NO: 2867 - DNA, 2620 bp, Unknown
  gut microbiota DNA sequence
atataaaattagatagagttacgcttccttttcgtaagcgcttaaattttagacatggatactaaaaatccccggctacatttctgcaaccggagcaccttgataattcacatatgattgattattgattcgagtcgtttgaacgacgttcgatttcagctttgacatcttcgttccatggggcaagcctatctaactcttcatcgctcatcctatcattcgggagcttttccagaagataggttagatagtgatagacgtttactccatttgcctttgccatttctaccattgtatagacgatagcactggcctgggctccgtttggagtatcacagaacagccagttttttcggcctactgtaaacggacggatagcgttttcgctgagattattagaaaaactgcagcgaccatcttccagataggtcataagataggattggcgattctgaatataggtaactgccttatccatccttgatccacggactggattctgtttatcaagccacgacaaaaagccttctactatcggcttttctttctcaagacgagctttcttgatagcatcgaaggatgagtacttcgctttaattacatcttccaaatggaaaagctggttgatatacatcataccctgaacagacggctgtgtataatccagctgcttccctttcggaattgcatctgtcagatatctgcggatgtgcacccagcaggctgttcgtttggcatcaggcactttgttgtaaccactgtagccatcacacatcagatatcccttgaatcccttaaggaattctactgcgttattcccggcacgggtttctgaatatttataaaggatgattggtaatcctccatcttccccactgcggaataaccacatgtaagattttgtctgtgcacgtctgccgggttcgtgtaatacctgaagtggtgtttcatctgccattgcgaattccctttttaagagttgtcggtggaagtaatcatacattggggtgaaataatccaatgtattgcggattacccaatttgccatcgttgctcttgtgatagcaacaccgtactgtgcccagtctttttcctgccgggtataaggaagactgttacaaaatttctgatacataacccatgcgatagtatctgcagcagccatgccgtgaagcatatgtgcatgaccgtctttcccttttttgataactgcaacgtcatctttattacattccgggcaaatataatttaagctgtatatttcgatcacttttaactttgctggtacgaaggaaagttcgcggcgtacgaattcttcaccgatttttaccagaggagcattacaaacagggcagactttttcttcatccggaagatccagatattttttgactaccggaatccctttgaaccgttctgcgttagttgcaagggatttccgcttttttgtctctttctctgggaaaagactttcgaaagcttccggttttgtaatagttggatcctgttccagttcagcttcattaaataaatttagctgtccaggaatctccatagaacgtttttcactggaagaaccgaaaagttttttgcgaagcagatccacttcttcctttagattatcccgttcctgagtaagagcctcttcccgtttgttagcggcatctacagttgcctgaagtgtttttatcatttttttcagatcgttgatcatatctttcaactcacggagttgaaggtctttagaactgtctgccactgcgttttcctcccgatttttgatacttctattataccagaaatcatggagaactcctagataaacaggacaatcatgaccttgaaaaatgctgaattttcaaggaaatccagtgcttttatgtgcactttttgccgtatagtttaagtggttttaatagcttttggctgctcgatatcgatgcctgacatcagccagtcgaactctctccaagtgagattccggacctctgatttatcccggggccaccggtaagagccttgggcggtgagtcttttgtagatcataacaatcccgtcaggttcttttaagatagctttaatcctgtcacatttgcgtccacagaatagatagagcgaatggtcgatttccatagagaactgctcctgaataattgcgcataatccatcgatagatttacgcatatccgttctgccacaaacgatatagattgcatcgacattggaaatgtccgctaacataatggctcctttaatgcatccattaaaatttttagaagcataggctgaacagtattgctcatacggattgttaatccttttgcttcaatctcaatcgtatgtgaattgtcaaggtacatagaactgcttctttcatcttgaaacagttctgccggagaaagttccggttctatagcaatctgaacgacatcctgtttgtgggatgtaagatcaagagtgctggctttgccaatcggatctggtatctgacaggctcttttgcgcagacgggaaacggcattatagaagcaacttggagaaataccttgtgcttcacaccatgcagcgtctgttaatccactttgcctgcattcagttaccagctccatccaatcatcca

SEQ ID NO: 2868 - DNA, 1848 bp, Unknown
  gut microbiota DNA sequence
attcgagagccgttataaatcatgtttggtatgtattataaaatatatcaaaataaagcgaggtgttaccaatgatagaatatgataatccgaatttcaacgctaatctttcagcactggtacaaggaatgtggtattcggaattgccggaactaatagatcttgacaggatttataataattttgaatctgttttgagaagcatggaaaatgggaaatatccgtattatccgttggacgagaatggattcataaaagattataaggctgtcatttctccgggatatttaagaaaaccaggagtggaagcgattacatattacaccttcaaaaaagatcattcattacgcgaaatgcaattggtgaatttgattcattactgtggatttgtatataattcactgtatatctttgatgagttgttttcagaattgtatattacggaagaaaattgggaatatgttgataattctaattcttatgtggttgcgggagaaagtttttggatagataccggatatgatgacgaagaagaatttgaagaaggagtttttatcaatgaaaataataagataagcagatgggcgaaaatagaagatgcgaaaatgcgaatacatgagttccagaagagtaagttatattacatcaagttagatatagaatcattctttcagaatctgtatacacattattttgcaagaatcgcgaattttgaaccgtataagtcgatggatgtaacatctgattattttgattttctggatagatttcatcaaagaattaatgacaatcagacgaagggagtgccagcgggaaatttctcgtctcacataggtgcggaattattgatgctgtgtgtggattatgaaatcagggaaataatagataagacagacattgcatatataagatatgtggatgatatgacgttctattcggatgatccgcagaaattagaagaaattgttcttcagatacaaaagatcctgacaaaataccgtttgcgtattaatggcaataaggtggaaagaggaaggacaacgcatctttttgatatgcaggtttcgaagaatgaaatatacagatatttcccgtatttaaaaagtgacagtgaagagacagaattaagctttgatgatttctgcgagatgaaatattatattgcagaattaatggggaagaaaagaatcagtcagataaaaacaattttgtcgttattcctgaagcagatgcgggaagaaaaaatctcattcaagaatatagatgcctggttttattatttctttgcattagtgtttgatgatgaaagtctgacttatcatatataccgtgtgttggatcaaatgcttggtatggcagtaggaatagaaaaggaacagctgattctggaattaaagaataaaacggtattgataaacggaaagtatgcggacagtttgttagaaatctggcattattatgtgttgacggagcatgtgtataaaaggcagaaagagcagttgtttgacgattatatagcgcagaaaggggatgaggatgctaacccgattattttgtgccatttcattgattcgggaagaaaaacgaatgaaaaagtatggaagtacatttttaatacatatcaacggatcacgcaggagacggattggaaaacccggattatgttttcaaaatggtggctgccaatcttcaagataagaatgaacgatggatttaattaccagagatttgtaaatgcatcacttttcccagctgtgcttgtggatttggcgaagtagaccattggggacggggaatagtggctttttttgtgtcccgggtggtattgatggtgtgatattaaagaaa

SEQ ID NO: 2869 - DNA, 11285 bp, Unknown
  gut microbiota DNA sequence
ggattgccctggtgaattgttgaggtataaatgctgacaagaccctgctcctttttttcattttcattagaagtcccccttctgaaattgttctcactaactcaccagtttatgaattacttttaccagcaattccccgtcaacaggcttggcaacatgttcatccattcccgcttcttttgctcttattctgtcctccgtgaacgcatttgctgtcattgcaatgatcggtacctcctttgcatcctctctgtccagagccctgatcatctttgtggcttcatacccattcatgaccggcatcatgatatccataagaatcacatcaaactcaccagacctgctttttttgaacagctcaacagcttcttgaccattccatgctttcgtcacgacagcaccttcattctgaagcataaattctgcgatttccatattcaattcattgtcttctgccagaagaatatgcattccacggatagacgcttcctgtttttctctggtttcaactctgtcgcttctgtctgtatcgatccgaaacggaacccggatcacaaatgtcgtccctacgccttcttcgctttcaaaggtaatcgttccacccattttctcgatcagcttctttgaaatcggcattcccagtcctgttccggcaaattttgtacggcttcctgtatgttcctgtgcaaatggttcaaaaatatatttctggaactcctcagtcattccgattccggtatcccggcagacaaattccattgtcgtcattcccggctgttcggatgggatttccctgcagctgatgtagatgcagccattttctttattatatttcactgcattcgacaggatgttcatcatcacccgtttcacatatcccgggcttccgataagatgccggtgtgtgatttcttttttctcccacacgatccggatattctgttctgcggcaatctgcccgatcacaacaagtacttccctggaaatgctgctcagattgaatggactttcttccagaaccacttcatccgactccagcttactcatatccaggatttcatttaccagttccagcaacagatgggatgctcctttgatctttaccctgtattccgtctgcttcttcatatcgtctgcataatgatcagccatatcgagcataccgcagatcccattgatcggtgtccggatatcgtggctcatacgctggaggaactccgtttttgcctcgttggccgcctctgccttttttgctgctatcaggagttctgctttgtatttttcctctttttccagctcctgtttctgatgtgcctgattagttctgtatccccaaaataagaacataccgaatatcagtaaataaagaaaaataacgcttatcacacttaatggaaggttatgaaatacttccgtatccggaagatacgcataaatataataatcccgctgcttcagcatgattccgtaacatccggtccctttattcttcaaatggaaaatgtgctgactgtctgtatgctttttcattgcctgaaccacctcattgccggcggtgttctgccccagaagtttctcatcattgctggcaacaacggttccctcatctgcaacaataatcgttccatctttctggatactataaccatttaaaagtccctgtatcgtcaacgtatagtttctggcaaattcaggagatgtgtaataataggtcgcaacgatacctggtgcatcttttctggcacaggctgcaatgtcaatatgtgatccgtctttcctgttaaaccgttctgaataagttctttcttcatatccggcaaaatccatgataatgtctttttgcagatacgccgtaatctcacctgtcagagactcatccgtactgtattcgcaatccgtctttccctcggcatccagtacaatgacaccatccacccagagagtctgcagattttctttcaggaactcctgacttagctgaccgccgttttctatttccgtatcgatattcgtactcatctgtctggcactttcaatggcgcggagaaggcttttggattccgaagattcattataatgggtgtaggtggaacactgcactttcacatagtttacaatctccaccattcttttctctgcttccgctttttctgcatggaagaaataaaacagagatactacagccacacagattccaatcagaccaccaatcagctggattcgtttttcttttttctttctcttaatatccaagatcatccacctccagatatttctggggatcatccagatattttccaatgattttcagggatgtgccatcctgacgcatctcctccagtgtctgatccatctgctcacagattccccgatcgtcatcttttgcaaaagcaacgcctattccagtaatcatcagaggctcttccaagatacggaagctcgcatcataatccttcatatactggacaactgattcctcgtgtgctgcaactgcatctacatatcctttcccaagaaacgtgtagatcagctccatgtgtcccaggctgatcagattgcccagctttggaattctctcatccgtccggttcagaaagatgccttccggtttggttgtggactgaaccgccaggttctttccctccaggtcactcagtttatagatatcgctgttctcatttacagcaaccacctggcggcttgcgatgtacggtcccgcccaacggtaatcgtcaaggcgtccttccatggaaaaacatcccatgatacagtcaatctctccactctccaccagttcttttttcttctcccagttaatctgtacaacatccacctgatatcccattcttttgaatgcttctgtagccagttctacatctataccagttggtacaccatcctcattcagataattgtatggaggatagttgtcgctgccgagcgtaatgaccggcttttctgtctcttttttactgctgtctgtatgtttacaccctgtcagggtgaccgctataattcccacaagcagaatgcctgcgatcactcttttccctttcattttcttttcactcctgctataaaaaacagcactgctaaacaagcagtgcctactattatctgcaactggctgccattttacaggccctgtagctttgcgtcgcagactttcgtctgttttgccacaaatgtttcctttattctaccatgtcatgttttttcttgtctattcttttctgctttatagcaaaatttctttacacacatcaatccatccacatgccccggcgacatcttccagttccgcaattgtaagcctgactgcactgtgatcattgccggctgccggatagactgtttcaaaacgttttaatgactcatccagatagactgtgattccctctttaatcccaaatggacacactccgcccggagcatgtccaatatattcttctacttcaccaaacggaatcatcttcgcctttacatgaaacagatccttatacttacggttatcaaccttcgccgttccttctgtcaggatcagtatcggttctccatcaaccagaaatgacatcgtctttgctttttctaatgacataattcatgcttcctttcctgcatactctaaaaaagggtagcaaaaaagcgggtgatgggaatcgaacccacgtatccagcttggaaggctggtgttctaccattgaactacacccgcatcaacaatgctcatttataatagcatggaattttatgaaatgcaagtacttttttaaatttttttaatttttttgacatttaactcaatttcatatctacaagacctgccactactaattctcctatttgcaatattttttcaaagtgctacaatatgtaaccgaaaaaatattacatcaaagaaggtatatgatatgttccaatattatctgattcattattttaactttaagaatgccggaggcttcatgcttgtctccctgctctgcctgatcgcagtgcttgcgatcgttgttctggcagcaaagcttaagaaacactataaacttaatacacaggatctgacgccaaaacagatccggaagctgaaccatatccacaaagtaaaagaaatctcgcttattgaaagcttttatgagatggtattttccagtacttcggtactgttgttcctgtctctttattatattatcgatgagcggatcccacaggctgccttttactggcagaaataccagaacgttatcttacttttatttctggtattttctgtatttatgacaaactggttcgatatcctgtttgttccgttaactgcaattccgaccagacaaaaggcgtccgtgcggctgatctctgccttttatattattctgatcttattatatatcaagttcatctaccatgattcgaactatgattcactgatcatgtattttatcacactggcagtcggccgtttcctgtactttgattctacactggaagatatcaaagaaacactgcagggtgtcgcaagaaatctgccgcttctggtactgatgggaagttattccgccatcgtatgctggtatggattccactgtggattcctgttgacttccaacggtgtgatccttagtacgctgctggcgcatctttttatggatgtatcgatttttgtgctggataagacgcggttgctgaaattatttatttaacctactttttcatttttttcaatataagtaggttacaaattataacgcacactatttccagaattacaatacttcctgcaatcgctcctatcggataatgaaaggtaaaataagaaagctgttttctcatataaacgttgattccttttagtatgattgatccaactgacgctgcaaggcctgcgataagcagtacataatagctgccttccagcaataacagctttctttcctgccggcgtgtcattccaatctttctcataatctccagttcttttttcctgcccacaattcctgtaaacataatattaaaataattaaccagtccgacacacaataatattacactgatacttccgaacataattctgtttccccggatgtagtctgcatttttctgcataagatctgatcttgcaatgtagaaaatgcctgcttctccttcgccgtccaggcttgtctgtgtattgcttttccgccgctgattttctgccgaaagaatcttctggatttcatacatgatatttttttctttctttttctctacgtttaattccatgcaaaatgtctttctcttcgtaggtaaacggttaaatcctttttcactgaccagataatagatatctccttctgcaccatgccaggtctggtggatctccgggaagtcatctgcctgattatccagatagccgcttaacgtatattctgtagacggcgtttctgcttttattatcccatcttccttgtctctttctttgtccgtcatggaattccaccggatacacgtttctttattctttaacggagataaacataccgtttctcccactgctttttctgcctgtctttcctgcttttgtgacaacttatgatcatggatgatcattacccctgttccgttttccagactgtccatatcaacttttaacttgtttttctctacataagtttttaatgcttttaattcattttcactgacaatctgaacagtatcggcatccagtccttcgatcatctttgccccggattcataatcagtactgctttcttctgcatattccacattttttcccagataagtatccttttccagtggacgtagtccatctctggatatactggaaagcatataggctccttcggttatataagatttctttttcttcacaccgtcaagattccacaagcggttccgcaccttttcggatatcggtgaaaattcatcatattcattgtcatataagagttcgaaactatctccttctgatttcagtggatcttgatccggcgactgtgtctgatattctgtcccgcttccctctttttttgcaaactcactgaattcccctgcgatcaggaaatccggtctctgattaatgatattcgcataatcacttccagttatgatcaccataacgatcaggaacatttctattccaaggaacattgaaatgactgtgatgacaaatctctgccggtatcttgtgacgtttttccacgccataaagcacagttcctgtgtttcgcttctttttttcttattaaaagtgccttttcccaggtctgtccttctacgatgccttttctttcttccggtctgctccgtgtaatgcattccctctatacaggttctgtttaccgtctgcctgatcacatgttccgatgcacccagaattaccagtaacgtgaaggctaccgctaacaacaagatttccatccgaaaaatctgcagttcttccgctcctccatacccattcagatactgccttcccactagttccggtatcagatatcgcagcagcagaaccgacaaaactgtccctgtaatacatcccggcactatcgtccgcatgatctgccggatatagatcttacggatctgctttttcgttgtaccgatcgtatgaagcagcgccatctgccggatatcgcccgacatggatatctgcatcacattgtagacaagtaagaatattccgcagataatcacaacggcctctactactgccatcccgtaacttcccgtcatctcttttacggcccggttctttgccgtatctgtcgcaatgatctgttgggaattgtctttcatcggtacatcttcgtataatttttcttctgtatccttccagtccatgtcattcgactgacagatcagaatatccgaatcttcttcgatatcatacccccagtccttcagtttcttttctgacacatatccgattgctttgctttttccattatcttctgtataagcactgtaccatccagataattcgaactcttctttttctgtctgaaaaaagctgattgatacatcaagtgctatcttcatccctcttttcggattatcaattcccagcttttttaatgtctttaccggaagcatgatttcctgctgctttttgggataggttccatggacaccggtataggcgggcttcatcatcttttcccatgcagtctgatccagcacttgtatggaacagatagattctttctttccggattctgtggcttcacccattttcattcttcttccggtttctcttacatatcctaaggaacgtgctttttcatattgctgctttgttccctcttctatgtaagtggatgccgttgttccatccatccgaatatttttcgtatattctgcatttatttttccgtaagccgttccaaagacaaatgtcagtgtaagaatacataaaacgactgctcccataagaatccggtttctgcctttattacattttctgatagcttccgaaagcagccggatcacgttcgtattattgttcggtgtaaatccattcatttcattacacctccgcattgtataatttcccgtcttctacgcgcaagatacggtctgccatctgtgcgattgcttcctgatgggtcacaacaatcaccgtctggtggaatcttgctgcacaagtcttcaacaatgcaattacttccatacttgtgacagagtccagatttcctgttggctcgtcacacaaaagtactgccggctttaccattaacgcccttgcaattgccactcgttgttgttgtccgccggacagttcttccgggagattctctaacttttctccaatctttaacgttcttacaatatcttccagcaatttttcatcaatctctgcaccgtccagtctgagcggaagtacgatattctcatatacattgataacagggatcagattatactgttgaaatacgaatccgatattccttctcctgaatatcgtgcgttcatcttccgtcatatctttcagactgttgccgcgtatccagacgcctcctgcagtgggttcatccagaccgcccaggatctgaagcaatgtcgtcttcccgcttcctgatgtaccgatgattgcgagaaattccccttcttctacagacagacttactccgtccagtgcgtggacttcgtagttatctgtcacataatatttttttaatcctgatgcttttatcatttccataagatttttctccttgctcatagttgtgtctatttcgtatacagaactttcacatatcttctacagcatacaggacaaatctaacaaacttctaacagaccggaagatttatctccatcatcaggccgctttccggatatctgctttttgcgattatatatccgccatgaaggcttataatttttcttgccaaataaagcccgattccatagcctttctgtgtcgtcacgttcttgcctctgtagaatctttggaagaccttatgctcttctcctttttcaattccaggtccgttgtcttttacaagaatttttgcacacatttcattcttctggactatcatttctatggttccgccaatctgactgtatttcacggcattatccagaatattatcgattgcttctccgagccagttggcatcatgcggacagttgacttcctgcggcagctctatcctaaatgcaatctgtttttcttctgccctcttttgaattcttccaagacagtttctcacggtctttaacagatctgtctcttctttccgtatctgaatcatgttctgctcaagtctggacatcttcacgaatccttctgtcaggaattccagttgttgttctccggatctcatcgcatttagatagttatccacattttcatccgtctttgtcccggttttactccattcttcctctaataattcctgatatgtcctgatattggcaaggggtgtccgcatctggtgtgcaatctccgagatcagcttctggatctcatctttactcttctccgcagcttctgtccgtccatttaacatttcctggatccttaccagtctggattccagtcttgcatataatgtctcttcccctgcttttgtttcccggatcttttcctctcgcaatatcttttccatacattctgctaataacttaagttctttctgtctgcattttccctgataaacatacatggcagttccacccagaattactcctgccgttactgccactacgattattatgatattcattcttttctcttcctttttgtatctgccattgctttttcagacgcactccagcttgtatcccaatccaaatacatttttcagatatatcggtgagcctgcatctgtttctatctttttccgcagccggttgatcgtaacgctgacggtattatccactacaaactggccatccagtccccatacatattccaggatattttctttcgtcagtacatttccctgattgtacatcagatattccagtaactgatattctctggctgtaagaataatttccttttcgttcttgtatacttgcttcttatcaggaaataatattatttctccgcatgccagttgtttttctctgttgttccgtccgatcactgcctctatgcgctttagaagcactttcatggaaaatggttttaccacataatcgtctgctcctgtgtcaaatgctgtcaacatatccgtttcttcatctcttgctgtcaggaaaatggccggtatctctgccttttcccggatctttttgtaacatgcaagtccattgccgtccggaagtccaatgtcaatgagaagaaggctctcactgcctgtaattgtagtaagagcctcttgttttgtatatgcagatacggtctgatagcctgcgttttgtagtactgttttgagtgcctgatgtaataatgtgtcgtcttctataattccgatcgtcatatattttccctccgatcactacgttctttccatatatttttccgtgtgtttattcatccatatcagtacaccaacacagatgacaatagacaccatcgataccgccgtcgtactgctgacaccgccaaactgtccgactataaataaatctgccataccatataatgtctgtaaaaagtacgataacagatatggcagtgaaaaataaatgactgttttaaatacgcttcctgctgttaaatctctttccatattgtaatgtccttatctttagaaatatttatttcttaattctattcccaattataaagttagtcaacgattcaaattcactgaatttttcttttatctttctttacacgatatgttaaaatacatttatacaaatgtttttatctaaggaggtttccatgaaaacaatcacacttcacaatactaatttatctgttccggaaattggtatgggatgtatgcgtattaacagcctggaaacggcagatgccgtaaaagaatggatagacactgcgcttgcacatgacatcaatttcttcgatcatgcagatatctatgcaaaaggacaatgcgaagagctttttggcaaggctctgactccttccctgcgtgaccagatcattctgcagtccaaatgtgcgatccgccccggtattgcttttgatttttccaaagaacatatcctgcagtccgtagatgatatcttgaaccgtctgcgcacagattatctcgacatcttattactgcaccgtccggatactttaatggaaccggaagaagtagccgatgcattccgtactttaaaagccgccggcaaagtacgtcacttcggtgtcagcaatcagaccccgatgcagatagaattattgaataaatatctggatgaaccacttctcatcaaccagctgcagttcagtatcgcacactgtccaatgatcaattccggaatcaatgcaaatatgtacaatgattctgcgatcaaccgtgacggcggcattctcgaatactgccgcttaaaagatatcaccattcaggcatggtccccattccagtacggtatgttcgaaggcgtctttcttggaaatgaaaaattcccggaactcaataaggtcatcaatgaactggctgaaaaatataacgtaaccgacagtgccatcgctgttgcctggatcttacgccaccctgccggaatccagaccatcatcggcacaactaataaggatcggattgctcagatcagtaaggcatcccatgtgcatctgacccgtgaagaatggtatcggttgtatatggctgccggaaatcggctgccgtaaaatttttcttttaagcttacaagagctg

SEQ ID NO: 2870 - DNA, 805 bp, Unknown
  gut microbiota DNA sequence
cccaccagaaaaagtagcaagaacgacagacattacgatacctatcaatgcgttgaatataagtccaagttgtcttgcctgatatgcaatccccggtcttccggctccgatattttgtgacataacagctatcatacccgatgatattactccaaacataataataaaaacgcctatatatgtattggctgttcccactgctcctacagcctggtcacttacagatgatagcataagcgtatcgaccataccggaaagcatataaaataaagtttctaagcatattggcacagatagctgtgttaatgtttttcttttagcttccatgtttttctcctcacatacaattcaagactgccacatcaataatacgatatatttctatgtgattcttgtataatatcatgcgaaaattgcactatttctatttatttcttaatccagtgcgtaatagaatcgcaaataaattgtataaatagctgtccttagcatactccataaacaacgcttgctattctcttgtcagtgctattctctctttcttcgctgctgccaaacttccatgtacaatacaggagataaccaccattgttgatttactgtagttgcgtttcttctggatacgcttatacatcttctcgatgggaaacggatcacaacagactcaatagctgcattatgcgaagcattaaactgccaacccggtgatcttttggaatatgtaccagacaccgaagcaacagaacgtgatactgaatagtcaaatattccgggataataaaaaagatagtaattttctgatctg

SEQ ID NO: 2871 - DNA, 2819 bp, Unknown
  gut microbiota DNA sequence
aaatgctgtaaatgtggaaggataaagaaagaactgaaattatccgaaagagtctatcgctgtgcgtgtggaaatgagatggatagagatcgtaatgcagcaatcaacatccgtgaagaggcaagaaggctgttgacagcataaactgtccgtatccggacaatagaaaaacaagaaaatatgcccgtgtccgggcaaaagaatcgcggggcacgcgaggatagcttgtagatacttggctcagtagagccattgaacaagaagcccccacttcaaaatcagagatttaagtggtgggagcatgtcacaacaatagaaattgtatcgcaacagcgatataataaataaaagatcatatgcctgacatgggaaatataagaatcaaggatgaaaatatgaataaaacaacaatcataaccaacgtacaaacccgtctttttgagctgcaagacttaaaataccgcgacttccatgcaaaactaatgccgacagtcaacaaagaaaagatcatcggtgtccggacgccggcacttcgtgtatttgcgaagaagtatggaaaaacggatgaagcaaaagaatatctgcagatactgccacatcagtactacgaagagaataatttgcacggacttttgatcgaacagattaaagactatgacacatgtctggaagaactggaacgttttcttccgtatattgataactgggcgacctgcgatatgcttgcggtcaaggtaatgaagaaacatctggatacatttatagatgaagtataccgatggatggaatccgaccatgcatataccatccggctcggtatcagtatgctgatgcgctattatctggaagatacatttcagatggagtacccggataaagtggcacagatccgttcggaagaatattatgtaaatatgatgcgtgcatggtattttgcgacggcgcttgcaaagcagtatgataagattcttccatttatcgaaaagcaaaaattagatgtctggacgcataataagacgatccagaaagctatcgaaagttaccggatcacgccagagcagaaagaatatctgagagggttaaagattaaaaaatgaaatccatatccatttatacgatcacaagaaatcagaatatcgaacagctgcaaaaactggaacgtcagttatccggaagagactattttctgaaaatgcgggaatgggaacttgaaagtatgaaagcactgacagccgaattggaaacctgcatggaggatgtatatgcactccgtttcttttattcgtttcagattccgagacttggaaaagaatttgaccttttgcagatcaaggaagatcagattattaatattgaattaaaaagcggtgtggtatcggatgaggccattcgcagacagcttttgcagaaccgttattatctgtcggtgcttggaagaacgattcattcgtatacttatatcagcagccagaaccgcctggtaagactgacgaatcatgatcatatcgcagaggcagactgggacgaattatgcagagctttgaaaagagaaagtccggattatgacgggaatatcgaagaactgttccgcgcagaactctatctgatctcaccgctcagagagccggaacgctttttacagaaagaatattttctgacggcacagcaaagagatatcgaacgacagatcctgaaaggaatccgtgcaaaacattccgactattactggttcagcggacttccggggacgggaaagacgttgcttctgtatgatctggcaatgaaattgtcagtgcgtcagcgggtctgcatgattcattgcggggaatcaggaaatgactggagacttttgcataaacgtctgcgccggataaagtttctgtctgccggtcagttatcgtttcagacagtaaagcagccgataacccaaaacgtgtgtacggaagaaccctctgatatatttttagaatcatacagtgctattctggtggatgaagcacatctgctttccatggaacaattaaagatattagaagagcgtaaaaaacaaatcccggtaatcttttccagcgatacggaagatatgatctcgcctgaagaactggatcgtgaaataccgcagcggcttgccggtctgccggatgtgcagagctttcatctgacgaatcgtatccgtacaaatgcagagctatcttcctttatccagaatatgatggatttgtcacgtagaaaagggaagaatggatatcccaatattgaagtagtgtatgcgaatgatgatacagaagcagcatatttgttacaaggctatatgagacagggctatcttatgaattcagatgtgagggatgtgaaccgtctggcggtcgtgatagatgaacggtattattatgatgaggacagttatctccgtacgagaaagatttgtgaagatgcatatgagacaacttgtacaacaatgtgtagagacaggaaatcagatgtaaggattctttttcaccagttgaatcaggcaaaagagaaactggcaattgtgatcaaggataatccggaagtgtatgatacgattttgaatctattatagaaagaaaaattgcctggtttcgaaatgcatggtataatatctctcaggtaaaatattaaatcagagaggtttttacaatgggagaaaaaaattacagtaaagtacctgtatttgaaaatggactagcacagcctgttttcaaattcacggacggaaagacaggagaaaattataatcctgccacatcaagtatcgtaagatactgcgtatatgtggaatctgactacgacatgga

SEQ ID NO: 2872 - DNA, 1245 bp, Unknown
  gut microbiota DNA sequence
aacgattcctctgctgttccatctggaacacgatactccgttgaaccgcagaagtgcgccggaattcaagaattattttaatctgatatggaaggagttaaatgaagatgaaccgaatgtcaaagactgagattcctgctgcctctggcacaaatatcacttccaatgcaagtgccatctctaccgccgcctcatcttctacagcgcaaagaacctttttatcaaagtaccggctgcacaaaaagttcgtagctgctgcccgggttctccttctggttgtcttcctgtctgtctgggaactgaccgcctcacatcaaatcatcgattcttttatctttagcagtccttctaagattgcccggtgttttctcgacatggtcgcagaccgcagcatcttcctgcaccttggcgtcaccttatatgagacgatcgtaagtttccttctggttatcgtcttcagtatcctgacggcggtgcttctgtggttcagtaagaagctttcagaaatcctggagccgtatctggttgttctaaacagtctgccaaaatccgccctggccccgcttctcatcgtatggctcggtgccacacgtaccaccatcattgttgccggtatgtcggtggctatcttcggaagcatcctgaatctgtataccagttttatgtccgcggatccaggaaagatgacgctgatctatacacttggcgggaaacggcatcaggtactgactaaagttgtgcttccaagttcgattccggcgatcatcagcaatatgaaggtaaatatcggattgtgtctggtcggggtgatcattggggaatttcttgctgcgaaagaagggctggggtatctgattatttattccagtcaggtgttcaaaatggattggctcctcatgagcatctgtcttctctgcctgtttgccatgtgtttgtatgcacttatcaatcagcttgaatcctgctacctaaaaagaaataagagatgagcctctccgttcatctcttatttctcctcattcccttcatctcatcgtatagctgaaagaatggttttcttaaccttttctgcatcaacaggctttgcaatatgtccgttcattcctttttcaaatgccttttttctatcttcctcaaatgcattggctgtcatagctatgatcggaataccggcttttttcttatcttccagccttctgattgcctgagttgccttatagccatccatgttcggcatctggatat

SEQ ID NO: 2873 - DNA, 56571 bp, Unknown
  gut microbiota DNA sequence
agtaggaagccgttcctgttcaggttccgtcggtgggaaatactaaagcgtcaaaattatgctaaaaacgggtcttcgaaatttgcaactcgccattcggctcaaacaggcaaatttcaaaaacccaacgcataattttgacgcttaactatttccaacaccttcttcacattcactggaacggcttcctactttttattccgtgggtatcgaatgccttacgaatcaaatggcaagtgcgtaacgattatggctgcggaaagtgtagtggtaagctgtgaacgagtggattttcatgactttttggcaagattgtgtaccgtagtggcctccaccgggttacacttccgggtatttcatttattaacatccgctgtcagtcacgacttgaaggaaacaatagataaggattattgtgaatgtggaatgccgttagaaacagttagagagtcagaagcaccgttaaaggaacgaagcgaacgtgtttgaggcgaacgccgagtttgagcgtagttcctttgcttttaggtgattctgactctcttagtgtttcttatggtatggaacctgaacaataatccttatctattgtttccttcaaggaccgagaggccgcttccccgttaataaattaaatcccaattaaattaaatcccaaaatacactgctgaatacgccgaaagatccagcacagctttcccatccgtaaccttcactttcttcttcgtatacttcttacctcccccaaatgctacatcatcacttgcaaggattacttccagttcttttgcatcctttattggaagctcatatcctttctgatcctcatccgagaaattaaagacagcaacgatacgatcttttccatctgttctttcaaacgcatagatacagcgctcttcctgatggcagtccagccactgaaatcctgcattctcataatctttggcagaaagagcaggagttgttatatacagatgattcagttcctgcatgaagtggtggaaagtatcgtgtatcggatacttcaggatatcccagtcctgctcgcgcttttcatcccattcgcggagctgaccaatctcgttacccatgaaattcaatttttttcccggatgtgcgtacatatacatatagaacgcacgtgcctgtggaaatttctctttgtactcaccatacattttttgtgcgatggttgcttttccgtgaacaacttcgtcatgtgaaagaggaagaaggaaatcatcgttataataatacatcatagagaatgtaagcttatgataatcacggcttctgtactccggtgctgtgcggaagtagtcgagggtatcgttcatccaacccatatcccatttgtaatcgaatccaagtccaccctgatctactggttttgtgacgccttcaaaagaggtggaatcttcggcagagagcatggctgtcggatgcattgtctttaacccgcggttcatttcacggataaaatccactgcattattgttgacacctcttgcaggttcgccctgccagtaaatgatccggctgatggcatccatgcggattccgtctacgtgatagacactcagccagtaatttgcagcagactgcaggaaacttcggacttcgcctctggagtgcataaagttacagcttccccattcactgacaccgacatcctggtgtggatattcataaagtgcagttccgtcataatcggcaagtgcatagtgatcaacggcaaaatgtaccggtacaaaatccatgatgacaccgatgtcattcttatggcaggcatcaatgaatttcatcagttcttcggcggttccgtagcgggcggtcggactgaagaatccggtgttctgatatccccaggattcatcgcatggatgttcgctgagaggcataatctcgatataattgtaatcattttctttcagatatggaatcaggatatcgatcatttccacatacgaataccagtcgtctgctttctcggacggttttttaaaagagccgaaatgcagttcatagatattgagtggcttgtccttgcataccgaacgtttctgcatccatttgctgtctttgaatttatagtgggacagatcgcggatgatggaagcaaaattcggacgtagttccatgccgaagccataaggatcgcagtgctccacgcagcttccgtcctgtctgtaaatgcggtatttgtacatcatacctggttttgctcccctggcatagcattcccagaaattgccatcataagttttgttcagttcccattcctgccagtcgttaaattccccaataaccgtaatgcgtgatgctgcaggtgcaaaggtacggaatgtggttccgtctttgtccgggtgtgcgccgagaaattcataagcgtcgaatattttccctgtgtaaaatccgtaaaaatccatagtaacctccgtaaaaatgcaacgttaataattaactgtcgaaaagataatggacagtagttgcttttttgttctataatcatattataagaaaaatgcaaggtggtatccaccgacaaaaccgacgaaaggatggataaccgacaaatatgagaaagtgttgggaaaatgggaggtaagatggatcttaggattgagaaaacagagcggggaatcaagaatgcatttatcgaactgcgttccaaaaaaccgctggaaaagataacagtaaaagaattatgtgaaagtgcaaggatcaataagtctaccttttatgcacattataaagatatctacgatctgtcagatgcgatggaagaagaagtggtacagtcgattgcgaacagtattcagcatccggaatatcttctggagcatccggcagaattcgcaagggaacttctgatggcctatatatctcagaattctctgacggcaatattattttccggcagtcaggcgaatcattttgcggatagtatcgagcggagcatcaagcagatgatctttgaaaaatatccggaattgaaagaagatacagcaatgaatgtgatgctcagctattgtatccagggaagctaccacgcttaccagaagaatcggagcggagatatcatgacggtgatcgatgtgatcgcagggatgacgggagcgattcgatcgatgtatgaagaacgattgggggagagcagatcatgaatctggaacaaccatgtatccgcatttcggtgcggaatctggtggaatttatattaagacatggagatattgacaaccggaccggaggggcagataaggatgccatgcagcaaggcagccgcatacaccggaaaatccagagacagcagggggcagagtaccgtgcagaagttccgttaagatatcagatcccgtgtgatggatttatcctgagtgtagaaggaagagcggacggaatcatagaacttccgaagcgtgtggtggtcgacgagatcaaaggtgtatttaaagatctgaaacgtctggaagagccacagcttttgcatctggcacaggcaaaatgctatgcatatatttatgcagaacaaaaaaatctggaagagatcggagtgcagatgacgtattgtaatctggataccgaagagatccgcagattccgcgagacatatacccgggcagaacttaagaaatggttcgaaaagctggtatctgaatatgaaaaatgggcaagataccagatgacatggagagcaaagagaaatgcttccattaaaaccgtagaattcccattcgaatacagagatggacagaagaaactggttgagtctgtatatcggaccattttaagaaaaaagaaattattcatccaggcacctaccggagtcggcaagacgatggcggccgtatttccggcggtgaaagctgtcggggaagaactgggagaaaagattttttatctgacggccaggacgattaccagaacggtggcaagtcaggcattcgcgattctgagagaacaggatctgaagatgaaggtcatcacattgacggcaaaagaaaaaatctgtttctgtgaagaaaccatctgtaatccggatgtgtgtccatatgcaaaagggcattttgaccgtgtaaatgatgccgtttatgaactgctcacatcgacagacgagatgagccgggaagtattggaagaacaggcaagaaaatggaaggtatgtccgtttgaaatggcactggatgtatcgcagtgggtagacgctgttatatgtgattataattatgtttttgatccaaatgcacatttgaaacgatttttcggagacggcgttaaaggagaatacctgttcctgatcgatgaggcgcacaatctggtagaacgcggcagggcaatgtacagcagcagtatttgcaaagaagattttctaaagattaaaaagttggtaaaatacggggaaccgaaacttgtctcggcgttggagagctgcaataagcagcttctggaattgaaaagagaatgtgacggctgtcagatactgaacagtgtgtcacatgtgtatattaagcttctgtctttgatgacgaagctggaagagtttatagaagagtgtaaagatgaagtgatacggaaagaggtgctggagttttactttggtatccgtaatttcatatatattcatgaccggcaggatgaaaattatctgatctattcagaacttagtgaagaaggaaagttttacctgcatctgttttgtgtcaatccggcaggatgtctgcaggaatatatgggaaaagggaacagtacgatattattttcggcaacgtttcttccaatcaattattataaaaaactgttatctacaacgaaggaagactatgcggtctatgcagaatctccatttgaaccaggtaaaagattattgcttctgggaaatgatgtcagcacgaagtataccaggcgaggatcggagatgtaccggaagtatgcagaatacgtgatgcatgtgataaaaggaaaaacagggaattatattgcgtttttcccgtcttatcgattcctggaaaaagtctgggaagtattcatggaattgccacaggaacagattgaagttgtagtacagtcccaatatatgacggagcaggaacgggaagaattcctgaaaaaattcgaacaggaaagagcacacagcctgatcggtttctgtgtgatgggtggtgtcttttcggaaggaattgatctgacggaagataaactgatcggggcaatgatcatcgggacaggacttccgcaagtgtgcctggaacgggaacttttaaagtattatttcgaccggaagaatctgaacggattcgattatgcttacctgtatccggggatgaataaggtgttacagtccgcaggaagagttatccggaccgatcaggacagaggtgtgatcacactgttggatgaccggtttatggacagacagtgccaggaggtgttcccgagggagtggaatgatttccagatctgtaacagtgaaaatattgaagaaaagattgcaaaattctggaaggcggaagaacagacagatacgaaataagcagcattaaaaagaaaaataccatgaggaacatatgctcctatggtattttccgtcatgcatccgaaagatgtattaaaaataagataaaaattcctgcgcggctttggatatcgggactttctcgttatatgcgatgacaagctccctttccggaagtacttcttttgtctcgacaatgaaaagcgaatccgaatcggaggtctgggaaaggcagaaatccggaataaatgcaattccaagtccgatgcgggcaagatcaatgagaagatcattactgctgagttcaatctccggaaccagatccagctggttctgaagaaacagattgtgcagatattcactggttgtactttttctgtccagcataaggatcggatagttcagaagttctttgaaagagagcttctttccttttaattcctcaaatgccttgtctgcgataaatacatcctgaaaatctttgattttttttacattcggaacattcccgagataagcattcggtgaattgacaacgatcagatccacctgtccggtctcaaggagttctacacagcgaatggatgtcgcattggtaactttgatatgcgctccgggaaattcccggtggaaacgttccagataaggtaccagaaaataccggcagatcgtgtcactggctccgatatgaagctgtcctccgcgtgctccgacatcgaggagctggctttcgccgcgcttgatcaggctgatcgccggttcgatgtggcgcagaaggatctcgccttcggtagtaagacggactttcttggtactccggatgaataaggtctgatccagcttcttctccagtgccttgatggactggctgacagccgactgtgagatgaacaattgcttggaggcttccgaaaagcttaaggtggaagctacatagtaaaatactttatataattcatagttaatatccatgataagtcctcctaatgaatcttaactgtattataagtgaaatgaaagaaaattacaaccgtatttataaatagaagtgttataataatgaaaagcaggaggaaaaagacttgaagaagctaacaacgatcgtatctgttatggccatgatgtgtgcagtgatggcagcactgatatttagtatatggctggccgtatatggagacagtaattacaggttttataaaaaagaatatcaacgctatgaagtgacggaagatctggatatgagcatagaccatgtcatgtatgtgacagaacatatgatgaattatctgatcgggaaagaggaggagctgtcggttgtgacgacagtggaaggaagagagcaggatttctttaatgaaagagaccggctgcatatgcgtgatgtcaggaatctgttcctgggaggaatgaaagtcggagtaatctgtctggctgtggcagcagttatactggcggtactgagaaaacgggaagaagactggaagagactgtatttcagaacatattcgatcgcactgagtgcctggctggtcataggcgtactgctggggattgcattccgtgtagattttacaacgtgttttacgatttttcataagctgttttttaccaataatctgtgggtattcgacccggagacggattatatgatacggatgcttccggaaggattctttttggatatggtgatccgcatcagtaaagtgtttgttgcagtgatggttctgatatggattgtattgttttggggaaaaagaaattataaaaaggaagagaagaaagatgattgataagtataagttataaaagtgtttagatatattaattgtattaaataatgattgttgtgttatactaacaatagaaaatgtgtaaaaattcatttgtggaggattacttatgagcaatgtaaaaagagtgtacgtggagaaaaaatcaggatttgatgtacaggcaaaggaacttaagaccgagatccgaagctatcttggaatcaaagacgtagacagcgtccgtgtactgatccgttacgatgtggaaaatgtatcggatgagacatttgagaaagcatgtaacggcatcttttctgaaccacctgtagatacattatataaagaagaatttcaggcagaagaaggaagcaagatcttttccgtagaatttcttccgggacagtttgatcaaagagcagattccgctgtgcagtgtattcagtttatcaaagaagacgagcagccggtaatccgtactgcgactacttacgtgatccatggtggaaacggaactgtttcggatgaagaattcgaagcaattaaagagcattgtattaaccctgtagattccagagaagcacaggaagaaaaaccggagacactggttactgtattcgatgagccggcagatgtaaaaatctttgacggatttaaagatatggaagaaagcaaactgaaagaattatacgattctctcggacttgccatgacatttaaggatttccagcatatccagaattattttgcgtcagaagaagacagagatccttctatgacagagatccgtgttctggatacctactggtcagatcactgccgtcatacaacattctcgacagaacttacagatgtttcgttcggcgatggtgattacagagagccgatggaagcaacttataaacagtatatcgctgaccacagtgagattttcaaaggaagagaagataagtttgtctgcctgatggatcttgcactgatggcaatgagaaaattaaaacgtgaaggaaagttacaggatcaggaagagtctgatgagatcaatgcatgcagtatcgttgttccaatcgaggtagacggagtggaagaagagtggcttgtaaactttaagaacgagacacataaccatccgacagagatcgagccattcggtggtgctgctacctgccttggaggagctatccgtgacccattgtcaggacgtacttatgtatatcaggcaatgcgcgtgacaggagccgctgatcctaccgtatctgtaaaggatacattaaaaggaaagcttccacagaagaaactggtcagagaagcagcccatggatatagttcatatggtaaccagatcggcctggcaaccggagcggtaaaagaaatctatcatccgaattatgttgcaaaacgtatggagatcggagcagtgcttggagcagcaccgagacgtgcggttatcagagagacatcggatcctggagatatcatcattcttcttggcggacgtaccggacgtgacggctgcggcggagcaacaggatcttccaaagtacatacagaagagtccatcgaaacatgcggggcagaagtgcagaaaggtaatgcaccgacagaaagaaagatccagagattattcagaagagaagaagtcagcaagctgatcaagaaatgtaacgacttcggtgcaggcggagtatccgttgctatcggagaacttgcagacggacttcagatcgatcttgataaagtacctaagaaatatgccggtcttgacggaacagagatcgcaatctctgaatcacaggaacgtatggcagttgttgtagatccaaaagatgtagatgaattcatgaaatatgcatccgaagagaacctggaggcaacaaaagtagcagttgtaacagaagatccaagactagtactttcatggagaggaaaagagattgtaaatctttcacgtgcattccttgacaccaacggagcacaccaggagacaacggtagcagttgacatcccgaacagaaaagacagtatccttgtaagagaagatgtgaaagatgtaagagaaaaatggcttggtatgttaaaagacctgaatgtatgctcacagaaaggtctggtagagatgttcgacggatcgatcggagcagcttctgtattcatgccgcatggtggaaaatatcagaagacagagacacaggcaatggtggcaaaacttccggtattaacaggagactgcgatactgtaagtatgatgagttacggattcgatccgtatctgtcaacatggagtccatatcacggagcaatctatgcagtgacagaatctatcgctaagatcgtagcagcaggtggtgactacagcaagatccgtttcacattccaggaatacttccggcgtatgacagaagatccacacagatggagccagccgtttgcggcacttcttggtgcttacagtgcacagcttggatacggacttccttctattggtggaaaagacagtatgtcaggaacgtttgaagacattgatgtaccgccgacactggtatctttcgcagtagacattgcaaaagagaaagacattatttcaccggaacttaagaaagccggagataaacttgtatggcttcgcattgagacggataattacgatattcctgtatacggaaaggttatggatcagtatggtaagtttaccgaagatatccacagcggcaagatcgtagcagcttatgcattagacagacatggtatcgcggcagcagtcagcaagatggctttcggtaacggcatgggtgtgaagattgagcataatgtagatgcaagagatttatttgcaccggcattcggagatatcattgcagaagtacctgcagataaggtgtctgaacttggaattacctataccgtgatcggtgaagtgacagataatgcggcaatcgaatataaagatgtgaagatcgcattagaagaggcagtatctgcatgggaagagacgctggaaaaggtattcccgaccaattccggagcggaaggacaggacgagaaggtggagaccggattatatgatacatcagatatctatatctgcagccacaagattgcgcagccaacagtatttatcccggtaatgcctggaacaaactgtgagtatgacagtgcgaaagcatttgaaagagcaggagcaaaggtgatcacaaaggtattcagaaatatgagtgcatctgatatcgttgattcggtagaagtattcgaaaaagcaatcggacagtcacagatcatcatgttccctggcggattcagtgctggtgatgaaccagacggatcagcaaaattcttcgcaacagcattccagaatgcgaagatgaaagaagcagtagaaaaattactgaatgagcgtgacggactggcacttggtatctgtaacggattccaggcactgatcaagcttggtctggtaccaggtggaaagatcacaggacagttaccggattcaccgactcttacatacaatacgattggacgccatatctccaagatggtctatacaaaagtggtaacgaataaatctccatggcttagagaggcagagcttggcggcgtatatacaaaccctgcatctcacggtgaaggaagatttgttgcaaataaagaatggctggacagattatttgcaaatggacaggttgcaacacagtactgtgatccggaaggaaatatcacgatggacgaagaatggaatgtcaacggttcttactgtgcgatcgaaggtattacaagcccggatggacgtgtacttggcaagatggcacactcagaaagaagaaacagaagcgtggcaatgaacatttacggagaacaggatatgaagatcttcgaatccggagtaaaatacttcagataatgaaacagacagagagaagagcagaattctatgtattgtgataaatgcaattcagagtgcgttctgtttcaaaaaaatgaataaaacacaagaaaaagcacaaaactcttgcaaaatctgcaagggttttgtaaaaagttgcaaaaataacaaaaaactgtaaaaatatcttgccagatacacttgtttgctttacaatagtaaaggacaaaggcgtcagggaaaaacagatggcgtaagtcatctgtttttttatagtaaagtatgcctttgaaaaggatacgtatattatttaggaggtagaaagctatgtcatatgttgatgaagtactggagaaagtagtagctaagaatcctgcagagccagaattccaccaggcagtaaaagaggtattagagtcattaagagtagttgtagaggcaaacgaggaaaaattcagaaaagatgctcttcttgagagacttgttgaacctgaaagacagattaaattccgtgttccatgggtagatgacaaaggacaggttcaggttaatacaggatatcgtgtacagtttaacagcgcaatcggaccatacaaaggaggattacgtctgcacccatctgtaaaccttggtatcatcaaattccttggatttgagcagatctttaagaactcactgacaggacttccgattggcggaggtaaaggtggttctgacttcgatcctaagggaaaatcagacagagaagtaatggcattctgccagagctttatgacagaactttgcaaatatatcggagctgacacagatgttccggcaggagatatcggaacaggcgcaagagagattggctatatgttcggtcagtacaagagaatcagaggcctgtatgaaggtgttctgacaggaaaaggattaagctacggcggatctctggcaagaacagaagctacaggatatggacttctttacttaacagaagaattattaaagatcaacggaaaagacatcaagggaatgacagcagcggtttccggagctggtaacgttgcaatctatgcaatccagaaagctcagcagcttggagcgaaagttgtaacagcaagtgattctacaggatgggtatatgatccggacggaatcgacgttgcagcattaaaagaaatcaaggaagtaaaacgtgcaagactgacagagtacaagaactaccgtcctaattcagaatatcacgaaggacgtggcgtatggtctgtaaaagtagacctggctcttccgtgtgctacacagaacgaacttcatcttgaagatgcaaaacagttagtagccaacggatgtgtagctgtatgtgaaggtgcgaacatgcctactacattagaagcaacacagtatctgcaggagaatggtgtaatctttgcacctggtaaggctgcaaatgccggtggtgttgctacatctgcacttgagatgtcacagaatagtgagagactgagctggacatttgatgaagtagatgcaaaactgaaaaacatcatggttaacatctgccacaatatggatgatgctgcaaaacgttacggaatggaaggtaactatgttgccggagctaacattgcaggatttgaaaaagtcgtagatgctatgacggctcagggaatcgtataagatttataaaaatgccccgcaggccttgtgtttgcgggactttttttgaattagattaacgcacagcgattttgatttattccggttatagaagaaattgtagaaaaaatttgaaaaaatcaaaaaaaacagttgactttccaaaaaactaatgctatactaacgaagtcggttcgagagaaacgacaaaatatatgggatcatagctcagctgggagagcatctgccttacaagcagagggtcataggttcgagccctattggtcccatacattttctaaaattggttgtggcgggatagctcagttggctagagcacacggttcatacccgtggtgtcgctggttcaaatccagttcccgctatttttgtgccaacgtatgcggaacaagctgcctgtggcaggtttgctgcatttctatatatcgtaacacagcaagagagtcggaagtatccggttctttttttgttgtttaattttatatatcaaagtatacaagaaaagcaaaatcgtctataatacattacatgtgatgtatagaaacaggagggataggaatatggtaccaagaagcagtttgatcattcgttcgcttgccggggcgtatataacttatttgggaggaaaacttttagtggattcgctgaaggatcatccggacaattatgtgttttatgcgggagccggggttgtttttgtgatcataggaatcttctggcttggaaaatatggttcaaagcttataaaaaaggaatatcaagatgacagtgtgatgggacaattaaaagataaggaagaacagtcagaagaagcagaaacagaagaagcagaaacagaagaagcagaaacaaaggaaggagaataatatatgcgtgtaggtatgggctatgatgtacataaattagtagacggaagagatctgatacttggcggagtaaagattccttatgaaaagggacttcttggtcattcggatgcagatgtattattacatgcggtcatggatgcacttcttggggcggcggcgcttggagatatcggaaagcactttccggataccgacccggcgtatgagggagcgtccagcataaaacttctggaagaagtagggaaattaattgatgaaaaattatatgtgatcggcaatatcgatgcaacgatcatcgcacagcgcccgaagatggcaccgcacattgaacagatgagaaaaaatgtggcagaagcactgcacattgaagttgaacaggtgaacattaaggcaacaacggaggaaggacttggatttaccggaacgggagaaggtatttcttctcaggcaattgcaagtctggatacgattgctaattacagttacagagtcggaccggcagaaggcggatgtgccggatgcggcggatgtatgaaagtgcaggacagataagaaacttgttgggaaggaaaatcaaaatgaaaataagaaaactggaaacaggagaaaagcagaatacaagaaaactgtacgaagaagtgttttcagaagacagcaaagactttgttgactattattacgaagaaaaagtaaaagacaatcagatttatgtggtggaagaagacggggagatacaggcgatgctgcatctgaatccgtacgaacttgcagtaaacggcagcagaaaagacgtgaattatattgttgctgttgcaacgagaaaatcatatcggaaacgtggctttatggcaggaatgttgaaacaggcgttaaatgatatgtatgcagacggagagacatttacatttctgatgccggcatcggagagcatctatctgccatttgatttccggacggtgtatgaacagaatcgggcatattatgatccggaagcggaagtggaagaaggtacagatgtgacggatgcctcagtggaagatgcagaaaaaatggctgtttatatggaaggcaggctgtcgcagtcgtatcaggtctacgcaaaaagaaatacagcttattatgaacgtctgatcaaagaatatgcaagcgacggagggacgttaaagatatataaaaaagaaggagcggtcacagatattaagatcgcagcagaagctgaagaagtagatggcgaaaaacctaagattatgatccgtatcatagatgtcagaaggatgctgatgtctttgcggcttaagacatttatgggaacctgttttacggtgacagatccggttatcaaagaaaataaccgctgtgtcatgattacgggaacagagttctcgggtgtgatgctgatggatggaaagccggagaacagtgaaggaacacttaccgtagcggcgcttacgagccttgtattcggtgcgaagaccgcagaagaaatctgtgcggacggtgatgcggtgatgtcggatcgaatgaaagaagaattagataagatcattccactgtcacagatttatctgaatgagacggtataaaaaagtatcttttgtttttctttagaattttctgaagtcacccttaagaaataccggataggataataataacagaagaaaaagctggaatcaggaaaaggatgaaaaatgtgatggagatgaatcatgtactggtcgtagaagacgacaaggaaatcagggaaggcgtggagatatatctgaagagtcagggctatgaagtatttcaggcggctgatggtgcagaaggactggatgttatagaaagggaagatattcatctggcaatcgtggatatcatgatgccggtaatggatggaatctctatggtcgtaaaactcagggagaagtatgatttcccggtgatttttctttctgcaaaatcagaagaagtggataagatcatgggattgaatatgggggctgacgattatgtgacaaagccatttactccgatggaactgcttgccagagtaaattcacagcttcgcagataccgcaggtttatggaacggctggaggaaaagaacgaaaattccaggatccatacgataggcggactggaaatcaatgaggataatgtagaagtcacagttgacggtgaaacggtaaagatgactccgattgagtataagatcctgctgcttctggtgaagagtccgggacgggtattttctgcggaggagatctacgaaagggtatggaatgaacgtgcggtcaatacagatacgatcatggtgcacgtcagaaatatccgcgaaaagatagagttgaatccaagagaaccaaaatacttaaaggtggtgtggggcgttggatacaaaattgaaaaacaggcgtaaactgggactttttcttgctgctgtgacgatacttggagcagcgtttttcatgatatataattatcatacgatatatagaaaagcagtcagtgaagcgcagaagacttatacaacttcactttcggacagggaatatctggaaagctttctggaattcagttatgtcctttataatcaggagatatcatccaagacaggagaagcaaaaatgtctcaggaggagatcagtgatgctgcagaagtatggatggaggattatgaagcgttatatccatatctggattacaggattgaggatggatcaggggcagtcctgggacgaagcacagcgaataccggaaagggtctggcagatgacagtttcaaagaatatgcatttggtatggtactgacttatgatgaacacggagatctggatgtaaaagttgtaaagagcagtgaaaagacaacgcagagtattgctctcagaaagattatagataactggagtgagacggttgaggatgccaccggcggcgaattgaagacgccgaagaaccgtacatatatctatggaatgaagaaaaacggaattgaacaatatctgaaccaatggtactggttcggagatgaagcgccgaatgatgcatggtatatgatgcttgcctgcatggcagcggtaggtgtggcagcatggattcttgcacaaagtgatacgctggggattggcggcagaaagctttttcaacagccgtttgagattgtttttatcgttgcggtaacaggactgggacttttggacaataagctgaactggattgtaacaaggacgaagggaaggcccggggcgatggatgccgcaatctggattgcagcatttgctgtcacatactgggcagcaagctgtgtcagtgaaatacagaagactggtgtcagaaagtatgttacagagcggacgctgttgtggcgtatgtggaaaacgctgaggaaagaagctccggcagcagcggaaagagtcggacgagacagcggaagattgtaccggaaagtgaaagaaatggcacacaggctgtatcagaccattacagatatcgactttacagacaaaagcagtaaggcaattctgaggattgtgcttgtgaactttatcattctggcagtgacgagtattttctggttttatggaattatggcactgatcatatattcggtaattttatactttattttgaagaaatattttaatgaaataaagaaaaactatcacagactgttagaagcgacaaatgagattgccgatggaaatctggatgtggagattgatgaaaatctgggggtgttcgagccgtttaaagaagagattgagaagatacagaccggattcaagaaagcgatagatgaagaagtgaaaagccagcggatgaagaccgaactggtgacgaatgtttcgcatgacctgaagactccattgactgcgattatcacctatgtgaatctgctgaagatggaacatgatccggaaagacagaaagaatacattgatgtactggatagaaaatcactccggttaaaagcattgattgaagatttgtttgaaatcagtaaagcgagcagccgttcggtgaacctgaatattatcgagatggatattgtgaatctttttaaacaggtgaaattagaaatggaagaaaagattacggaagcgaatctggatttccgtctggatattccggaggagaaagtgatcgtggcgctggatggacagaagacataccggatattcgagaatctaatcggaaatgcagtgaaatatgcaatgcctcatacaagagtatacgtgaagattgctgcggaagagggtgaggcggtattccggatgaagaatgtatcggccaccgagcttacatttaatccggaagagattacggagcgttttgtcagaggcgattcggcaagaaataccgaagggtccggactcggacttgcaattgttaagagctttgtggaaattcagaaaggaaagttctggatcgagacggaagcagatctttttaaagcagagatccgatggaaactggttgacaaaaaagatgatatcgcataatatatattctatatgagaaagactttgaacggaaagagtagcagatgcgttgtgtcgaaagagagaaactgtcaccggctgaaagcagtttccgattacagcttttgtgaagtgcgtccgggagtcggtccggtgagaaagaaggataacatcatagccggatccgggattacacacgttacgtgtactgagagaagaatgcgggtaatagaactgtattctttaaaaagagtggaaccgcggatatacttcgtctcttgtgtaaagcaggagacggagtttttttgtaccaaagcatacagaacaggcggtaaacttataaaaaggagagatcatagatgggcatcatatcatatgtcaatgaagaaattcaggtgatacgggaacgggatcctgcgatcaagtcgaatatggaagtattcctgtattctagtttcaaagcaattcttcattacagaatcgcacataagctctatctgaagaaacattattttcttgccagatgggtatcgcaacgggcagtaagaaagaccggaatcgagatccatccgggggcaacaataggaaaaggattatttatcgaccacggaagcggagtaatcatcggagagactgcggaactgggagataatattaccttgtatcaaggagtcacacttggaggaaccggaaaagaacaaggcaagagacatccgaccctgagagataacgttatggtaagtgcaggagcaaaggttcttggttcatttaccatcggagaaaattccaagattggagcgggatcggtagtactggaagaagtaccgccgaattgtacagttgtaggtgtgccgggcagagtggttaagatgaatgatgagaagataccgagactcgatatggatcaggtgcatctgccggatccgatttcaaatgatatcagagaactgcaggcagataacataagaatgcacagacagatccaggagatggagaaacgcatgcaatgtttaaaagagaatccgataccggaagaaaaagaggaggagaacgcgaaaaatgaagatttttaatacaatgacaaagaaaaaagaagaatttatacctttggaagaaggaaaggtaaagatgtatgtatgcgggcctaccgtatataactttatccatattggaaatgccagaccaatgatcgtattcgacacggtcagaagatattttgaatacaaaggatatgatgtgaattatgtatccaactttacagacgtagacgataagatcatcaaaaaagccatcgaagaaggggtgacagccgatgagatttccaaacgttacattgcagagtgtaaaaaagatatggacggtatgaatatcaaaccggcaaccaagaatccgcttgcgacggaagaaatctgcggtatggtagatatgatccagacgttgattgataaaggatttgcatatgagaagaatggtaccgtatattacagtacaagaaagttcaaagattacggtaagctttcgcacaagaatctggatgatcttcgttcgggtgaacgttcccttctggtatccggagaagatgagaaagaagatccactggatttcgtgctctggaaaccgaaaaaagaaggagagccagcatgggagtctccgtggagcgagggacgtccgggatggcacatcgagtgctcagagatgtctaagaaatatctcggagagcagatcgacattcatgccggcggagaagatcttgtattcccacatcatgaaaatgagattgcgcagagtgaggctgcaaatggcaaggaatttgcaaaatactggatgcacaatgcattccttaatattgacaacaggaagatgagtaagtcgcttggcaatttccgtacggtacgtgagatcagcgaacagtatgatctgcaggtactgcgtttcttcatgctgagtgcacactacagaagcccgctgaacttcagcgcagacctgatggaagcatccaagaatggtctggagcgtatcgtaaatgcagcagataatctgaagttccttatggaaaatgcaaaagcagaagcaatcacagatgcagaagcagaaaactttgcaaagacagaagaattcgttgcaggatttgaaaaggcaatggacgatgacttcaatacagcagatgccgttgcagcaatctttgaccttgtaaaatatatcaatacaacaaccgatgcagaaagttccaaagaatatcttcagaaattattcgatttgcttgtgaagttaacaggagttctgggactgatcgtagataagaaagaagagatcctggacgaagacatcgagaaactgatcgaggagcgtcaggcagcacgtaaggctaaagactttgcaagagccgatgcaatccgtgatgaactgttagagaagggtatcatcttaaaggataccagagaaggagtacaatggaaaagagcgtagagtgggaatttgacacttatatgcaggagattttccagatgaaagaggtggatatcaaagaatattcacctcttactttggcatatatcggagactgcatttatgatctgatcatcaaaacgctggtgatcaatgaaggaaaccgtcaggtacagaaactgcaccagaagaccagctcttatgtacaggcatccgcacagtcgaaaatgatgcgtacgatgcaggaatatctgacagaagaagagcatgccatctataaaagaggccgcaatgccaagagtgtatcgccggcgaagaaccagtcgatcacagattacagacgtgcgacgggatttgaagctctgcttggatatctatatctgaaaaaagagtggaaaagaatgctggaactggttaaaataggtctggacagtatcaaagaataataaggagtgtcaaatatgagtcacgataagaatgtaaatgaaagtatcatagaaggaagaaatgccgtcatggaagcatttcgttccggaaaaccggtagacaagctgtatgtactggacggatgtcaggacggcgcagtcagatccatcatccgtgaggcaagaaagcatgacacgatcctgaacttcgtggaaaaggaccgcttaaaccagttgtcagagaccggaaaacaccagggtgtgatcgcaagtgttgccgcatatgagtatgcagaagtagaagatatgttaaagcttgcagaagaaaaaggggaagatccgttcctgatcattttggataatatcgaagatccgcacaatcttggtgcgatcatccgtaccgcaaatcaggcaggtgcacatggcgtgatcattccgaagagacgtgcagtcggactgacggcaactgtggcaagaacttccgcaggtgcgctgaattatacgccggttgcaaaagtaacgaatctggtaaagacgatggaagatctgaagaagaagggcctgtggtttgtgtgtgccgatatggacggcgatgtcatgtatgatgtcaatatgaaggggccgatcggtctggtgatcggtaatgaaggcgaaggcgtgggacgtctggtcaaagacacttgcgattttaccgccagaatcccgatgaaaggggacatcgattccctgaatgcatcggtagcagcaggtgtgctggcatatgagatcgtaagacagcggatgcagtaagaaagtgaagtacaggcgattgccataagcagataagtatagagtgaaatgtggacttcggaggaaagtatgacagagtataaaaaattaacagacgaagaactgatccgcagactccgcatgggagaaaccgggattatagattatctgatggaaaaatataagaatctggtcagaaaagaagccaatgcaatgtatctgctcggcggagagacagacgacctgatccaggagggaatgattggactctttaaagcggttcaggactatgatgtggatcaggaagcttctttcttcagttttgcaagactgtgtgtaacgagacagctctattcggcaatcgaagcttcgaacagaaagaaacacagcccgcttaacagttatatttctttgtatgaaagagaagatggcgaaggttctctgatcgatacgatggaatccggacatgagacgaatccggaagaactacttgtcagtcaggaacacgcaaagtcactggaagaacgtctggaaaaagatttaagtgaactggaacgcagagtcctgtatcttcatctgatgggaacggattataagacgatcgcaaagctgctggaccggagtccgaagacgattgataatgcacttcagagaatcaaggggaagatgcagaagattctggaaaaggaaaaatagatataattaaaatacgatatgtcaagaagaaaaaagtgtatattttgtagagttttttgtatgtacaggaaaattacagattcttataatgatatatgcagtaaaggtaaaaataggaggtatcgtaatgacaaagaaaatattaatcaccggaggcgccggttatatcggaagtcacacagcactggaacttttgaatgaaggatatgaagttgttgtatatgacaatctgtgcaattcatcaaaagaatctttaaagagagtagaagagctttctggaaagcacattacattttatgaaggagatgtaatggatgaaactgcattgaaggcaatgatggaaaaagagggtgtagatgcggtgattcactgtgcagcattgaaggcagtcggagaatctgtacagaagccattagagtattaccgtaataatataacaggaaccttgacacttatggatgttatgaaacagacaggtgttaagaatatcgtattcagttcatctgcaactgtatacggaagtccggaggagatgccgattacagaggagtgcccgaagggacagtgcacgaatccttacggatggacaaaatccatgatggaacagatcatgacggatgtacagaaggccaatccagatatgaatgttattcttcttcgctatttcaacccggtaggagcacatgaaagtggacgtatcggagaggatccgaagggaatcccgaacaacctgatgccatatatttcacaggtggcagtaggaaagcttgaaaaactcggcgtattcggagatgactatgacacaccggacggaactggagtccgtgactacattcatgtagtagatcttgcaaaaggacacgtaaaagcaattaactatatcttcagcaatccgggacttgatgtgatcaatcttggaacgggtgttggatattccgtgcttgatatggtaaaagcattcggcaaagcatgtggaaaagagattccatatgagatcaaaccaagaagagccggagatatcgcgatgtgttatgcagatcctgccaaggcagcaagagtgcttggctggaaggctgaaaaagggctggatgagatgtgtgccgatacatggagatggcagtcacagaatccaaacgggtatgaaaaatagaaatttttaataagttggaaatacaatttatatgcagggcagtcttttcgcaggctgccctgtttttattgccatgtattcgtaaggagctgccagtggcaggtcctgtagatatcaaagtatgcaattgccggtggcaggttcggtagataccaaatagaaattcatattttttgaatagaatatcaaatgttcatatgcattcccaaatgttaaaatttattcatgctaaagagctgtgcagaaaaaatgtaagaaggagtaaagaggaatggaaaataacagtaagagcagtgtagtataccagggaaagattcccggaagagtaaagtatacatttgcatttggggcattgggtaaggatttgatttatggaatgatcgcaacattttcgatgatctattttacagatatcattaaagttgcaccggcgtttattggaacgatgttcttcgtggcgaagatctgggatgcgttcaatgatctgttcatgggaatgatcgtggataatacgagaagccgttttggaaagtttgttccgtggcttgtaatcggaacgctgatcaatgcgttcgtatttgtaactgtatttacagattttcatctgacaggtgtgaagctttgcgtctttgcgacggttgtatatattttatggggaatgacttataccatcatggatattccatactggtcagtgattccgaatctgacttctgatccacaggaacgtgaaaaagtatcggtattgccaagaatttttgcaagtatcggacagtcactgatcattgcaggcttcggtgtgcagattattaaaggacttggtggtgattacacaggatatcacagatttgcactgatcattgcagcaacatttatttttacaatggctgtatgtgtgatcaatctgccgaagatccagcatgatgttgaggaaaaggacaagatgaaattcaaagatatctttactgtcattaagaagaatgatcagttaagatgggcagtattactgattcttttatataacgtggcaattcaggcaatcatgggagttgcaacttattacttcagttatgtatgtaataatgcgggaatgttatctgcatttatgatcagtgcatcggttgcagaagtagtcggacttctgatctttccgaaggtaacaaaggtgttatccagaaagaaagcgttcctgatggcatgtgtactcccgccaatcgggttgatcttattactgatcgttggtattgcatgcccgaataacattgcgctgacagcagttgcaggtgtgatcgttaagacaggaaccggtctggaacttggatgtgcgacagtattccttgcagatgttgttgattatggtgagtatgttcttggaacgagaaatgaaggagtggtattctctttacagacactgatcgtaaaactgaccgcagcatttacttcactggcaatcggatttgtactggaacttaccggatatgtaccgaatgcagtacagtcgctgtcaacacagaattctatccgtgtattgatgtgtatcgtaccgacaatcggagtcattctggcatacatcgtatataagaacaaatataaattaagcgatgaatttatgaaaaaagtagtggctaagattaatggctccggagaggaagcataaaaggcgaaatacataatcataaggcaagctggattttaaattaaaatcggcttgccttattgctgtatacgcaggtacattatataatctaagaatacttaacaggttacaaaagcaacagtaaataaatacattgattgagaagaaagacatgaaaaataggttggaaaatggagaggaaccgtgaggatatttagtattattctggcagacgatgaacagcagatcctgtatggaatgaaaaaaggaattgaatgggaaaaacttggatttcgtgtggccggagtggcacagaatgggaaagaagcattggaactgatggaagaggtgcatccggatctggtgatcagtgatattaagatgccatttatggatggactggaactggcaaagcatatccatgaggattatatgaacacgaaagtaatcttattctccggatgggatgattttgaatatgcaagactcgcaatcagttatggggtatcggaatatattatgaaacccatcaactatgaggagatgcagaatcttcttatgaagatgcacgaagaactcgataaagaatacaatgaaaaaatgaaccgtgcccggttggaacatgcctatatggagagccttccgcttttgcggcaacagttttttactcgcctggtaacagaaaaaatgaataaaaatgagttgcaaagtcagattgataatctgaagctggaatttacagatgcagtatattcggttgttgccatgaaagtgggcagaggggatgaaaaggatgtactgagcgaactggcagtgaagcagaccataaaagaggcattggaaaagatcacacgtgtatacgaatttggtatgagtgataatgagatattcattctgggcagtaataaaaaacatgatgtcggaagaatcacaaggacgattgatgaagcagttgttttgatcgaacgtattttccaaagcaggatttcctgcggaatcagtgtcagcagggagaaaattgaggatatgccgtcattgtatgaacaggcacttgaggcactggattacaatctggtaacggtagaagaaagttatacgtattataatgacatcatgccggtgcaggatgtcaaagaagactggaatacaaaagtagagaatatagggaaaaatatcacacattatacggaagaagagttaaaaagtcaggtggaaagtctgcttgcatggcttcataggagacagtattcgttaaacgaatatcaggttctgatcctggaaatttcattttcattctctagattttacaaaaaatatcagatcacatcggatatggaatttgcaggaacgaagaaaatggcagtgaagattctctcgttaagtacaggggaagagctggatcactggctggtcaattactgtgaactgatccggtcgttgattcagaaaaaacagattgataataatgtcatcctggcggaacatgcgcgcaagatcgtagaagagaggtttccggatcctgacttaagtgtagagaccgtgtgtggggagcttcatgtcagttcatcgtatttttcgaaaatcttcaaacaggaaacaggtggaacatttgtgaactatctgaccggacgtcggatggaagaggcgaaaaaactgcttttacagacagattataagagtcaggtgatcggaaatatggtgggatatccggagccgaattatttcagctatgtatttaagaaaaattgtggaatgtctccggtaaaatacagaaaacaggggggagatgcggatgaaggataaaaaagtaagtatccgtattgtgttcccgttcgtgatgtctgtttccattgcggtctgtattataagctgtatgtttttgttttcgcattatttttcgggatatttccaaagagatactattgagaaagtatcaaaacagaaaaaaacgctgtcccaggatttagaagcggagatagagaatatcaatgaactgatcaactcgatttattatcaggatatccggacctatgatacggcaacagaaatgtttcaaagagaaatggaacaacgtatggtgcgggaatcagaggtgctttatagcgctgcaatttacgatgcagatggaagcagtctgtggcattcggaaaaattaccggacaggaataaagcggaggtaaaacaggaagactggtttcaaaatgcacaaaagaatatagagacgattcattacggagagaagaaacttgtacaaccagacaaggcaagatacgtttatgaaatcagccgttacatagaatatgtggaaaatggcaatatgaagtctggagtactgcttctggagtattatacggattcgatagatgaggtattgctgcattataagagtcaaaaatcggcatactgttaccttctggatacaaaccggcgattactgtatcatccatttgaaaaagagatcgtttcgggaatgtatcaggaaaaaacggtgaaagaggcaatggcctgcaagaattataaaatagaagagcagagcggaggaaaatggctgattgagcgccagcagattggatataccggatggaatgtggtactcgtaaactcgatgtccagtctggattttgaaagttataatctgcactatgttgcatggtttactctgctgctggttggcgtgatattaattttcctggatattttactttttagaagctttacggatccagtttatcgtctgcttcagacgatgcaggaatttggaaaaggcaattatgatattaaggcaaaagaagagggaatcggagaactgaaaaatctcagcgcacattttaatatcatggcagataagctgcaggaacagatggaagaaatccgaaggaacgaatgcgagcgtcagcagatggagaagaagttgctgcagtctcagattaatccacattttctgtataacacattggactcgatcatctggatgatacgaagtgaggaatatgaaggggcaggaaagatggtatctctgcttgcaaagtttttccgtatctctctaagtcagggaaaagatatgattccgttggagaaagaattggaacatgcatccagttatctcgcaattcagaatatccgatttaaggataaatttgaatttcagatagaggcagatccggcattgttaaaatacttgtgtccgaaattatccattcagccgctgcttgaaaatgcgatttatcatggcatggagggaatgtatgaggacggagagattaccatccggatctatgatagggatggagatattggaattgatgtagcagataacggacctggaatgacacaggaaaccatagatcatatcatgcacaacaaagtaatttcgagcaaacgcggatcggggattggtgtgcggaatgtaaacgaacggatccagctgatctacggagaggattatggcgtaatcatcacgagcgaactggatgaaggaacgacagcgaccattacaattccaaagatggaggaaaccgatgatgcaaggtagaaaaaaacatatattgctgatccttttacttcttttgatcgcatttgtatccatgcagatgatggcaggccagaattacacagaggaaaagacgaggattacggtgatcttaccgaaagacagtcagaatgagctgtatggcctgttggatggaatacgggaccaggcttatgatgaccatgtgaaattggatgtatggtataaaagcagactgacggaaaaagcgtttgatgaacttgtgaaagaagaaatggagaatggctctgaagggatccttcttgtatatccggaaatgtatctggagaaaaaggaaggcggttataagaaaaataatcttctggcagtgacagatacgatgcagagtgagtttaagtattatgcagctactttaaaaagtaagaaagaacaatatcgtctgccggtagaagatgcagtgctggagcaggtgagaaatggggaaaaaccattcatttatgtagaaaatacatacagacttggctatgaaagcatgcagatgttagaaaagaaaggaaagacaaaagatatgaagaatatttgtctgaagccggtaagactggataaagaaaggatggaaagcggtgaatatgatgcgctgctttcaaggtgatcggaagatgaaacacggtaaaaaatgcaagatagataaatacaccctcatactgagcgttttgctccttcttctgaccggacttgtgatcgcatgggaactgccgcaaaaagaagaccggtatatacatgtcggaattgcagtatatgaccgtagcgatacatttatggaaagttatatcagagaactggaagataagataggacagacgagaatacttgggaaaaaagtatcttatgaaatctatgatgcagaagggatcggcagccgtcaggaaaaacagctgcaggagatgtatgctcaggattacgatgtgatgcttgtaaatcttgtagaaccggcatcggcggcaggtgtactgactgacgccaaagatgcagacataccagtcatcttatttaacagggagattgatgaaaaggacttgaaaatatcgaaaaatgtctggtatgtaggaacggatgccagagcggccggtgtgatgcaggggaaactgttgaaagatctctggaaaaaacaaagcagaatactcgactggaatggaaatggaatgctggattatgtactggtagaaggagaagaatcacattttgatgcaatccgcagaacaagcggattcctggaaacgggtgcagaacttccgttgaatcagaagggaaatatcctggctgaatggaagagagagctggcttatgaaaagtttgcggcattagatgacgaggtagtacagaacgtagaggctgttatctgcaataacgatgatatggcacttggggtgtatgattattataaagaaaaaaatctgaaacttccagtgatcatcgggattaataacagtgaagaaatgcaccagaagattatgtcgggcgaaatgtatggaacgattgacaataagatggaagatcaggtaatggaaatatgccggctgatgcaggcaattttgaaaaaggatacaggatcatatcagaaagtgtggtatagtacgccgaaggcaatcgttaaagcggaaggaacagaatgaaagcaaaagaaaagaagaaataaaaaactctgtaaatcaatcatgatttacagagcttttcttttaagctgcctagcggaatcgaaccgccgacctccgccttaccaaggcgacgctctaccgactgagccaaggcagcatgcataagtgatatgcaacattgatactatacaatgaatcaggtgattttgtcaatacatttttttgtgatatcgggagaaaatcaaaagaaatataaagaaaacatattgccggaaaatgaaaataggaatagaatagtaatttagaacatggtagacagaagagggagagaaacatgaaaaagatgaaaacaatgaccgaaggagtgatttggaaagaaatactattctttgcaattccactgattctggggaatctgtttcagcagctgtataatacggtggattcgattattgtagggaattatgtaggaagcaacgcactggcagcggtcggttccagtggggcgatcatcaatctgctgatcggtttctgcataggtgcatcaacaggcgcaggagtcatcatttcgcagttttatggggcgaaaaatgcggaaggggtaagaaaagcggtacataccacgatggcgatcgcgctggcagcaggagtgcttctgacagtgatcggaattgcagtgacaccggtcatgctccggctgatggggacgccggatgaggtgtttgaacagtcagtagtctatctgcaggtgtattttgccggaagcttattctcggtagtctataatatgtcggcgggtattctgaatgcggtgggaaattcgagacgatccctggtttatctgatgatcgcggcaatttcgaacatattcttggatctgatcatggttgtcggattaaaactcggaattgtgggtgctgcactggctacggatatcagtcagctgatttcgtgcatttttatatggggatttctgatccggagtgaagaagtatacaaactgaaaatcagggagattcgttgctatgatcatctgctttctaaaattatccgcattggaatcccgacaggaatccaaaatatcgtaatttcgctttcaaacctgatcgtgcaggcaagtgtgaacagttttggagcgacagttatggccggttttgcagcttatataaaaatcgatggattcaatatcctgccggtactgagtatcagtatggctgcaactacatttgccgggcagaatattggcgcagggaaagcagacagggtcagaaaaggaatgtacatatccacagcaatgggggccgggtattctgtgataaccggaattgtgctgttgatattcgctccgcaggtaatcggagtctttacaacgaaccataaggtggtggaatatggtgtatatattatgaaatatttctgcccgttctactggatgcttggaatcctgcatgtgcttggcggaacgatcagaggaaccggcaagacgatgcaggccatgatagtattcctggtatcgctgtgcggattccgtgtgatgtggatcgcaggaaccatggcatgggcaaagagtctcggccatgtgatgatgtgctatccgacctcatggcttttgggtatgcttctgatgcttctgtatgtccggaaaggaaactggatggtcttaaggaaggaaaagttatagagaaatgcaaaaaaagtttgaagacaaaaggatgtcttcaaactttttttgacttatagctgattatttttgaagaaatcagacatataaaggtctaaaaaataaaaaaaagaggtttttggtgctgaaatcattgacaaacgacatgctgtgatttatttttttagataaagtccaaaaagaggagattatttatgaacaggaataatatgatacagacacttagaagatttaaagtcacatcgggatataaaggatactattatcttctggatgctgcagatatcattagcggattccatacaaaagaagagccgtttgcgacacagaatgatatatatatcccgataggagaaaaacacgaaaccagtttttataatgtggaacgcgggatacgtgtagttgttgataagtgttggaaagaagataaagaacttatgatggagatccttggttaccatgcgatcaagtgtccgagtaattcggaatttctggatgcatttacatttttttgcgaaaaccggtaaaagaggtatcttcccttgtttcattatattttttatgataagataatgtgcataatgtatagttaaaacctaaggaggacaccatgggagaagaaacaacagtttccaaaaattttattgaacaggaaatagataaagatcttgcagaaggagtgtacagtaaagtgtgtacgagatttccgccggaaccgaacggatatctgcatatcggacatgcgaagtcgattcttctgaattcaggacttgcaaagaaatataatggaacctttcatttaagatttgacgatacgaacccgatgaaagaagatatggaattcgtagagtccatcaaagaagatgtaaaatggctgggtgccgactggggagatcatctttattttgcatcagattattttgatcagatgtatgagtgtgcagtaaagctgatcaaaaaaggaaaggcattcgtctgtgatctgacagcggaagaaatgcgtgaataccgcggaaccctgacagagccgggaaagaacagtccgtatcgtgaccgtccggtagaagagaacctaagacttttcgaagaaatgaaagacggtaagtatcaggatggagagaaagttctgcgtgcaaagattgatatggcatcgccgaatatcaacatgcgtgatccgatcatctaccgtgtggcacatatgacacatcacaatacaggagataaatggtgcatttatccaatgtatgactttgcacatccaattgaagatgcaatcgagcacattacacattctatctgtacactggaatttgaagatcacagaccattatatgactgggttgtaaaagagtgtgaatttgatccggcaccgagacagatcgaattctcaaagctgtatctgacaaatgttgttacgggtaagagatatatcaagaagctggttatggatggtgttgtagatggatgggatgatccgagacttgtatcgatcgcagctctcagaagaagaggatttacaccggaatccatcaagatgttcgttgaaatgtgcggagtatccaagagccagagttctgtagattatgcaatgctggagtattgtatccgtgaagatctgaagatgaagaagcctcgtatgatggcagtcctggatccgatcaaactggtgatcgacaactatccggaaggagaagtggaatatctggatgtagagaacaatctggagaatccggaacttggtgtgagaaaagtgccgtttggacgtgaactttacattgagcgtaatgactttatgattgatcctccgaagaagtatttccgccttttccctggaaacgaagtacgtctaatgcatgcatattttgtgaaatgtgtcagctatgagacggatgcagaaggaaatgtaacggtggtacattgtacgtatgatccggagacaaaatgcggaaccgggtttaccggacgtaaggtaaaaggaacgatccactgggtaagtgcaccacaggctaagaaagcagaagtcagattatatgagaacctgatcgatgaagagaagggagtatataataaagaagatggatcgctgaacctgaacccggattccttacagattttaaaagagtgctatgtggaagacagctttaacgaagcaggtccgtgtgacagcttccagtttgtaagaaatggatatttctgtattgattcgaaagactccacaccggaaaatctggtgtttaaccgtattgtatctctgaagagttcttttaaactgccaaagaaataaacgggtgcaaaataaaaaaatgaatgaattaacgataaatcttaacagtcgttcgaagaagccgctgtatgagcagatttatgatcatatcaagtctgatatccagaacgggagactccgctatggggagaaactcccgtctaccagggctttgtccaagcatctggaagtcagccgcagtacggttgaactggcatatgaacagttattatcagaaggatatatcgagtctgcaccataccgcggtttttttgtggctcagattgatgaattatatcaactgaaaaaagaagaaaaaaagccggaacgtaagagaaaaaagaaaagaatataccgctatgatttcacaccgaacggagtagatcttaacagttttccatataatgtctggagaaaactttcgaaagacattttgctggatgacaggacggagttgttccgctcaggagatccgcaaggtgaatatggattccggggagccatttgcaattatctgtatcaggcacgaggcgtggactgttctccggagcagatcgtgatcggagcgggaagtgattatattctgatactgcttagtatgattcttggaaaagaacatactattgcatttgaagatcctacatataagcaggcatatagagtgattcagacacttggatatgagactgtgccggttacaatggatcacaatggaatgagaatatcagagctggaagattcagaggcagatattgcatatgtcacaccgtcgcatcagtatccgacaggaatcgttatgccgatcaaaagaagaatggagcttctgaagtgggcatacgggaaggaaggcagatatatcatagaagacgactatgacagtgaattccgctacaaagggaaaccgatcccggctctgcagggatatgatgcagaagataaagttatctatctgggaactttttcaaaatccattgcaccggctattcgtctgagttatatggtactgccgaaatcgctcctggatgtgtatcggacaaatgtgaactttatcaactcgactgtttcaaaggtggatcagatgatcgtacaacattttatcgaagatggttattacgaacgtcatttgaataagacaagagctctgtataaaaacaggcatgatgttctgatcgatgcactgaagcctctggcagatatctgtgcgatatcgggagagcatgcgggagtacatatcctgctgacattcgaaaagagatggaacgaaaatgagctgatcgaacgggcaaaaaaagaggatatccgtgtatatggactttcggattacaggatcaggaaagatacagatgagcgggcaacgattcttttgggatatgcgaatatgaatgaagaggatatcaaagaagcagtggggatattgaacaggtgctggagaagataaaagagcagtaagcaatgtaaaataagaaaataatttacattgtttactgctcttttgtatagctgcagtctgaattcagtctgtttcttctgtttcgtctgtttcttccggagaaacttttcctgcgttcagatcaacgtattctcggtcgaccggttgaagatcattgtcaagatcaaaatcttcatcttcaaagtcatcgttaaaatcttcgccctcatcttttttagactttttaaaataataaacaagacctgcagcggcactgccgattgcagcaagacctaataatttttttatccattttgccatgattgtatgactcctttccattctttcccttatcatagcacatattatatgtatttttctattaaattaaaataaattatctgaaagttgagaagaaaatgaaaatatgatacactgtataacatatcccggcggtacagagcatgagaaaatggcgtacattattaggaacaaagtggatgtacagcccgggataaaggagagaaaaagtatgaaagaacaaagcacaaaggctgttgcaaagaagaaattctttaaaatggtattcagccgtgccggaatttttgtgatactgatattggtacagatgctgatttttctaggcattccatactatctgaaagaatatgcaacatttatatacagtgtgatgtctctgatggagattatagttcttgtgtatattattaatacagagggaaatccggcgttcaagctgtcatggattctgtgtgtgatggcagtaccggttgtcgggacgatattttacatctatgtacatctgcagctggaaacacggtttgtacagaaccgcctggcggcattgcgtatggagacggaaccttacatggatcaggatcagaagatcacagatgcactctgggagggaaaatctgcaaatgcacagctgtcgtattatctgtcgcatcaactgggatttccgacttacaggaataccgaagccgaatattttccggttggagaagccaaattcgcatccatgataaaagaactggaaaaggcggaaaagtttattttcatggagtacttcatcgtagaagaaggtatcatgtggaatacgatccttgagatcctgaaacggaaagcagcggaaggtgtggaagtccggttcatgtatgacggaatgtgtgcatttgacctgctgccgtacagctatccgaagaaacttcagaaatacggtatcaactgcaagatgtcgaataagatccggccatttgtttcgacgatacagaacaaccgcgaccacagaaagatctgcgtgatcgatggacaggtgggatatgtaggaggcgtgaatcttgctgatgagtatatcaatgagaaggaacggttcggacactggaaggatacggcggtactgttaagaggtgatgctgtccagagcctgacgatgatatttctgcagatgtgggatgtggatatgcggggcgtggagccttatggaaaatatctgaccaaaaaagcggatacattgaatgaaaaactgggatatgtgattccatatgcagacagcccgtttgatcatgaaaatgtaggagaagaagtatatttccatattttgaaccatgcaaaaaaatatgtgcatatcatgaccccttatctgatcctggataacgagatgcttacgacactgatccgtgcggcgaaaagtggtattgaggtgatcatcatcatgccgcatattccggataagtggtatgcatttgctgtggcaaagacctattataaggaactgatcgagggcggggtacagatctatgagtatacacctggatttgtacatgcaaaaatatttgtatccgatgatgatacggcaacggtaggaagtatcaatctggatttcagaagcctgtatctgcattttgagaatggcgtgtttatctacgataatcctgaagtgcagaaagtagaagatgattttcagaatacgctggcaaaatgtcataaggttacggtgacggaagtgagaaacagaggaattctgatgaagatggcgggacagatattaagactggttgcgccgctaatgtagaaaacagaggaaatcctgtggattttatgtaaaaatgttgttgaaccaaggtaaaatgtatagtataatgcttagggtggtttgattagatccgctaaagaagactgataagtcatgttaatatcgcaggaggaatggatatggttaaagcagtagtcggtgccaactggggcgacgaaggaaaaggtaagattacagatatgctggctgaacaggctgatattatcgtaagattccagggaggtgcgaatgcaggtcatacaattatcaatgattatggaaagtttgcattacacacacttccatcaggagtattttacgatcatacgacaagtattatcggaaacggtgtagcactggatgtgccggtattatttaaagaagtacagtctatcatcgatcagggagttccgatgccgaagattctggtatctgacagagctcagatggtaatgtcttatcataagaattttgatgcatacgaagaggaaagactgggaggaaaatctttcggttctacaaaatcaggtatcgcaccattctactcagacaaatatgcaaagatcggattccaggtcagtgagctgtttgatgatgaactgttaaaagaaaaagttgttcgcgtagcagagcagaagaatgtattactggagcatctttatcataaaccattgatcaatcctgatgatttatataatgaacttcaagaatataagaagatggttgagccattcgtatgtaatacttctcttttcctgaacaatgcgctcaaagaaggaaaagaagtattgttagagggacagcttggatcactgaaggatccggatcacggaatctacccaatggttacttcatcttctacactggcaggatacggagcgatcggagcaggaatccctccgtatgagatcaagaagatcgtaacagtatgtaaagcatattcaagtgcagtaggagccggagcattcgtaagcgagatctttggtgacgaagcagacgagttaagacgccgcggtggtgatggcggagaattcggagcaacaaccggacgtccgagaagaatgggatggtttgactgtgtggcttccaagtatggatgcagaatgcagggaacaacagacgttgcatttacagtattagatgtactcggatatctggatgagattccggtatgcgtaggatatgatatcgacggagaagtaacaacagacttccctactacacatctgttagagaaggcaaaaccggttcttaagacacttccgggatggaaatgtgatatccgtggaatcaagaaatacgaagaccttccggaaaactgcagaaattatatcgagtttatagaagaacagatcggatacccgatcacaatggtatccaatggtccggaaagacacgatatcatctacagagagtctgaactttcaaaatagaatagagtatttaagaaaatacagataagcaggataaagacagggacagaacacaaaagtgttttatccctgtctttttgtggcgtaaattatgttttctttaagaaaaatcttatggtttattcagaaattttccacaacgacgacacattccatgcatataatgaaaccatcgtaaatataataataacgtcggtgtaatcagataccagagacgcaagaggggaaaaataatcaagatggaggtatgcactatgaatacaagagactggacaaaagaggaagcagaagttatttcaatggaagaataccttgcaaaaagaaagaaaatcagagaagatgaaagaaaacataagaaaaaaggctcagacgatcgtgaagaaagtctgatgccctttgagttctacatggtatcatcgcttgcatggtcgtgagacgaagaagacttggatgcgttgtccgggatgtgcctgtggaggctgtctgtcggatcatcagatggaatatcatgctgtgtgagtctgaacacaagcatgtaaccatagagcaataccggcagcacgatcgtacatgcgacagatgcccagagaagatcaatggaatgaggacttccgatcaaggcaaatattaatgtactgagatacataccgaataataaaaccgcagcaatgagtgccaggatacgttttgcatttttcataataatcatcctttacaatgaatcaagactttagtatattatatagagagcagtgaaaaattgcaaatgaatatcgtacaaaggagtatagaaatatgagcacattatatcagcagtggcagaacatcgcttatgatgagactgcagacagaagtcagttggaaaaattctggggaacatatttccagattgagaaagagatttacgaaaagcttctttctaatccggatgaagcagtgaaagggaccgtaaaagaactggctgagaaattcggacaggaagttctgactatgattggtttcctcgatggaatcaatgaaagtcttctgatcgaacaggatctggatgcagtagaagaagatacggtggtaagccttgcatttgataaagaaagactgtataagaacatggtagcagcgaaagctgactggctgtatgagcttccacagtggaaagaaatcttctctgaagaagaattaaagaaattctataaagagcagaaagaatctacaacaattcgtaaaccgaaaaaaatcggaagaaatgatccatgtccgtgcggatcaggtaaaaaatacaaaaaatgctgtggcagataatttttctggcagcaggtattctgagtctcatttattacggtgcgatctgtatcgcactgaaaaaatgggactctactttttccagattttggctggtatgcggaagtatcggaattgcaggaagtgttctgatccgtttatatggaatgccgtggatagtagaattgctgatcggtatcacggtgtgccttcttttgcttgcagagatgaagatcataacaggaatgtgcggaaaacctttggaaaaaggagcaacgggaaccggtagaagatggatcattgtactgggagcacaggtgagaggaaggaaaattacggattcattgaaacgaagactggattgtgcattagcctatctgacagaacatccggatgtgcatgtgatcgtctccggcggacaggggaaagatgaagaagtcacagaagcatatgcgatggcacagtatctgaagaatgcagggattgaccgtgaacggatcgtgcaggaagatgtgtcggtaaatacactggagaatctgaaattttccagaaaacttattgaaaatgcagatacaccggtcgggatcgtctcgaataattttcatgtatatcgcggatgcaggtatgcaaaatatgcaggctttaagaatccgtttccgatagcggcgagctgccatccgttattgtttccgaattattttgtgcgggaatgttttgcagtctggaaactgtgggtgaaaaaatattgacaaagtgtaaccgcgtgttataatgagagcgtatgaaaacacgttgaagagaagagtaagctgggaaagaaataccagagagagaagccgcaggctgaaagcttcttattttggaaccttctgaaaactacctctgagtggctgaaaaacagtccggtgattccgttatcgtcataattaagaggttctgacataagaagtcttgaagatagagaatctgaagtgtcagttcaaacagggtggaaccgcgagataattcgtcccttacagcaattgcctgtaagggactttttttatcactatgtaaaaaacaaaaagagaggacatgataattatgaaaatcacattaaaagatggatctttcaaagagtatgaaggaagtatgtcagtgctggatattacaaaagatatcagcgaaggtctggcaagagtggcaacttccgcgagagtaaatggtgaagtggtagatctcagacatgttgtagatgaagattgtgaactggagatacttacatttgataacgaagaaggaaagggtgctttctggcataccacatcccatattatggcacaggcaatcaaacgtctgtatccggatacaaagcttgcgatcggaccgtcgatcgagaatggattctactatgatgtagaccgtgagacaccattcgcagcagaagatcttgaaaagattgaaaaagagatgaaaaagatcgttaaagaagctcttccgatcgaaagatttacaaagacaagagaagatgcaatcgcatatttcaaagaaaaagatgaaccatacaaagttgaattgatcgaagaccttccggaaggagaagagatcagcttctatcagcagggagaatttgttgatttatgtgccggaccacacctgatgacaacaaagccggtaaaagcatttaaacttacaagccttgcaggtgcttactggagaggcagcgagaagaataagatgctcacaagaatctacggtatctcttatcctaagaaggcacagttagatgaatatctgacaatgcttgaggaagcaaaaaaacgtgaccacagaaaactcggcaaagaacttggacttttcatgatgtgtgaagaaggtccgggattcccgttcttccttccaaagggaatggtacttaagaatacattacttgattactggcgagaattgcacaaaaaagcaggttatgtagaagtatctaccccggtgatcttaagcagacacctctgggagacatccggtcactgggatcactataaagaaaatatgtatacaacacagattgacggagaagactttgcgatcaagcctatgaactgtccgggcggaatgcttgtatacaaagctgagccacgttcatataaagatcttccgcttcgtgtcggagagctcggactggttcaccgtcatgaaaaatcaggacaattacatggtctgatgcgtgtgcgctgtttcacacaggatgatgcacatatctttatgatgccggaacagattcgtgatgagatcaaaggtgttgtagcgctgatcgatgaagtatatcagctgttcggattcaaatatcatgtagaactttctacacgtccggaagacagcatgggaagcgacgaagattgggaacttgcaacagaaggtcttcgcggcgcactgaatgaccttggtcttgactatgtggtaaatgaaggagacggagcattctacggaccaaagattgatttccatctgacagactctatcggaagaacatggcagtgcggaacgatccagcttgatatgcagcttccacagagatttgaactggaatatacaggtgcagacggagagaaacaccgtccgatcatgatccaccgtgtagcatttggatctatcgagagatttatcggaatcctgatcgaacattttgcgggagcattccctacatggcttgcaccggtacaggttaaggtgcttccaatctcagataaacatctggaatacggtcagaaagtactggagacattaaatgcagcaggtatccgtgcagagattgatacacgtgcggaaaagatcggttataagatccgtgaggctcagatgcagaagattccatacatgcttgtagtaggagcaaaagaagaagaagaaaatctggtatccgtaagaagcagatttgcaggagatgaaggacagaagagtctggatgcgttcgtagcatctgttgcagaagagatcgcaacaagagaaagacgagaagttgtaaaagaagaaaactaatttatttttacaaatgtataagaaataaaaagaactggcataatatatcttgtatttgaaaggaggatatattatgccagatttacgatgtaccgtacagacctgtacacacaatcagaattattactgtaatcttgacagtatcgtggtaggaggaaattccgcaaagaaagctgccgagacaagctgtgacagctttgaagcgagaaaaggcggaagtgcctatgcggatgcatactcgaatatggaaggaaaagaggcgtcggcaaagagcagtgtagactgtaaggcaacagaatgcatgtataataaagcctgccagtgccatgccggaaagatcagtgtagaaggcggaaatgcctgtcattgcggcgagacagagtgtgcaacattcaagtgtggatgtgcataagataaggcagatgccggataccggctttgacggatagagtggccgggcggaaataaaaaagatcagaacataagtttttataaaagttttatagaaacaattgttctgatccttttttgtcggttgacgtaaatttacggcaagggtataataattttatatgcgaaacaggcaggaaagaagaggagtttatgagcaaagaagaaaatacatattataaagaccgtcctagttttgggagaaagggtccatccaaattaagacagcaattcaatcgcggaatgacatatttcctggtgatcgttgcctgtattttggtctattttgcaatgctgcgtgtgacagcaatttcagatacggtattaaagatactgtctatcctgaagccggtgctgtatggatgcggaattgcatatttgttgaatccgatcgtgagaacggtagatgcatatctggtgccggttctggaaaagaatatgaagaagaaagaaaaagcgaagacagtatcaagatgtgtgggagtgatcctggcattggtcgtactgatcaccgttgtgacaacgcttatcaatatgctgatcccggaactgatcgcaagtatccggaatcttatctttacgcttccggctcagatcaaccaactggtgaagcaggtgaatcatatacaactggatgattcggcaatgacgacaatattgaagaatgcgatgaacgaggcatctacaagccttcagaactggatgcgtacggatcttctggataaagtaaatgaactgatgacccatctgacggttggattatatacactggttatggaattgttccatgcggtaatcggagtgatcgtatcggtgtatattttgttcggcaaagagacgtttattaatcagagtaagaaagcaacatatgcgatcttcccgacagaacgtgccaacctgttgattcatattgcagtaaagacaaatgagatattcgggggatttatcattggtaagatcattgattctatcattatcggaatcctgtgctttattggtacatcacttttgaatatgccgtatgcaatgcttgtcagcgtgatcgtgggtgtgacgaatgtaattccgttcttcggaccatatatcggagcaattccgagtgcggttctgatcgcacttgcagatccgatgaaaggagtctatttcctgatcttcatcttgttgctgcagcagtttgacggaaatatactgggaccgaagattcttggaaattccaccgggctgtccgcattctgggtaattgtatcgatccttctcggaggaggcttatttggaattctcggaatgttattcggagtgccggcgtttgcagtcatttattatattgtaaaactttttctggataatcagttggagaaaaagaaattgccgacagagtcagaatgctataacggagatagttatgtagataatgatgggacatattttcagaaaaaagataatatgaccgagaatgaaaaacagaagacagaagaaaataaaaaggaaaaagaggaataaattatgccgatcagagtgcagaatgatctcccggtcaaggagatattagagagtgaaaatatatttgtgatggatgaacaccgtgcaatgcatcaggatatccgtccgatcaagatcggacttctaaacctgatgccattaaaagaggagacagaactgcagatattacgttcgttgtctaatacaccgcttcaggtagatgtgacatttgttgcggttgcttcacatcagtcgaagaacacttcagtgagtcacctgaacaaattctatcagaaatttgatgagatcaaggataaaaaatttgacggatttatcattaccggagcaccggtagagcagatgccgttcgaagaagtggattactgggatgaactgacccgtattatggactggaccaagacgaatgtagtatccacactgcatctttgctggggagcgcaggcaggcatgtattatcattacggaattgacaaggtccaattagataagaaggcgttcggtctcttctggcataaagtgctgaaccggaaaattccgctggtacgtggatttgatgatgtatttctggcaccacattcccgtcatacagagacaccgctggataaagtgcatgcggatgagaggattacggttctggcggaatctgacgaagtaggtctgttccttgccatggcacagaatgggcgccagatttttgtgatgggacatccggaatatgaccgtataacattggacggtgagtataaacgggacaaaagtaagggacttccgatcgaactcccgaagaattattatcgggatgatgatccggagaaaggaccgctgcttacatggagagcgacagcgaataacctgtatacgaattggttgaattattacgtatatcaggctacgccgtatgacctagaggggacgccggattttacctggaaatagggcgtgattgaaaaaaagtaaaaaacttcttgacaaaacaactttgatacagtaaagtataaccataacaaagcaaaccgttgaaaaagaggagtagcttatacgatgacatccaagagagcagcaggtggtgagattgctgtatgaaattgataagtgaatggacttttgagggcagtctgaaatcaagaacttatatttattaatcgtttgagagagtatggcttgtcgggaaccgaacccgttatcaatcaggagtgtatgttagtacatgagaaagtggacgattcgtcaatttgagtggtaccgcgataataatagatattattaccgtctcaaaccttaaggtttggggcggttttctttttgtctaagatggtatggcagacggtaatcggtgaaagattttctctcctaacaactacagagaactggcaattgggatctgtagacaacaataatattttatacagaaaaaggagaaaaagattatgaaaaagaaaatggtaacagtattattaacagcggcaatggtaacagcaatggcagcaggatgtggcagttcatccgattccggaagtgataagaaagaatcttataccatcggaattgaacagtttgcagaacatggttctcttgataactgcagggaaggtttcttaaaaggactggaagcagaaggaatcaaagaaggcgacaacctgaccgtaaaatacaaaaatgcggcagctgacatggggactgcaaaacagatttccgacagtctggtatctgataaagtagacctggtatgtgcgatcgcaacaccaagtgcacagagtgcatataacgcagcaatgaaagctgacattccggtcatttacactgcagttacagatcctgtagcagcagaactcgcagacaaagatggaaaaccggtaggagaagtgaccggaacatcagataaacttccggttgaagaacagcttaaaatgattcgtgagatgcttccggatgctaagaagattggcatcatgtatactacaagcgaagcaaattctgtatcgacgatcaaagaatacaaaagtctggttaagaaatatgatttcgaactggtagaaaagggaatcacaacaacagcggatgtatctcttgcaacggatgatctgttaagcaaagtagactgtattaccaatctgactgataacacagttgtagcatcacttccaactatcctggataaagcaaatgaaaagaagattccggtattcggaagtgagatcgagcaggtgaagatcggatgccttgcagctgaaggaattgattatattgcacttggaaagcagactggtaagatggcggcgaaagtattaaaaggcgaagcaaaagcttctgagcagaattttgaaactatcacagaacctggattctatgtaaataacaaagtagcagaggatcttggaatcacagtaccggaagatcttgcaaatagcgcagtagaaagctttggggacgggaattaggaggcatttttcatgagtttcattacatcgatattagaacagggattgatctatggaatcctggcattggggatttatatcacatataaaatattagactttcccgatcttacggtggatggaagttttcctctgggagcagcgatcacagctgccctccttacaagaggaatgaatccatacatcacgctggttctttcatttctggccggagcagttgcgggaatctgtaccggactgatccatgtgaagtgtaaagtcagagatcttctttcaggaatcataatgatgacggcattgtggacgatcaatctgtatatagcaggaacggcgaatgtgccattattctcacagaagactatttttaacaatgatctgatggagaagatcattccggatgtacttgcaccatatgcgacattgatcatcgttctggtgcttgcattgatctgtaaagtattgcttgatctttatctgaatacgaagtccggattcctgttaagagccgttggggataacgatgtactggttgtatctctcgcaaaagacaagggcaatatcaagatccttggacttgcaatttcaaatggtctggtagcattggccggatgtatatttgcacaggaagagagagtatttgaaatttctatggggaccggagctatggtcataggactggcaagtgtaattatcggaaccagtattttccgtaagatgacactgctgcacacaacgacagcagtcctgatcggatcggttatttataaagcatgcgttgccgttgcactacgcaatttcgatccgcaggcgatgaaactggtaacggcagtcctgttcctggttgtgcttatcatcagtatggacagaaagaagaaggtgaacaccaatgcttgagttaaaaggaattcataaatattacaatccgggtaccgtgaatgagatgtgcttatttcaggacttcaacctgacgattgacaaaggagaattcgtctctgtcgtgggaagtaatggttccggaaagacttccatgttgaatattatctgtggaagtatcccggtggagggtggacagatcctgatcaatggatccgatatcacaaaacagaaagaatataagagaaaccaaagaatcggccgtgtctatcagaacccggcaatgggaacatgtccaacaatgacgattttggaaaatatgtctctggcagacaataaaggaaaggtattcggtctttccagaggaacgaacaaagcaaggatagattattaccgggagcagttaagccagctcggactgggactggaagataagatggatgtaaaagtcggcgcattgtccggcgggcagcgtcaggcaatggcacttctgatgtctaccatgacaccgatcgagtttctgatcctggatgaacatacagcggcactggatccgaagacagcagaactgatcatggaactgacagataagatcgtaaaagagaagaatcttacaacgatcatggttacacacaatttgagatatgcgatcgaatacggtaaccgcctggtgatgatgcatcagggaaatgcaatcctggataaaaagggagaagaaaaagataagatgtcggtagacgatatcctgacattatttaatgaaatcagtattgagtgcggtaactaaaagatgttatactggatatgccggaacaaaagcacagctttataggctgtgtttttgtagtttaagaagtatagaataaataacagaaaagaggatatatacatggcaaagagaatcgcaaaatttgaaaaagtaagctttgaacagtttaaagaagggtatctggatgccatcggacaggactccgatgaagttatccgcagtatctatgatgcattgaaacttccaaaacgtgcgacaaaaggatcggctggatacgatttttatgcgccgcgggcaatcacattaaagccgggagagacagcgaagattccaacaggaattcgtgcgaagatggaagaaaactgggtacttcagtgttatccgagaagcggacttggattcaaattccgcctgcagttgaataatacagtagggatcatcgacagtgattactataattcagacaatgaaggacacatttttgcaaagatcacgaatgacacaaaagaaggaaaaacagtggaaatcccggcaggaacaggatttatgcaggggattttcatggaatatgggattacggttgatgatgatgtggaagaagtccgtaacggcggatttggcagcacgacgaaataaccggaaagagaagcattccattttttgtataagaatgaaaaaaacgggacatactggaacatacagtctatgtatgtaagaggtggtaagaagatgacgcgtcaggaaatcccggtttttaagacaagagaagaaaatgtagcatatatgaacgcaacactcccgatccgggaaagctttgacctcatccagagggatctgctgatcggcgggagggtttcttctttttattatgtaaatggttttacaagtgaagagacaatgctgaagatcatggatgcacttctgaaagtgaaagaagaagacatgccggaggatatatggaagttcgcgaatgcatgtattccgtacgttggagtagatgtcatgtttgattttgatcagatattgaaaagtctgctgtcaggggaaacctgcgtatttattgacggataccgggcatgtattgtgatcgactgcaggacatatccggcaagaaatgtagaagagccggataaagacaagtcacttcggggatccagagatggttttgtggagacaatcgtatataacacggcaatgatgagaagaagaatccggcatccggcactgatcatggagatgatggaggtaggggacagttccaggacagatgtggcactctgctatatgggtgaccgggcagataaggcattgctgaaaaatgtgcgtgacaagatccagagcatagatacagatgatctgcggatgaatcagcagagcctggcggaatgcctgtttaagcggaagtggtataatccgttcccgaagtttaaattcaccgaacggccggatacagcatcggcatgtctgctggaagggaaagtggtgatcctggtagataattcaccgtctgcgatgatacttccgacatcggtctttgatatgatcgaagaggcaaatgactattactttccaacattgaccagtgtctatctgaagatatccagaacactgatcaatctgatgacgatattcctgacgccggtctttctgctttttatgcagaatccgaactggctgccgaaagtatttgcctttgtggcggtgaaggatacggtgaatattccgttgatctatcagctcctgatgctggaagtggcaattgacggcctgcgcctggcggccttgaatactccgagtatgctaagtacaccgctcagtgtgatcgctggtcttgtcatgggagaattttcagtggaatcgggatggtttaatgcagaagtcatgctctatatggcgtttgttgcagttgcaaattatacacagccgaattttgaacttggctatgcgctgaagttcatgcgtctggccctgctgatactgacggcattattcaacgggtggggatttgtaatgggatgtgttctggtggtgtgcagtatctgctttaataaaacactttccggaagaagctatcttcatgtaagcctgaaataaccgtgtgtgaaaaattaccattacaggaaaatgggataataagtatacaaaagaaaggcagagatagaaatgaatcacagagatgaaagactcggaagtgcaccgctgggaaaactgatgttttctctggcacttccttctgtggcggcacagcttatcaatgtgctttataatatagtagacagaatgtatataggtcatattccgggatacggaaatgcagcactgaccggtgtcggggttacatttccaatcctgacgatgatctcggcattcagtgcgtttgcgggaatgggcggagcaccgcttgcttccattcaactgggaaaacagaacagacagagggcagaacagatcctcggaaattctgcggggcttctggtactattttctgtaatcctgacagcattcttttcgatattcaagacaccggtcctgtatgcgtttggagccagtgatgcaacgattgtctatgcgagagattacatatcgatctatctgatcggaaccatcttcgtacagctggcacttggactgaatgcttacatcagcggacagggggaggcaaagattgcaatgttatccgttctgatcggggcagtattaaatatctgcctggatccgctgttcatctttgtactgcatatgggtgtgcgcggagcggctgttgcaacggtcctgtcacaggcggtcagtgcaatatgggtggtacatttcctggtttcggaaaaaagcgtgatgcgtcttacattgaaaaatatgcatttgaaaaaagatgtgatcaagatgatagcaggactcggaatctcaccatttattatgcagagtacggaaagcctggtaacgatcacactgaatacggggctgcagagatatggcggtgatctgtatgtaggatccatgtcgatccttatgagtgtcatgcagatgatcacgattccggtgcaggggatcacacaggggatacagccgatcatcagctataattatggtgctggaaataaggaacgtgtgaaagcaacgatgaaaagaatgatcatggtctgtctgacaggaacactgctgcttgcaggtgtggcaatttttgcaccacagatatacacagggctgtttacagataataaagaacttctggaactgacgtgtaaggttatgccggtatatttccttggaatatccatcttcggaatccagtgcgcatgccagacatcattcatttcgctcggacaggcaaaggtatcgttattcattgcgcttttaaggaagattattctgctgattccacttgcgattattctgccaaaatttatgggcgtgatgggaatctaccgcgcagaaccgattgcagatgtgatatcggtcctgacaaccagcgcagtatttatcattactgtgaaaaaagttttgcgtaatatgtaagacaatggtaagataaaaaggacttgaggatgaggaggtttccgatatgagtgaatatgtaataacgatcaacagtacatctgatctgccaaaagactgggtgtgggaaagagagataccggtagtcccgctgaactgtacgatcggtggaaagacttaccgtgatatgtatgatctgacagcagaagaattctatggtatgttagagaacggagagatggcagtgacttcacagccaagtccgcagactgcaatagatatcctggaaccgatcctgaaaaaaggaaaagatattttgcatctgagctttacatcaggacttagtggcacatataacagtatgtgtatagctgcagaggaactgcgtgaaaaatatccggagagaaagattgttgtgatcgatacactttgcgcaagcatgggagaaggcctgcttgattataaggcattggaacttcagaaagaaggcaggagtctggaagaagttgcgcagtgggtggaagaaaataaattaaaaatctgccatttctttatggtagaggatctgaatcatctgcagaaaggtggacgtatctcgaagacagcagcagtgatcggaacgatggtacagatcaagccgatcatttgtctggataatgaaggaaagcttcagatcatcaggaaagagcggggcagaaagaaaggcatgaataagatcgtggatatggcggtcgaagcatgcgagggaaagatgccggatatggtgatggtcccgcatggcaattgtccggaagatgcagcttatgtcgcagaactcgtccgtaagaaaatgggtgtgaccaatgtcatgatgaacaatctcggtcctgtgatcgggggtcatacaggcgccggaatgatcgccattgtatgcatggcagaccacagatagatacatagaaatattaagaatattaatagtaacatacaaaagcttcatttaacaaatgtataattatgctctatactgaaatcagaaagagagaaataaatcattctgaggaggtgtagagtatgttaagtatcatcggatggggaatcgttgcagtagtagcaatatatggagcaacaagtcttttcgcctagaaaagcatgcttaatatactgtgaaatagatcaaaagcagcataaagaagagtcaaagatgacaagaagcttacgggcagattgtcatcttttttgtatttatgcgggaaattctcaaagcacatttcttacggttcgcctgaacgatgattcgacactttataatacaggagcgcgatatatatgaaacatctgataattgataaaacgatgaaagaaatctggccggataccagagtgggatgcctgcagtaccgggtgaaagtggaaaagaagaacgaagaactgtggaaatatctgaagaaagatattttcaaaaagacgagagatgctatttttgacaacgggaccaatgaaatcccaaacgtgaaagaatccagggcagcatacaaagcattcggaaaggatccgagcagataccgtgtgtcttccgaggcactgatccgccggatcggacagggaaagggactatatgaagttaataccgttgtggatgtcaataacctgatttccatcgaatcgggattttcggtaggatcttatgacgtatctcagatctcagaagaactggtattccggatcggacagaaaggagagacttataagggaatcggaaaagatgagatcaagatcgaggcgcttccggtgctcgcagacaaagacggagccattggaagttcaaccagtgattcagagcgtgcaatgatcacggaggatgtgacagaagtattgacattgatctattcattttcaggaaatgatggtcttgaaaaagcattgaaatatggcagaaaatatctggaggagtatgccggggcacagaatctggaaagctggatcgtggaataaaggctgaattatcaggaatcaaaaaaaggatgaaaaaaagagaaaaaacagttgacataagaaaaataatgtgataaattatatgttgcgtaaggcaaaaaagaaagtagagtatccactctcaccttagcacaattgggtgactaatggtttgatattgagtatatacagatttgattatagatcttatgatacagatatgcaagtggatagtctcgaactattcacttatttttattttatgatggaggtgcacgacaattagcgatttaatgattaacgggcagattagagacaaagaaattcgagtgattggagaaaacggagatcagttaggtatcatgagtccgaaggaagctatgaagcttgctcaggaagcagatctggatcttgtgaagattgctccaaaggctcagccacctgtttgcaagattattgattacggtaagtacagatatgaacttgcaagaaaggaaaaagaggctaaaaagaaacagaagaccgttgaagtaaaagaagtgcgtctttcaccaaatattgagacgaatgatcttaataccaaagtgaataatgctaagaagttcatcagtaaaggtaacaaagtaaaggttacactgcgttttagaggccgtgagatggcacatgttcagcagagcaaacacattctggatgattttgcccaaatgcttggtgacattgcagtcattgaaaagccggctaagatggaaggcagaagcatgagcatggttttaactgaaaaacgttaaaaatacaatacaagttgaaggaggagcatatcatgccaaaaattaaaactaatagagcagctgcaaagcgcttcaaaaagacaggtacaggaaaattaaaaagaaataaagcttacaagagccatatcttaactaagaaatctacaaagagaaaaagaaatcttagaaaagcaacaattgctgatgctactaatgtaaagaacatgaagaaggtattaccatatctctaagataaggttcaatttgtgaaggaggaagaataagacatggcaagaattaaaggcggattaaacgctaaaaaaagacataacagaactttaaaattagcaaaaggatacagaggagcacgttctaaacagtacagagttgcaaaacagtctgtaatgagagctcttacatcttcatacgcaggaagaaaacagcgcaaacgtcagatgcgtcagctctggatcgctcgtatcaatgctgcagcaagaatgaacggactgtcatacagcaagttcatgcacggcttaaaagtagctaacatcgagatgaacagaaagatgcttgcagagatggctgtaaatgatgcagaaggatttgcaacacttgcagaagctgcaaaagctgctttagcttaatattaaaataaaattttagcacgcaggatttcctgcgtgctttttga

SEQ ID NO: 2874 - DNA, 804 bp, Unknown
  gut microbiota DNA sequence
ccggtaagggtctttcaaaaaggcagattgaaaaaataaagaaagaaggcccattaggattaggtaacgaggatattatagagattaatccaaattaaataatttatttaagctattgcaaccaatatgttgcaatagcttagaaaagaggtaaatatgggacgaccaaaaataaataaaactaaaataacaaatgattggcagaagtattgtcctgaattaagaaaattgcgtatgcttgatatagataatagagtaggaccgttagtaatcggcttctatttacaagtaataggagacgggacgatttatatgccgttatataaagtggaaaatctatatagccattatagtgtattaccttctagtttggaaatagaaggtcgaacaatggatatgcagacacacgaagcttatagcgagcaagttgcgcagcaattgattgaaaaagcttatattccgttacaaggtgaagtgacatttgagaatataaaaaatgggtatgaaagatattttaaaaatccaaataagggaacaattgtggaatatgaggactatgtgtatatcagtagttggacaagaaataagttattttttgagaccgcattaaatacggtttataatgaactaaaagcatggcctgaagaaagatattttgtacaggctggaggatttcaaaattggatattagaactggaaaaaaaggcgagcaatcatgaaatattagaagacaattatagaaaaaaaattgcaaaatataaaattgagaaattgccagaaagaccattttatttttaaatgaaa

SEQ ID NO: 2875 - DNA, 22476 bp, Unknown
  gut microbiota DNA sequence
gagctgtgccgcacgtgctaccattcttgtatcctgctcattctgagaactataaagtcccggatcatccgcaacaacaatgacaagtcctccgtttacacccatataagaaactgtatatgtagggtctgctgccacattaaatccaacgtgcttcatacaggacatcgcacgtacccccgctacagatgcaccgatcgctacttctgtcgcaactttttcattcggtgaccactcgcagtataaactgtctttatatttgaccaggttctcactgatctctgtactaggcgtacctggatatgctgccgaaacctttactccggcctcatatgcacctctggcaatcgcctcgtttccaagcataattactttttctgacatacttcttttccatcctttcgtgtaagcggcattccgtttacgccaccttgtaatagtataacataatactttcatgagttaaagcattgatttgtcaaattccaaatttttctgtcttcgtttcttttgcttccggattactctttaaatataaataccggcatcggcggacagttcttccggttatagtattcattgacgatcacggtatactcttttcccggaagtgctttcacatattccaggattttttctttctcttcaaacccggtatctccgccgctgtaaatgcacaggctcatcataccaccgtgtttcaatatgccaaggccttttccgattgcctcaatactggtcctgtatgtggttgcaagattatgatcacctcccggaagatatccgaaattaaagcagatcacatctgcactctcttttccggcataccggtccatatgttcatgaccatccagaattaattctgcctgcatttcttttccatgcgttttcagtaattctttcgtcacatccagagcttcctgttgaatatcaaatgcaagtacctttccattttctccggcaagctcacacaggaacaaggtatcattcccctttcccatggtcgcatcaatataacatccgcccgcttctgcctgtgaacggatgatctcgtgacaccagtatgtgatctgtgactgttttattcttcccatctgttatctctctcctaaaaatcaaacaatgacagctggttcgatgccggaagatccgcaaggattccaagatcaaccatcgtgtcaataacggtcttacttgcttttgttctctgtctgaaatcatccagcgacagataggtcccatcttttgaggcttctgcaactgcctcggcagccttctctcccataccgtcaatactggaaagcggcggcatcagtttgccatttacgatcaggaacttcgttgcctgtgctttgtagatgtcaagcggctcaaattcgaatcctcttgcatacatctcctgaacgatcttcatatctttcatcgtgtcctgttcttttttgctgagtgtcgcagaacgacgattgtaatcatcgatatagtactgaagcttttccttcccctgacacatgatctcataagagaatgcatctgcacggattccgaaatatgccccgtaatatgcaagcggatagttgatcttacaatatgcgatacggtatgccatcatgacatacgccgccgcatgcgccttcgggaacatgtacttgatctgctcacacgaccagacataccagtccggtacattatgctcagccatgtcttttttgaattccggccattccttacattttcctttggcaaccgttcctttacggacacgttccataatagtaaaggattcctcgctgtccattcccttgttgatcagatacgtcatgatatcatctcgggtacagattgcagtagaaatcgttgccttaccgctccggatcagttcctgggcattattcagccatacgtctgttccatgtgacagcccggagatacggatcagatccgagattgtattcggcttcgtatccacgaccatctggataacaaagtctgttccaaattccgggattcccagacatccgaccgggcatccgccgatatcatctggtttgatcccaagtgccgatgtatcatggaataacgaaatcaccccctgatcatccaacggaatcttggttgcatcaaaacgattatccgtctcattgtattcattgtccatcgccggagagctgatgtattcctccagcgtcttgatcatggtcggatcatcatgtccgagaatatcaagctttaacagattgtggtcgatcgaatggtaatcgaaatgtgtggtaacgatatcggtcgtcatatcattcgccggatgctgtaccggcgtaaaggagttgatctcttcaccaagcggaagtacgatgataccgcccggatgctgtccggtgcttcgccggattcccgtacagccctgtacgatacggtcaatctcacattttctctttccctgtccgtgttcttcgtaataattctttacatacccaaacgctgtcttatccgccagtgtaccaaccgttccggcacgaaacgtctgacctgcgccgaagatgacttccgtatatttgtgtgcattactctgataatctcccgagaagttcaagtcgatatccggttctttatttcccttaaatccaaggaatgtctcaaacgggatgtcgaaaccgtcttttgtaagcttttctccacacaccggacagatccggtctggcatatcccatccgcagcctccggcaaactttctgacttcttctgactcaaagtcgctgtagtgacattttttacaataataatgaggacttaacgggttaacctctgtaatcccagccatggtcgccacgaaggaagatcctacggaaccacgggatcctaccagatatccgtcctccaccgacttccataccagtttctgtgcaataatgtacataacggcaaatccatttgatatgatagaattcaattctcgttccagacgctcggtaacaatctccggcaaatcttccccgtacattgaatgcgccttgttataacagatgtcacgcagcatcttatccgaatccgggatgaccggcggacacttgtccggacgcaccggtgtgatcttctccaccattccggcgatcttcaccgggttctcaatgacaatctctcttgcctttgcagatcccaggtattcgaattcctccagcatctcatcagtcgttctaagatacagtggcggctgactgtccgcatcaccgaatcccttccctgccataatgatccttctgtatacctcatcctccggattcatgaaatgtacatcacatgttccgacaaccggcttattgaaccgttcgccaagtgccacgatcttccggttgatctcttttaagtcttcctcattctgtaccttcgtaatcttcgggctctcgatcatgaactggttattgccaagtggctggatctccagataatcatagaagtttacgatctttgcgattcgttcttccgacttttcattcagaatcgcctgataaagttctcccgcctcacaggcacttcccaccagaagtccttctctgtatttcgacagttcgctctttggaattcttggtcttcttgcatagtatttcagatgggacattgagatcagggtatacagattcacacgtcccacttcattcagtgccagaatgatcacatggtatgacggaagtttccggacagcatcagcattgttctctccaaactggtttagcttcgccagatcataaatgcctctgtcctttaacatttccacaaattttacaaatatctccgcagttgccccggcgtcatcgaccgcccggtggtggttctccagtgaaatatggagtgcatttgccaccacattcagcttatactttgacaacgtcggcagaaggatacgcgccatcgacaccgtatccaccgatgtgaaatccggctggatatcctgatatctgcagttttgttcaataaaacttacatcaaaagaggcattgtgtgcgaccagtgccgcatctcctatgaactccagaaattgtggaagaaccgtctcaatatccggcgcccccataaccatctggtcggtaatgctggtaagctgtgtgatctggaacgggatcggtactttcggattgacaaatgtactgaatttgtctgtgatcacaccatgttctacctttaccgcaccgatctcgatgatcctatccttgattggactgaatccggttgtctccagatcgaaaactacatacatgtcatccagcgactgccctttttcatttaccgctacatcagtcagatcatctaccagatatccttccacaccatagataactttgaacggatcgtccttatccagtgactcaatataatgatttgcatccgtgaatgcctgaactacaccatgatccgtgaccgccatcgccggatgtccccagtcatgcgcctgctttagaagcgttgtgacgtctgttaccgcatccatatcgctcatcttggtatggcagtgaagttccactcgtttctctggtgcagtatccactcttgactctgtaaaatcactgatcttcttgattccgactaccgactggatattcagttccgaatcaaaacggtctaccgttgttactccttttaacttcaaaaatgcacctgtcttaatatctcccaaaatatccgcaagctgatcgttccgcacaaacattttcaccataatagaatccgtaaaatctgtaactgcaaacataatgatcgtcttctcattacggatctctctggtctccatactgatgacttttccacggattgtgatctcacccatctcgcctaacacattctgcagttcgatcgtctcatcgtcaaagtctcgtccgtaaatcaggttcggatcatccgtagccttacgtacaaacgaatagttgccttttccaaatgatttggaactcttagcgctgattttattactgttttctccaccggaagtgctttttgacgcacttttttcctcttttttctcttctttctgttcctgtgctttctttgccttgacagcctcagactgttcacgaattgcctctacttcctgttctaatttggcttcgttatatttcaacttactgtcttttgccttttcatacagaacccgtatctccaccggccgttgaaaacgctctgcaaatacacccgtcagatactccgacagggagtccttttttccttgtgcaacaatcgtatccgtcagcgtcagacagagaatattaccattttcaaattcataactggcgttctggagcatgttccgctctacaacgctcttctgatccagttccatcagaaaactgtcgtagtattcattcatcagattctccggtgtatactgttccgataggtcatactgctcccgcactgtcacctggatatggcttctggcaaataactgctgcttcagcatacgctccacttcatatatatcctttttctggatcagatgtctgctgtaaatgctgacacggataaagtctctcgtagaatttgtggaaactttcgtcacctctacgccctgaaacatcatctgaatatcatcttttacttttaatgtcggaaatacctcaaaaaacggcttactcattccaatgtaacaactcctgtctcaatgtctccaataattcgtcttcttttaccttcttcacgacctcacctttcttgatcagaagaccttctccgattccgccggcaattccgatatctgcttcctttgcttctcccggtccgttgactacgcagcccataacggccaccttgatatccagcggaatatcggccaccatttcttcgactttatttgcaagtccgatcagatcgatcttggttcttccgcaggttgggcaggataccacttcgatcccgcctttccgaagccccagcgtctttaagatcagttttgcggatttgatctcttctaccggatctccggtcagcgatacacggatcgtatcaccgatcccctgacttaagatcaaccccagtccgatggaagatttgatattacctgccagcagggttcctgattctgtaatgccgacatgtaacggatacgggcataccggtgccaggagctcatgcgctttcacgcacatcataacgtccgatgacttgatactgactaccagattgttatatcccatctcttctatcatatgtactttgtccagtgcactttctaccagaccttctgccgtaacaccatggtatttttctaccagatgcttctccagtgaaccactgttcactccgacacggatcggaatattatattcttttgctttttctaccactgcacggactcttttttcatccccgatattcccaggattgatacggatcttatctgccccgttctcaattgcagcaattgcaagacgataatcaaagtgaatatctgccaccagcggaatatgtatctgttctttgatcttgcggatactctctgctgcctccatcgttggaaccgccacccggataatatcgcatcccgctttttcaagctttaagatctgcgccacacaggcttccacgtcttccgttttcgtgttcgtcatagactgaatcgcaatccgctccccgccgccgatacacacattaccgatctgtacttttttcgttttatttctgtagtcttccatccttttccctccgtttttatgttatataaacttctttttttctttcttcttcgtatccgcatttatccctatagcaacaaatgcccctctataccatacatatagaggggctgtcatttttaattcttattgaacatcatctgttctccatattcacgctctgtcaatgtcagcgttccgtcatcaatactatattcaaatgtcgttcctatggattgtactgcattttttaaagtctctgttgtatactgtccatccgacttttctgcaattttctgaatctgtgcatcgtcctgctgtatagaaatcgtcttggattctttgttcatcgtatatgtcatcggaacttctgtatcttttccttctcccgatgccggaatagttaccgtcatctgaccatcacgactgatcttcagattcatattaccgtcctcatccgtccagaaaccttctaacggattccccgtaaacatcttcatcagaagaaatattgctacgattataatcaggacagatgtaacagacgtaacgactgtccatatcttacttctttttgcctcatcattgttttctatcatctatccgtttcccttctttttattgtgtcttttattattcccgctattatagattatatgtgcttttttcttctgtgtcaacgacaggtcttttgtttcttcttccctttactcgtcaatctccacaagcagataaaatcccctgtccgtctgttcaatcttcttgatctttccttttcttgctctgatccgctgtctggtacggtagattcctgacatagcgatggatggttcgaccagatatgtatattggccggtaacggcacttcgttcactgatctctacttcctgtccttctgtcaccagaccttctctttccattttaaaacgttccacacgcatttttactgtctccttttctttttatccacacaataccgcaaaaagcaaaaatcgtcagctttcctttgaaaaactgacgatttttgccggacagttcttattcctttacaaagcggtgataaatataatcatttgcttctttttcctgactgtcatccagtggagtaagaatcacttctccgccatactttctttccagcgcttttctgatcagataatcactgacctgtggattcttcggaagcagcggaccatgcagataggttccgatcacattcttatacacaacaccttcataaccgcttttaccatcatttccggctccgtacagaacctttccgaacggtttatttccattcagataagttcttccgccatggttttcaaatcctactaccggcatgtctacaagttcactgtccagaacgatattatcgatcagacgtccttcttcctgctccgtatagatatccaccagattcaggccctcgatcattccggcatctgttttatagtacttcccaagaagctgatagccgccgcacactgcgatgaccacaccgccatcttctacataatctttgaattcactttggatctccagaagacttttacacacgattgcctgttccctgtcggaaccgcctcccagcaaaacgatatccagttttgaaaaatcgatctgatctccggtgttgaattctattgtctctgcttctattccccgccagatacagcgtttcatcaaacatgcaatattccctctgtctccgtacagatttaaaagatccggatacagatgaccgattgtaagtttcatatccttagtctccattatccttctccttccatctttttcaatacattccgggtactgaacagagctgtatagttcaccagtacatacaggttaccacatccattttctactctttcacggattgccttctccacatctgcttccagcatggacgtaatatctacgtatttcatacgtaatctcatatcctgacaacggataccgcttactgtaatggaattgatatttgctcccttgaatctgtcaaaatccacatcccagagccatgaaatatccgttccgtcctgtgcattgtcattgatcacaataattacatctttcatggattcatcctgcattaccgcagaaatattctgattaaatcccgccggattctttgcaagattcagcacgatctttgtgccctgtacatcaaattgttccatgcggccattctccggattaaattctgcaagcatgtcctggaaatgttccagtccaagtcctccggttcttcccgctgcatatgctgccagaatattatatacattgtagaagcctttataattggcttccagatgtctttcctcaactgtaaatgcaagatgatcactgaccgctacatccgatgcatcatatacaattgccggccgcttaaactcacagcccgtacatgcataatctccaagctggctgtagtgatagaaattatacttcaacggagccccgcattttttacagaaacgtccctctctgatctcatgcgaatctttatcattcactaccttttcgctgataccgtaagtcacatacggattaccgctttccattgcaaggtatgcggacaatgcatcatctccgttcacgatcaccttcatctttggtgcactctgcatcacttcttttaagatgttcattgtaatatcaatctcaccatagcggtcaagctgatcacggaacagatttgtcaacaccatgtaatccggcttaaaatgtggaaatacccttctggttgatgcctcatcaatctcaatacaggcataatctgcatccagattaccactgaaacctgcgcccaatacaaatgctgccacaactccattcaacatgttcgatccagtatgattacagattactttataaccttctttttcaattgcagcacaaagcatattgttggtcgtcgtctttccattggttccgcatacaataaaaatatcttttctaacctggcctgcaagatcgtgcaggatacttggatcaatctttaatgcaattttccccgcccaggtcacaccctggcggtgaaagatgtgtacacttgctttttcacttatctttgctgcccatacagccagcattctgcgtactcccataatttttttattccccgatcagttccttgatattttgcggttccggcatcgagcggattgcaccttttttcatcgtgatcagtgctgcacccgcatttgcatatgtcagaatctcttttaatttttcttcgtccagattatccagaccatacttcaacacaccattgatagagcatccacagaacgtgtcacctgctcctgttgtctcgattgctttcacggtaaatcccggctgttctacacgaagatttttataataagctctgcttccttcttttcccatagtcaggaagataagcggtatctgatatttctcctgaagatacttaattcctttatcataatcttcttctccggatacgaactgaatctcattatccgaaatcttcagtacatcacagttttcaaatccgtactccatctgctccttcgcctcatccaacgtcttccagagcggcggacgtaaattcggatcaaacgtgatcatacatccggcttcttttgcaacggagagtgccctctttgttgcagtttttaccggttcatctgtcatagaaagtgttccgaaatggaatacctttgactgacgaatcagatcataatctacttcctcttcctttaacatcatatctgctcccggtttgcggtaaaaagaaaattctctgtcaccatccgggaaagtatgtacaaaagcaagtgttgtgtggatatcctgatccattacaagtccctttgcttctattcctgtatttgtaatcgtatccttcaataatttaccgaactgatcatcacctacttttccgataaaggctgtttttcttcccagtttattcagcattgcaagtacattacatggtgctccacccggacatgcttcaaataactgatttccctgctcactttccccgtttaccgcaaaatcgatcaacagctctccgagtgctgtcacgtcatacttcttttccatatacactactccttatcttaatctttatattattatttattttaccatataatttatcattttaaaacctgtccgtattgaaagtgcattatcactaattttcgcataagtctttgttatttttttgtcatttttgcctatttacgaatttggtaatgattgataaaataataacaaataatacaacaacctgacgtattattttatattgtgaaacaatgatttcgcaaatgttcgtgtttggatggtactcccctcccacgaaccctctcttgatagcgttttgtaagaaagtcacataaaaagtttccgccaaaactttttatgtgactttcttcttttatcctaacaaatgtatgcctccgagaagtacatacgatataaaccacataatcaccgttgccatgcagatgccgatgacaacagccggaaatgctttcttaaacttcattcccaaaagcgctgcaatcagtgagcccgtccatgctccggttcccggaagcggaattcctacgaataataccagaccccagaattcatatttctcgatctgatctttcttactcatcgctttattctccagtttatctaccagcggtttgaatgtcttcgtccctttcatccatttaaacaccggtgtgatcagaagtaaaatgaaaggaaccggaattatatttccgataatacacaacggtatcgcagtagacactttcactccgaggattggtccggcaaccagaagtgctcctcgcagttccagaatcgggatcatagagatcagaaatacgatgacttctttactcacacttccgcttaacgcatcaataattccatgtattaatgtattggtcataagaaactcctcttatttattcatatattttttcaggaacgcaaacattgcttccatctcttctctggttcctacagtgatacgcatatactgttcgattctctcactgccccagaagcgcacatagatatcattctctttcagtgcttcaaataattcttttgcatcataatccggatgcatggtaaagataaagttcgatttggaatccaggcagtggaatccaagattctttaattcttcttttgcccattcacgtgtctcgataatcttattcacacacgcttcaaaatatgcctgatcctttaccgcttccacaccgcataccagtgatgtctggttcatagtataagagttgaaagaatattttgcatcattcaggtatttgatcagagtcggattactgattgcataaccgatacgcattcctgccattgatcttgcttttgaaaatgtctgtacaatgatcagattctcatatttgtcaatcagttccagcgcagaacgtccagcaaaatcaacatatgcctcatctacaattacgatcacatcctgattatgtgcgataatatcttctacgtcagccagatcttcataaagccctgtcggtgcattcggattcgggaagatcacaccaccattttccttgtagtaatcttcttttacgatcttgaagttctcatctaacttctggcattcatacggaatgcggtacagatccgcccataccttatagaaggaataggtgatatccgggaaaaagactggtttctccgagttaaaaaatgtcaggaaacacatggataatacatcatccgatccaactcctacaaatacctgatccggatttacatgataaaaatcagccagtgcattcacaagcggtgctgccgtcggatccggatacagacgcagacggtctgtatccatctcctccagcgcttttgtcacgcccggtgccggtgcgtatgggttctcattggtatttaacttgatcactttgcgctgcggctgttcgcccggcacataaggttctacttttcgaatgttcttttcaaatgctttcatgctgctctcctagaaatattctttcgccaattctttgaattttggaagtgaattgatgatcgtctcgtgagatacacagtatgcaagtcttacatatccaggacacgcaaaggaacttcccggtacgatcagaatattatatttcttggccgcttcgcagaattgcttttcatccgaaaccggtgatttcacaaacagatagaatgccccctgtggtttaatacaatcaaatccacattctttcagaccattataaagatcttctctgttacggtcatagaaagaaaggtctgtcttttcattcaggcatttttccactactttctgctgcagtgtcggagcattcacaaatccaaggatacgtgttgccacatttgctgccgcaagcacttcttcactgtctttcatctcatccggaatcaccaggtagccgatacgttctcccggaagagacagcgatttactgtaagaatatcctacaactgtattatcataatattttgtgagataaggaacttctactccgtcataagcaagttcacgatatggttcatctgagatcaggacaatatccgttccgaattctttctgttttgcctccatgatggcagcaagcttcttaatcgtctcttcggagtacaccacacctgtaggattattcggattgttaacaatgactgcttttgtcttagaggtgatcttctgctcgaattcatccagtttcggctgaaaatctacagtattcggtgagatttcgaccagcacaccatcgtaattatttgtataagaacgatattctccaaaatatggtgcaaatgcaattacttcatctcccggattgatgatcgctttcagaataacattcagacctcctgcggcaccgactgtcataacaatattctttccctcaaagtgcgtatcaaaacgttcattcagagattttgctactgctgctcttacttccgcatatccgcagttgctgttggtatatccgtgaagtgcaaccggatctgtgtcatttacaatctcgatgatcgcattctttacagcctccggtgccggcacattcggattaccaagactgaaatcaaacacattctcagctccataaatccctgccagacggttaccttcctcaaacattgcacggatagccgaactgttggccaccatatttttcatcttatccgctatcattttattgctcctttctcaccgcaagtcttttttgtccttcaaacatctttttctgtcacatcgcccttttccaccataaaggcaggacggtatgaaagttttgcttttctgagtccttccgctccggtatcatcttccctgttcacatatttgtagttcatacattcatgttctacaaactgctggttgatcattgtatatgcaccctgtacatctgcatatgccttttcaatatgcactacatacgtatcctcacagataggttctccgatcgtaaatgctacaacttctccgtcaatccgtaaaactcctccggtcagatgaagctcttcgaacaggcgaagggaattcaatgccacacacatctcaccccttttttcatcgtcgtcttcacattcattctctttccgccattttaatgccatctgaaagcagtcttccagattttctccggtcatgctttcatatgaccagcgtccatcgtacaaacttttgaacttgttaatatggttacgtttcccatggagttttttcccggaaagcgtcgctaacttttctgattcatatacataatctgcagagtctctgtcatactcaatctgaaatctttccggataccattcattcagctgttcgaaatattccggtgtcacattgtacatcaggaacggtctgcctttttctttagaatactccatcatctcttccagtgcattttttacatcttccggcgctcctgccggatacgcaaaagatacgtgattctcatcttcacttttgaataccagtgcattctgtacaattgcccacttcaccggatattgtctggaccagagatagacattggcaaatgttctctcacagcttctgctggtatgatgttcaaagtaatgcgcaataatctcctgatcttctaattctgcacgcttaaactgtattgcttccatcctttatatttaccttcttttagtttcagctattttctgattgtcatattccggattcttacatttcctcattcatatttgcaagctttgcagcctgatcggctgcgatgcaggcatcaatgatctcctggatgtctccattcatgatcttatccagtttgtataatgtaagtccgatacggtgatctgtcacacgtccctgtgggaagttataagtacgaatcttctcggatctgtctccggtaccgatctgactctttcttgcctctgcttcggcatcatgacgtttctggcattccagatcgtacagcttcgcacgcaagagagcaaatgctttgtccttgttctgcagctgtgatttctctgtctgactgtagatcacgattcctgtaggatagtgagtcagtcgtacagctgaatctgtcgtattgacacactgtcccccgttaccggatgcacgcattacgtcaatacggatatctttttcatcaatctggatatctacgtcttctgcctccggcataactgctacagtaatagtagaagtgtggatacgtccgccggattctgtctccggtacacgctgtacacgatgaactccggattcgtatttcatctttgaatacgcaccctttccatcgatcataaatgttacatttttcattccgccgataccaatctcttcacactctaccagttcgactttccatctctgactttctgcatagtgcatatacatacggtagatttcagctgcaaaaagtgccgcctcgtctccgcccgcaccggcacggatctcgacgataacattcttttcatcgttcggatctttcggaagaagaaggattttcaattcctgttccagttcctctacacgctttttgttatcattcaattcttcttttgcaagttcacgcatctcttcatcagactcttcctctaacatctcgaggctgtcctcgattgcctgtttgcattctttgtattcattatacgcctctacaatcggagtcaggtcgttctgctctttcataagtttgcggaagcggttctggtcatttgccacatccggttcctgaagttcatttaatatctcatccagacggatgcgcagatcttctaatttatcaaacatggtatttcctccttaacattactctttattgtaccttcccataacaacgcggtcaagtcccgccaaatccttttttacctggatttcttcatatccctgttcttccaggagagccgatacatcctttccctgatcaaaaccggtctcaaacagaagatatccacctttttttatatgttttacactttctttcacaatcagacggtaaaagtataatccgtccgttttcccatccagtgcaatccatggatcatgaagctttacttcatcttccagactgctgatttcctccgttctgatatacggtggatttgatacgatcatgtcatatgtttctgcgatgttctcgaacagatctccctgtataaaaaccgctccggtctgaagtctgctgtcattttccttcgcaactttcaatgcttcctctgatatatcacatccggttccggacacgcagatttctttcctttccgcaaatttcagaatgctctccagaatacagcctgatcctgtacacatatccaggatctgcatccccggccggatcttcttcagtgcctcttctaccagtgtctctgtatcttgtctcggaatcagcacatgctcattcaccttaaaatccagccccatgaattcctgttcaccggtaatatgctgaagcgggattctctgtgctcttgtctcaatatctttccaatagtgctctgctttatccttctctacctctttatccggatcagtaagaaacatggctctgctgatctttgtctcgtattccaacaggtaccatgcatctaactttgcatccgctatcccggctttttccagacagatggttccgtccctgtatagattacgaagtgtgaaaattgtcccgttcataagccctccagtcaaatactgcttctactgcctgtatcgcaacttctatcatcccgtcatccggttcactggtcgtcatcttctggattgccattccaggtttactcagcagattaacaactggattgtcactgtttcccgcaagcttcaacacctcataggaaacacctgcaatcaccggaagcagcacaatacgcacaaccactctcataagcggtgactctacccggatcaggagcagcagaataatactgatcgcaagcacgaaaaacaggaagcttgtaccacagcgtttgtgctgccgggaactgttccttacgttttccaccgtgagcggaagtccgtgttcaatgcaattgatacacttgtgctccgcaccgtgatacataaatgttctctggatatcttccatcctcgagatcagtaaaatataaataataaagattccgattcttacaaagccttcgatcactgtccgcaaatgataagacggaacaaccggtttcatcaatgatgacaggaaatatggcaggaccataaagatcgccactgcagccacaatagaaaatgcaaccgtccctgccatcaaaagactttcctgtttttcttttttcttttgttcagcttcggaaaaatttttttcttcctcttcttcatagaatgatgctgaaaatgtcagtgtcttaattcccagtaccatagaatcaataaaattgaacactcctctgacaaacggaattgtcgtcagtttcttatatctgccggtaacactgtgaaattcctctgtctggacaaagatctccccgtccggcttcctgacagctacggcataatggtcccgattcttcatcatgataccttccagcaccgcctgcccgccaatattcgatgatttcatatactctccttcatatattctgtatcattacaagttctatataattaattataagaaaaaagggctgagattcaaaaacctcaacccaatacctgtaatcttatttgtccattccgtatttcttattgaacttatcaacacggccacgagcctgagttgctttctgctgtcctgtgtagaatggatgacatttagaacagatttctacatggatttcttcgcttgtagatcctgtcacgaatgtattaccacagttacaagttacagttgcctgataataatttggatgtattccttctttcatgattttcacctcttctttattttcttgacacgcacataaatgtgccgtaaatttcttttcatttacacagcttgttcattgtagcacaagaatcaatatttgtctagataaattttgtcttttttaccatttgtattaattcttcgttattctttgttcttgagaacatattcagaatattatctaccgcctcttcctgacgcagcccattcagaccttttctcatactttctaccgcttcctgttcttcttttgaaagcagcaggtcttctcttcttgttcctgatttcagaatgtcgattgccgggaacattcttttttccgaaagcttgcggtccagtaccagttccatattaccagtacccttgaactcttcgtataccacatcgtccatcttacttccggtatctaccagtgctgttgcaagaattgtaaggcttccgccttctctcatatttcttgccgcaccaaagaatcgcttcggcatatgaagtgcagccggatcgagaccaccggacaaggttcttcctgatggtggaacagtcagattgtatgctcttgcaagtcttgtaatactgtcgatcaggatcatcacgtctttcttgtgttctaccagacgttttgcacgctcgatcaccatctcagatacacgcttgtgatgttccggaagttcgtcaaatgttgaataaataacttctacattttccccttcaatagactcgcggatatctgttacttcttccggacgttcatcgatcagcagaatcaggagatgtacttccggattattcttctgcacggataaagccacctgctttaacaaagttgtcttaccggccttcggaggcgatacgatcatacctctttgtccttttccgattggagacatcagatccataatacgcatggccgtacttgtcttcccgcactccaggctcagtctttcattcggaaagaccggcgtcatatcttcaaaattctttctgtgcatgatcttcatcggatcaatgttatttacctttgacagatataaaagtgcactgaacttttcctgctgcgtcttgattctggtatttccttccagaatatctcctgttttaagattaaatctacggatctgcgatggggatacatagacatcattatctcccggcagatagttcgcactacggataaatccatatccatcctgcataacttcaagaatcccccgcactgtaataccactgtccagcttgtctatgtcatgaacttctttatctccggtattggcagataattcttttactgtttcttttgcgttattctttactttctcgtcttcctccagcatgcgctcgatcagttcagcttttttcatggtggaaattccttttaatcctcttgcctttgccaggtcttttaatgtcgccaacggaagagattcatacttttctttcatcatatagccctttcacctcaaaatatatcttcattctctatctggtttcccgttcataacttcatcattcattgattcagcatttcttaatttgcaggttatctggaaaattacgtcagaaatgacgatattagttgaaacatgacattattatactatatatctctacatttttaaaggacttttttgtaatccactgcacagtaatccactgcacatcccggcacatcttttcacaaacagcaccctctcacaataaattgtttcacttttcatgctttctgcgtatattgacttgctcttctatgaatgatatgattaaaaaaactcataaaaaggtggtatccataaaatgacaaatagcgaaaaagctttaaaaatgcacgaagaatggcacggaaagattgaaacctgtgcaaaatcccacgtaaactcaagagaagatctggcaattgcttacactcctggtgttgcggaaccttgtaaggtgatcgccagggatccggaggctgcctatacttatacaatgaaatccaacactgtagctgttgtttccgacggaagtgccgtactcggacttggtaacatcggtgctcttgctgcaatgccggttatggaaggaaaagcagtacttttcaaagaattcggcggtgtcaacgctgtaccgatctgtcttgatacacaagatacggaagaaatcatcaaatctgttgtaaatatcgctcctgctttcggtggtattaatctggaagacatcagtgcacccagatgttttgaaattgaagaacgcttgaaagaactccttgacattccggtatttcatgatgaccagcacggaacagctatcgttgtccttgcaggtatcatcaatgccatgaaagtaactggaaaagacaaagaatctgccaaagttgttgtaaacggtgccggttctgccggagttgctatcacaaagcttcttctcacctatggtttcaaagacgtgacaatgtgtgacatcagcggaatcctcggaaaaggatctcaaaacctcaactggatgcagcaaaagatggtcgaagtaaccaatctggagcagaaaacaggtacccttgccgatgctttaaaaggtgctgacatctttgtcggtgtatctgctccgaatattgtcacccaggacatggttgcttctatgaacaaagatgccatcctctttgctatggcaaaccctgtaccggaaatcatgccggatattgccaaagcagccggagcaaaggttgtgggaaccggacgttccgatttcccgaaccaggtaaataacgtagttgctttccctggaatcttcaaaggtgctttggaaggacgtgcaactgcaatcacggaagaaatgaaacttgccactgcaaaggctatcgcaggtctggttccggatgaagaattaaatgaaaataatattcttccggaagcttttgatccacgtgttgccgacgttgtaagtcgtgctgtaaaggaactgatctgatatgactgtacgctggggagaaaaaagatattattctctcgattattatctgaaaactacttatggtgaaaagctctataagatttctctcgatggcggtatgacctgtccaaaccgggatggaacacttggaacccgcggctgcattttctgcagtcgcggaggttccggtgattttgccgaaagccataccctgtctgtcacagagcagattgaatccggtaaaaaacaatctgcgaaaaaatataccggatcatcctacatcgcttatttccaggcatacaccaatacttatgcttctcttgcatatctggaaaagttatatatggaagccatcctgcatcctgatatccggattctgtccatcgcaaccagaccggattgcctgagcacagaaatcttagatcttctggaacgtctgaatcagatcaaacctgtgtgggtcgagctgggacttcagactattcacgaaagaactgctcgttatatccgaagaggctatgatcttccggtattcgagaccgctgtatctgaacttcgcagacggggaatagatgtcatcgtccacacgatcctctgccttcccggcgagacaaagcctgacatgcttcagaccatacagtatctgaacagacaggatatccagggaatcaagctgcagcttttgcacatattaaaagacaccgatctggcagaaatctatgcgtccgatccatttccggttccagatccgcaggaatattacgaacttctcggagcatgcatcagccacctcaaacctgatattgttatccacaggctgaccggagacggaccaaaggagcttctgaccgctcctttatggacctgtaataaaagacaggtactgaatcagttacagtcgtactttaaaacacatgacatctggcagggaaaggagtattaaccatggccaaatcatttacgctatataaattaatcattttgtatatgttgaatcaagttgattttcctctcaccaattcccagatatctgaattcattctggataaaggatatacaacctacttcaaattacagcaggccttatccgaacttctggaatcgggatttatccgagaagagtctacacatcaccgtacattttaccatcttacggaggatggtgctgagacaatccactatttcaccaacgatatctcacctgcgatccagcatgatattgatgaatttttaaaagaaaaacattatgaattaaaaaacgaaatgtctgtgaaagcagattattttgaaaattccaacatggaatattcggtgcgctgtcaggtcattgaacagggacttcccctcatcgaccttaccgtaacagccccgacagaatccgaagctgcaaccattgcaaacaactggcagaaacgtaaccaggagatttatgcgtcggtgatggcgaagctcttataaatattattgggatttaatttattaactggggaagcggcctctcagtccttgaaggaaacaatagataaggcttc

SEQ ID NO: 2876 - DNA, 5967 bp, Unknown
  gut microbiota DNA sequence
aaccgttacgcaattaccattcgtaaggcatttgatacccacggaataaaaagtaggaagccgttccagtgaatgtgaagaaggtgttggaaatagttaagcgtcaaaattatgcgttgggttttcgaaatttgcctgtttgagccgaatggcgagttgcaaatttcggaagcccgtttttagcataattttgacgctttagtatttcccaccgacggaacctgaacaggaacggcttcctactttttatgcaggtccgggtaatcatgccttcctgaattaaatcccaattaaatttaaaataggaactcactcatgacataattactcacatctatccctttttccgtaaggcgaatgttgtctcccgtatcttccagcaactgtttctgatacatatggatcaatacttttccatatacattttcaacacttctgccaaatgtccggcggaagtctgctttggatattccttttatccgtctaagtcccaggaacatatattcttccatctggttttgcggagtaagaacttcaatttcaccaccttctacgaagcgctggttgttgatcagggacgctgctccggttccgatccccagatattccgtacggttccagtagccgagattatgccggcattcgtatccttcttttgcataatttgatatctcatatctgtgatacccataattctgcaggatatttttagtaaactgatacatcagtctttctgtatcttcatccggaagttcccttcttcttctggcctccgcacgttcgccttccccgtatttttcataaaatggtgttccctcttcgataatcagactgtatgccgagatatgttccggcgcaagttctgcaactcttttgatcgtatcttcccatcctcccagtgtctgaaacgggattccggacatcaagtccacattgatattccgaaatcctgcttctcttgccagggaatatgtatccaggaaatcctgatatgtatgaatccttccaagcatcttcaattcctgatcatccgttgactgtaacccaatactcagacgattgattccgatattatgataagccatcaattttaacttgtctaccgttcccggattcacttctactgtgatctccgcatccgagtcaaccgggaacgtggaacggatcgcatcgaagatactcctcatctgctgtgcctcaaggatggacggcgtacctcctccgataaatatactgctcacatggtacagtcctccaagatcataatacgaacgtatcttctgacacaatcccatgacatactcctgtctcgcctcaggtgttgccggcgcagacagaaagtcacagtatctgcatttttttacacaaaatggtatgtggatatataattctaatggtctcattatttatcgtccagcttcaacacactcataaatgctttctgagggatctctacgctgcccacctgccgcatacgttttttcccttctttctgtttttccagaagctttctcttacggctgatatctcctccgtaacattttgcaagcacgtctttgcgcatcgcgcggaccgtctcacgtgcaatgatcttgctgccgattgccgcctggatcggaatttcaaacaactgtctcggaatctcttcttttagcttctcgcacatttttcttccgcgttcataagccgtatctgcatgaatgataaatgacagtgcatcgacttcttccttgttgatcagtatatccagttttaccagttcagacttcacatatcccgccatctcatagtcaaacgacgcataacctctggatcttgatttcaacgcatcaaagaaatcatagataatctcattaagcggaagctgataatgcaatactgcacgagtctcctcgatgtattccatcccctcatacacaccacgacgttcctgacacagatccatgatcgcaccaataaactctgatgtcaccatgatctctgccttgaccatcggttcttccatatattcaatctcagaaggatccggaagattcgatgggttcgtaagctctattacatctccatttgtcttgtgtactttgtagataacccccggggcagtcgttaccagatccagattatactctctttccaaacgttcctgaatgatttccaaatgcagaagtccaaggaatccacaacggaatccaaatcccagcgcaattgacgtctcaggttcaaactgaagtgacgcatcatttaactgcaatttctccaatgcatccctcagatccgggtattttgccccgtctgccggatataatccacaatataccatcggattgacttttttataacccggaagtggttctgcacatggtcttcctgcatcggtcaccgtatcacccacacgggtatctttgacattcttaaggctggccgtgatatatccaaccattccggcactcagttcctcacacggaataaactgtccggctccaaaataaccgacttctacaacttctgccttcgctcctgttgccatcataaggatcggtgttccctttttcacggttccctctttgattctgcaaaatacaataactcctttatacgcatcatacagggaatcaaagatcaaagcctgaagcggtgcttttggatctcctgtcggtgcaggcactttcgccactatctcttccagcacctgatctacattcagtccggtctttgctgaaatctgaggtgcatcctctgcttcaattccgatcacatcctcaatctcttcgatcacacgctgcggatctgcacttggaaggtctatcttattcagtaccggaaccacatccaggtcatgatccagtgcaagatatacattggcaagcgtctgtgcttccactccctgcgcagcatctaccaccagaattgccccgtcacacgctgccagacttctggatacttcataattaaagtcgacatgtcccggtgtatcaatcaggttgaaaatatattcttccccatcttttgctttgtataccgttctgactgtctgggctttaatcgtaattccacgttctctttccagttccatattgtccaacacctgcgactgcatctcacggctggtgagaagaccggtcatctcaatgatacggtccgccagcgtcgatttaccatggtcgatgtgtgctataatacaaaaatttcgaattttactctgatctattcctgacactaatatcttctccttattacacgtttatcttatcaattctatcatgcagcactgtattttacaatgaaaagttccacgctcatcacatcatttaagcggccggtcttgaccagttcttccgtatctactgcatcttccaaaatacttctcagttctttcttttcgaatgtccggcattgctgcatatattttcctgcaacaaacggatgcagtccgactgtctttgcaatcgcagccttgtcatagcgctttcctgccagatctttgacttccagaagtaatttaaactgccttgtcaacaaatataatatgcgcattggcggctcctttaatgccagcagatcataataataatccagtgctttcttctgattccgtaccgccactgcttctaccatctcaaagattttatttgtaatctgtgtcgtacagattgcttcgatatcccggacttcaatctcttcctttcccatacagtaacagaacagcttttccagttctttttccagattttccatatctgtccctgtggtagacaacagatacctggccgtctgttctttgatcttatatccttctttttttacattccctgcaacccagtataaaagtgtcttctcatcctgacgtgccatctctaccacgcgtcctttactcttgacagccttatacatctttccacgcttgtctgcttcattttccacaaataaaaaacaggcggtatccggcattgttttgatataatctgcaagctccggtgacgcatttttgaagaatccggaattttcgattacgatcagacgtctgtcggcaaaaaacggcattgtttctgcaagatcgataagttctcccggattgattccttttccttcataatatgcataattcaccgtatccccgtccggaaatattgctttcgtgatccggtctctgtattgctttttcaggtaagcctcttctccgtacaggagatataccggcttaaaatttcctgtttttatgtcttcatttaaagttttcatcggttctctcccatcttctttcacctcttaaaagtatactgaattccgactttaagttcaactgtttccaccgtgaatccacatagtttttttcctgaccgtcacggcaaccgctccgttatcctgtgtagaatatatctttgcacccgatttttcaagtcttttcagcgtcagatcatgcggatgtccgtaacggttctttctccctgctgatatccatgcatactgcggataaactgtctgaaggaatgtctccgttgtagaattcttcgaaccatgatgcgctgtctttagtatttcccatgtaatcttcttttcttcctgtatcacatccaggacctccgtcagcctctcttccccttctttttctacatctccggtaaacaacatatcaaattcaccgtattccagatgcaggatcatggaggattcgtttccagtcgtcacattatgactcttatcatccgtattccctcccggacccagacaagtaaacttcatttcaccttctttcagttccgttccgtattccatttccttcacatctgttccatacatttttgccattgttataattttaagaatcctttcatcccagtactgttttcccggcactacaagattccggatgcgcactcccacatcctgacgcatcagaagttcttctattccattcatatgatccagatctccatgagacagaaagacataatcaagttgtgcaatgccccgggattttagaaatggttctattcggtattttccaatctctttcacatcactgctgccaccatcgatcagataattctgatgctttggtccctgcacacagatacagtctccctgcccgatatccagcattgtcacctccattcctcttcttagcagcggtcctgatatcagtatcagccatgcagtaatataaagtgccagactagccatgtacttttttctgatttttaccggctgtctgtccatatatttccatatcagaatgattcctgacaacataagataatagactatgcaccgccatttttccggtcttcctgctatccatcttgccacaggaaatttcaggagcaacacacaacatccgtcatagagttttaatatccggctgcacaccatcaatatccatgttccatatgttccccctgccatccgcacaagtgagccggccatcccgcaggataatattaccggcatcaacggtatcaccagaagattcagcatcacactatataacggcacttcgaaaaagaaatacagaatcaccggccacaacacacaattcatggcaattcccggccccaatatacgtaccagtaccggctgctgtgattcttccttcaccaatggtatcactgtgcagatcgcaagtaatgcaccaaatgaaagcaaaaaaccgccatcataaagatacagcggattacttccgactgcgattactgctgctacagaaagtgccgtcggcatatcgtattttctccctgtaacatccgcaccgacccgaaacaggaacattacccatgcccttagtaccgagactgtcatcccgatcattgaaacatacagaaataacagcattcctcctgccagtcctcctgctttgtacgaacctgtcaaccgccggaataaacggtaggcacccagtccggcaaacgacagatgcaatcctgatatagccattatatgtaccccactctcaggaatgccagaaaatca

SEQ ID NO: 2877 - DNA, 41310 bp, Unknown
  gut microbiota DNA sequence
gaatgtttcaattccctccggtttatagtccggtgcttcaaattgtaaaaacacttctaatgctaaagcaagggcttccattacttcattgctatgtatttttcgtatttcatacatatctccacctcaaattctaatttgtttatttctcttattctagcatattccccaatctttaacattatttttttaaaaaatttgagggcatattgcaaaatgcaatacaccctcaacactcacagcgttccctttctatttttaaacaacaagtaaattcctcgttaagaggttgggtaaatttctttacccaataccctacccaatctgtacccaaaatagcacgatattttgtgagattttacagtagttcataacacttgtcaaaataggcagaaaccgcttaaatacgctatttaatttgctttttaccagtcttgcgattgataaattagtttcccatctgtgctgcaacttcagctgcgaagtcttcattcttcttctcaagaccttctcctgtctcaaaacgaacaaacttcttaactgtcatgttagctccgttctctttagctaccttctctacgtatttagctactgtaaggtcgctgtcctgaacgtatacctgatctaacaggcagatttctttcatctctttgttgagacgtccgataatcatcttttcgataatattatccggtttgtttggattctcctgtttagcctgagcaagaagaatctctttttcatgctctaagaaagaagcatctacttcatcacgtgaagtatattttggagacatagctgcaacctgcatagctacgttcttcaggcatgatctgatctcatcgttaacaacatctgtctcagcttctacaagaacaccgatacgtccgccgccgtggatataagatactacacaaccatcagtaacaactttctcaaatcttctgatgctgagtttttctccgattacagagattttctcatttaatgcatcctgtactgtcttagaagcgtcttcattccaagcttcagccatgaatccatccatatcagcagaatcagaagcgattgcctgattaacaactgctttaacgaatccctggaattcagcattcttagcaacgaagtctgtctctgagttaacttctacgatagctgctgtcttgtcatccttaacatcagccataacaataccttctgctgcgatacgtccggcttttttaacagccttagcttctccgttctttcttaagaactcgatagctgcatccatatcaccatttgtctcattaagagctttcttgcagtccatcattcctgcaccggtcatttctcttaattcttttaccatcttagctgtaactgccatgattttatcctccaattatgttttttaagaatcttattcttctactgcttcttcagcttcttcaacatactcttcttcgcctgcaacaccctggttagcttctactacagcatcagccatcttagaaacgatcagttttacagcacgaatagcatcgtcatttccaggaattacataatcaagttcctctggatcacagttagtatcagcgataccgataagtggaattccaagagtgtgtgcttcctgaacacagattctttccttcttaggatctacgataaaaatagcatctggaagtgtcttcatgtctttgattccgccaaggttcttctcaagtttatcccattctttctttaactggataacttctttcttaggcagtacatcaaatgttccgtcttctgacattctttcgatatctttcagacgagcgattctgctcttgattgtcttgaagtttgtaagcattcctccaagccatctttcatttacatagtacattccgcaacgttcagcttctactttgatagcatcctgagcctgcttcttagtacctacaaaaaggattgttccaccttctgcagcgatatcagctactgcctggtaagcttcatctactttacctacagatttctgaaggtcaatgatatagataccatttctctctgtgtagatataaggagccatcttagggttccatcttcttgtctgatgtccaaaatgaacacctgcttctaaaagttgcttcattgaaataacgctcatgtttctttcctccattggttttttacttccgcatatgttgttatacgtccccgaaaccgtcctgttatcaggctttggcaccatcgggacaagcctatgcgtgattttttgcgactttttaatattaccataaaggttgtctgtttgcaaggattttccttttattttctgcaatttttagtataaaaaaaaccgaagccagttccctgattccggttttttgtttacttttcattatctacgcacataaatcataccagactgtaccggtccgacttttacaacgtctcctgtgtgcggagcatgaatcatctgaccatttccgatataaataccacaatgtgttgctgttgttacaacatcaccaggctgcgggttacttactcttgtccatcccatgaacgtaagtgttgttccgagacggctatagcttcctgtcagacaatagcttacaaatccggaacagtcgaaactgtttggtccgcatgcaccccatacataaggttttccaagctggctgtacgctctgcttacgattgaacctccatttgcattcgttccactcgtcgtagtactactgcttgaattggacggtttcgtcgtcgcagatgcacttgaattgcttgacgaactactgcttgtagtattatttctgttgcttgttgtgttatttctgttgcttgttgtattgtttctattcgatgttgaagccgaattattattgcttgctgctgcctgctgtctttccgcttcttttgctgctttttccgctgcctcttttgccgctctttctgctgcttctctggctgctgcttctgctgctgcctgaatctccgaatccagattagcaacttctgctgatttagaggtaatcaggttattcaggttatcaccctgtttttcatattccacctgtttactttccagttctttctggtctttttcaagactgtctttcagatcggaaatctgctgttttgtctcaacatattcctgcaattgctttctgtcgtagctatgtacattctgaacatattctgctttactgagaagatctgtaaagtcttctgatgtaaccagcgtctcaaaagctgaatcattaccggcttcatacatatacttgatacgcttcttcattgctgcatactgttctttttccttttcctgcgcaacttccaaatcgccctgtgcttttgtaatgtcctcaccggtctggatcaattcactttccagtgtattgacttttcccattaatgttgtcagctgcgactgcaaggaacttacttcgctctgctttgcagctttttccttcttcaaatcatcgacagacggtgctgccagaacaggtgttacaatcattgaacttgtcaccactgctgtgatcaatctgattccgtgtttattcatactcactcttctttctttttgttttaattattgcttcccctcaggcgcaagattattctttcttccgcatctgattgctattatagctcaacacagagcaaattgcaacattttttaatacttttgtaacaattacaggccggaatatatgattccgacctgttctttcctattataattcagctttttattttatgcaaggaaatttttcgcccatccttttgctgtactttttcactactggacatacatattcgtatatcccatcaaactgatatctacagcttttgcagcctcgcgcccttcacggattgcccacacaaccagtgactgtcctctgtgcatatcgcctgctgtgaagacatttttaacgtttgtactatatgctccggctgcagtcttaacatttgtgcgttcatttacttctacaccaaatgctttggtcacataatcctgacttcccaggaatcctgctgcgatcaataccagatctacatccaccgtgtattcacttccggccacctctgccatcatcatacggcctgtcttttcatcttttttcggctctaatttcaccagaactgccttgcagactttaccatttttgtcttttttgaattctttgacggttgtctggtatacacgtgggtcatgtccaaatacggcagcggcttcctgctgaccgtaatctgtcttgcagactctcggccactccggccaaggattcatctctgtacgttcatccggagctttcggcatcatctcaagctgcagtacactcttggcaccatgtctcatcgatgttcccacacagtcatttcctgtatctcctccaccaatgaccataacattttttccttttgcggaaatgtatgtgccttccttcagactcaggtcataggttccatctgcattctgttttgcatttttccagagtgcttttgttgttgattttaagaaatctactgcgaaatagatgccttcggcttctcttcctggtactttaatatctcttggatttgatgcaccgcagcaaagtactatacggtcaaattcttttaataatgtagctgctttcttatcttttccgatattacatcctgtcacaaactgaaccccttcttcttccatgattgcaatcttgcgatcaatgaactgcttttccagtttcatattcgggataccatatcggaggagtccaccgattttatcttctctttcaaagacagtcacactgtgtcctcttctgttcagcatatcagcagttgcaagtcccgacggaccggaacctacaactgcaaccttcttaccggttcttacctttaccggttttgctgctgcataaccttttttgtatgcattttcaataatgctatattcattcgccttacttgaaactgcatctccgttcagtccgcatgtacatgcagcctcacagagtgccggacatacccttgatgtaaattccggaaagttgttcgtctttttcagtctgtaatatgcttcttcccagttttcctgaaagatcaggtcattccattccggtaccaggttgtgaagagggcatccgcttgccattcccatcagcatctgaccggactggcagaacggcacgccacatgccatacatctggctccctgcagctcctgttcttcttttgacagaggtgtatgaaactctttaaaatgcttaattcgctcttttggatcttcagccatcttatcctgcctgtcataatccataaatcctgttgcttttcccactgttcttaccccctatcttccttctttgatcgcataaaatgcttctgtctttgcctgttcactgctcataccctgttcttccatctgaaggatggttgtcagcatacgttcataatcaatcggaataatcttcttgaatttcggaagatattcagtgaagttatccagaatcttcttaccaagttccgaattggtattggcaacatgttcttcgatcatgctctttaattctccgacatcgatcttggttgtcacatgttcaatatgaaccatctctttattgactcttgtataaagatcattttccatatccagtacataagcaactccaccgctcataccggctgcgaagttcttacctgttccgccaaggactgctacgcgtccgcctgtcatatattcacatccgtgatctcctacaccttctacaactgctgtcgcaccggaattacgtactgcaaaacgttctcccgccacgccattgatgaatactttaccgctggttgccccgtaaagtgccacgttaccgatgataatgttttcttccgctttatagcgtattccttttggtggatatactacaagttttccgccggaaagtccctttccgaaatagtcattactgtcaccggtcagttccagtgtcagtcctttcggaataaatgcgccgaaggactgtccgccggcacccttacaatgtaccacatagctgtcttcgtccaaaccttccggatatcttctcgtaatctccgaaccaaagattgtaccaaatgtacggttcgtatttgtcacatctatttcaatgcttctcttctgtttcttctctaccgccgggagcaattctctgaccagaactttttcatccagagttttctccaattcaaagtcgaagactttcttcggattgaatgtcatcggtgtctttgtgccttcatatggattatcgagaatctgttccagattcagtgtggctgcacgttctgaagttgctacttcctttacttttagaagatctgttcttccaaccagttcatccagtgtacggacaccgaatcttgccatatattctcgcagttcttctgcaataaaacgcataaagttcacgacatattccggttttccgcggaaacgttttctcagttccggattctgcgttgccacaccgaccggacaggtatccagattacatacacgcatcatcacacatcccatcgttaccagcggtgcagttgcaaatccgaattcctctgctccaaggatcgctgcgattgccacgtcacgaccactcatcagcttaccgtctgtctcgatacggactctttctcttaagccattctgaatcagtgtctgatgcgtctctgcaagtcccagttcccatggaagtcctgcattatggatggaacttcttggtgctgccccggttcctccgtcatatccggaaatcaatatcaggcctgctcccgctttggctacaccggctgcaactgtaccgacaccggcttctgataccagttttactgtaattctcgcatctttgttcgcatttttacaatcgtaaatgagttgcgcaagatcctcgatcgaatagatatcatgatgcggcggtggtgagatcaggctgaccccaggtgtagagtgacgtgtctttgcaatccacggatatacttttccgcccggcagatgtccgccttctcccggttttgccccctgcgccatcttgatctgtatttcctgtgcacttaccaggtatctggatgtaacaccaaatcgtccggaagctacctgtttgatcgcagagcatctgttcgtatccagacgttcaatctcctctccaccttcaccactgttggatttaccatgcaactggttcatcgcaattgccagtgtctcatgcgcttctttcgagatagaaccataagacattgctcctgtcttgaatcgttttacaatctcgtcgacgctttctacttcttcgattggaatgcctttctttggatagttgaattctaactgtccacgcaggttgatgtgttctccttccgcattgaccagctctgtatactgtttgaacataccatagtcaccgcgtctggtagattcctgcagcatatggatcgtctgtggattataaagatgtctctctccgccgctttttagtttgtgctgccctacactgttcagtgtcatatccacttccagtccgagcggatcaaatgcctgtgaatgacgcgcaatataatctgctgcaatctcttcaattccgattccgccaattctgctgacagtatctgtaaaatatttatcaatgaattcctgttttaatccgattgcttcaaatatctttgctccctgataagactggattgtggaaatacccatctttgatgcaatctttacaattccgctaagtaccgctttgttataatcatctactgctgcataatagtctttctgaagcatatccgtatcgatcagctgtttgatggattcgtgtgcaagatacgggttgatcgcacatgcaccataaccgatcagtgttgcgaagtgatgtacctctcttggttctccggtctccagaacgattcctacagaagtacgtttctttgtgcgcaccagatgctgctgcagtccggaaagcaccaggagcgaaggcattgccacgtgatattcatctacacctctatctgagaggatcagaatgttggctccttcacggatagctctgtcaacttcaataaacagataatcaattgccttttcaaggctcgaattcttgtaataaatggtcggaatctccgcaaccttgaatccatcttctttcatatttttaattttcagaagatctgtctctgtaagaattggattgttaacctttaacatcttacagttctctgctttttcttccagaaggtttccatcttcaccaatataaaccgttgtagatgtaacgaccttctcacggattgcatcgattggagggttggttacctgtgcaaaacgttgtttgaaatatccaaacaggttctgatgcatgtcagataataccgcaagcggcgcatcaatacccatggctgctgttccttcggcaccattcttcgccatgttcaggatagaagtctttacttcttcatatgaatagccgaatgctttctgaagtcttctgcattcttctgctgtataagctggaaccttctgattcgggatcttcagatcctttaattcgatcagattgttatccagccactcaccataaggctgtctgcttgcataagtttcttttaattcttcgtcatcaatgacttttccttttttgatatctaccagaagcatctttcccggatgcaaacgttctttcactacaatcttctccggtggaatatccagtacaccaacttccgaagaaaggatcagcatatcatcatccgtgatataatacctcgatggacgcagaccatttctgtcaagcacggctcccatgcagtcaccatcactgaacaggatagacgccggaccatcccatggttccatcatagttgcataatactgatagaaatctttctttttctgggaaaggtttctgttatttgcccacggttccggaattgcgatcataactgccagtggaagatccataccactcataaccatgaattcaattgcattatccagcattgccgaatcagaaccgctactgttgattgcaggaagcacttcatgaagttttcctttcatacactcggattccatattttcttctctggcacgcatcttatccgtattgccgcggatcgtgttgatctcgccattatgcacaataaaacggttcggatgcgctctctcccagcttggattcgtgttcgtactgaatctggagtgaaccagtgcgattgcggaatcataatccggatcctgcagatcagggaagaacagcctgagctgatctaccagaaacattcctttataagcgatggtacggctggaaagtgatgccacatatgtatcatctgcactctgctcaaatacgcgccttacaatatacagtttacggtcaaagtcaaccccctgctctaccttcttaggtctttcaataaatccctgcataatacatggcatacattcgaccgctctgcttccaagtacatctgccttcaccggaacttctctccatccaaggaaattcattccttcttttttgacgatcacttcgaatatcttctttgcctgatttctctttaattcgtcctgtggaaagaagaacattcccactccgtaatctctttcagaacgtaaaaagatgccgagaggtttacagactttagagaagaatctgtgagaaacttgtaataagattccaactccatcacctgtcttaccttcggcatccttgccagctctatgttcaagattttcaacgattttcaatgcatttgccactgtatcgtgacttttctgtcctttgatattaacgatcgcaccgattccacagttatcatgttcaaattcggaacgatacagtccacgttgctggactacatttccttctttcatacatctgttcctttcttttgttttttcctactatatcacaaggctttactgttgtaaagataaaaattattttgagttgtcagattatttgactttttatatttcaactcaaaaagaatctgacaacttacattgccagattctcgttttctttcttctttgttggtttttcttcaatgcgctggattataacaaacattgttgatgcaactgctgcacaaacaactgtaatgataccgatccggatattatctttcagcatccagttatagagtccatatctggtagccagcacagataacagattcattgacatatgtgctgccaccggtgctttcaatgaaccatatttttcatacacatatgccagcatcatccccagggcaaatccatagagcatctgcaccagattcacatgcaatatgccaaatacgacggatgaatagaccatcgcatacacaaatgagctttccctttccatccttctgaagaacaatcctctgaatacatattcttcacagatgggtaccagcactgccagacacacgatctgtattgcaagcggtgccgaatacatcgcattcatagttgccttataatttgcatctatcactgacagatttccaatgatgatcaggttattcagccccaaactcatggcaagtgccataatgatcactgccggatattgccacaacggcgctttcttatcctgtacgataccggctgtcttctctttctttctgtccccgtgatacataagtgccataacagggattgtaacaagtgccgacagaccttctacccatgtcgtatagtcgatatacttattcaacatcttttcataaaaggccatcagcttattctgatcagacatcaacgcctctaatgctgcctgcgtctgatagtgtgtcttcatatatgccatcatcatggctgccatgactgccatacctacgccgattccgatcccccatttgatcaggagcggtccccacatcttccagaaacgttttcccggtgtctcaactggttttctttcctgttcctggtgataatggtatcccggctggtcgtgtccgttctgccattcttccatagttatcctcactttcatctgttgcttcgtatcatatactgttctattctacttctacgtgaggaaagttgcaattaaaaaaatataaacttttttacaatttgatctttacgacatcgacatccagattccataaaaacttatccagatctttgaacgatatgaatactgttgctgtattttccaacggatggattcccatacttttacatctgcttaaatttttatcgatgaaaaattctaccgcatgctcggtatcattcatcagcgcaaacggagttacgctcccctgctttacgccaagatatttctccaggcgttcttcggatgcaaagcttagatttcctgctccaagctgtcttccgagcgtctttaagtctacttttgtcttctcatctgctgtgatcaggaagtgtctctttcctttggaatctctcaggaataagttcttgcataaagttcctttttccgggagtcccagccggtccatatcctccatcgtatgtacgggttcatgctctaccacctcgtacttaattcccatcttgtttaacgcatcatatacacgctgtttctggtcttccatgctgtttctcctttctaattcgggtaatgtactacgatattcgcagtcaccgttccctttcctgtgttcttatacacataatcatcaaaagcattatacgaagccgcatcgccggctctcaatacatattcctggtctttaaaaatcagtgtcagttcaccggaatacacggtaatgaattctctcgtaccattcatctgacgattcgcctgcatcattccgttctcatcaaattccaggtcaaagatttcaaaatcctgtccctcccggaaactgaagatcggataaagacggtatcttccatcatcccccgccaaaggttctacttctttcttcccggtttcaaagaatggctgtggtttgtctgcggtaaatgcagtaaccggtacctttaatcccaatgccagtttatacactgttgatatcgtaggattgacttctcctctttccagctgactcaacatacttttgctgattgtggtaagggatgacacctgttccagactcagtccttttcctttcctgatatctttcagattttctgcgatcaactcattcaaatgatccaattcatgcccctccctttttcaaaattcctgtatatagaatttttatctattatattgcatacgttttcaaaagtaaaggatttcttctacagctgcttcatagcggtccagtttctctgccttccggatcttttttaactgtttttctttatccgggaacaaagttccaagataacaccagagttctttcatcttgaacaacacattcttatccccactgcttacctcctggtaatcctgaaaaatctggtcatggaatgcccttaatttcttcacatcaattctcccgccaccggattcgataatatctgtcagttccggattcctcaggattccacgccccaacataacacaggatatctccggaaaccgtttttttaacctttccatatcctcaactgtaaagatatcgccgttataacacaatggatgcctgcattctttcactgcgtccgcaaatgcatccagatctggatggcctttataaaactgttgctgcaccctgggatgcacgatcagttcttccaccggatatttattataaatatccagaagctgtccccactcatcggcgtcatattttccgattcttgtcttaatagagatctttacatccgctttcgcatagatctcatccaggaaccgttccaacttctctgtatggatcaggaatccggatccccgccctttcgatactacggtcttcgacgggcatccaagattcaggttcacctcgtcatatccatacatctttaacttttctactgtatccaaaaaaccttttgcatcatttgccaggatctgcggcaccagatacatgtccggattgtgttccggcaaaatatcattcttctcccgtgtattaaaatcctttttggtatgcggcaccagaaacggtgtgaaatatttctccatcggacggtaatgtgtgtgatatgccctccggtatatgtaagttgtgattccttccaatggcgcaagatagtacttcacctttatgtcctcctgattgtcttcctattattgctctgtccgatctcacagaccgtcagcacgcagtctttcacccggaatttgatttcgtatccggcatattccattccatacaccctgtccgggtcattctgataagatggtctcggatcaccggcaagaatctgcctcacacattccctgtgctcctccggcagttttgacagatagatttccggaatctctacctctaatgcataattctttaccacatcagcgaatccgcctctggcatccggtacacaatccgcatatggaagatatggtttgatatcgaagattggtgttccatccatcagatctgccccttccacttcaataaccattcctttttccggatactttttaattccggtcagcttcacacaggataatccgatcggattcggacggaacggtgatctggttgcaaacacaccgcaccgtttattccccccaagccgcggcggacgcacggtcggactccagcctgttctgacagcctctgaaaactcccagatcagccacagatgtgaacattcttcgagtccttttagtgcctcttctttgcggtattccggttcgaatacaatagttcctttcgtattcacaagtcccgactgtctcggaatcccgaattttgtcggaaagtctgtttggatttttgctatatatttcagtgcattcaaatatgttcgctccttgtttcccccagatactcttttaatctggcaatttcatctttgtgtccggcatcatcaagcggtgtctccagatagaatggaagatcttttagctttggatgacgcatcacattcagaagagcttccagtccgatctctccacctccgatcactgcatgacggtcctttctggaatcaaacggcatcatactgtcatttagatggacagctcttaaaagcggcagtcccagtatccggtcaaattcttccagcactccatctagattatgaacaatatcatatcccgccgcaaacacatgacaggtgtccagacagattccgatcctttccggatgctgcacaccgtcccggatctctttcagctgttcaaaccggtaaccgatctctgtaccctttccactcatcgtttccagtaaaaccgtaatgttctccgaacctgtaattgcctgatccagtccacggatgatattggcaattcctgcttcttctccaatcccggtatgactgcccgggtggaataccagattttctatctgcaattcatccatacgtctgatatcttcccgtatcaccgtacaggcaaattcatacgttttttctgttgcactcgccagattcatcgtatacggtgcatgtgcgagaaccggaccgaatgcatgatctttccgtatcttctggaatctttctatttcttccggcagatacgttttataacttgatcctcttggattcctgctgaatatctgcatggtatcagcattcatctttactacgttttccgcagtttttgcaagtcctcctgcgatggacatgtgtgttccgattgtatacattatttccctccatagaatcatcttaaaactctgatgctcattataacatgctttctatttcagcaaaagaatctctttttccggcagtttcaaataatccggaattcctttttcttccagttctgcccagagggttttctgtacataccagcagatatcgtcgctttcttccgtctctccttttaagaaatatttccattcgaatggaaattctgcctttccttttaccttaaccggaatacagttgtcttctctttctccccataccggaatgaactcgtgggcacggagcccgatatgggtgatatccacatctatcatctgtttcagatgaagacaggttccccagtccggaatcctgacatgatgtgcatccagacgttctgccggaacgatattcttacatccggtaagtcttgcagcttctaccttctttggatggtcaaatatctcctttgtatcaccataacagatctgcttcccgtcatcgataataagaagttcttcgctgaaccggtagatttcatccctgctgtgggacaccaggatcaccgtcccgtcataatcactcaaaagttccatcatctcctgctgcagacggtctttcaggaagacatccagtgccgaaaacggttcatcaagaaggatgacggacggctcatatgccataatcctcgccagtgcaactctctgctgctgaccaccggaaagctctctcggaagtcttttttccagcccctccaggcggaaatgccgtatcatcttctctacctgttcctgcttcttctttttatcaccggaaagtccggctcctacattctgtgccacggtcattgcagggaataatgcatagttctggaacatataaccgacatttcttttctgtggttttaaacacgttccggaatcggaatcatacaggatatgctctccgattcggatatagcccttgtccggatgttcaattcccgcaatgcttttcaaagtcagactcttgccgcttccggaagccccaaggattccgattctcttcttcatggatttccagtagacatccagttcatattctccaagcttcttatgtatctttacttccatcgacatctgtctttcctcctaccatctccggatattcttcatattccggcctgtcaccagattcatgaggaatatcagcacaaatgcaaccagcataatgatcacaacccagattccggctgtcatgtaatcaccatcctggataaccattgcaatcctctgggaaatggttcccgtctttcccggaatattgcctgcaagcatggacgttgcaccgtattctcccagtgctcttgcgaatgtcaggatcgttcctgccacaaggcccggtcctgcagaaggaacagcaaccttccagaatatcttatattccggcatgccaagtgtccttgccgcatggatcagatttacatcgatctgttcgaatgccgctcttgcatttctatacatcagcggaaatgcgatcaccgttgctgcgatgatacagcctgcccaagtctgtacaaccttgataccaaactcctcatacagcagaattccaaacggacgtcttctgctgaacagaagaagcaggaagaatcctgctgccgttggcggcagtaccatcggcagtgtcaggattccatctgcaattgctttcactttcggacctgccttgatcacttttctcgcagcaaacagaccaaggaaaaatgagaatatcgttgcaacgattcctgtcttcaatgatacatacaacggactgtagtccagtccctttaatatctctatcaccgcatccatgtattttcctcctcatatttcatctattgcatctatcacatactttatctgtaatatactttgataaacagaaaacatgcagccgtaaccgtctgcatattttctgtgtttgtactcctatagattttcttatctttctacatctgtatcaaagtagtatgcatcaaaaactttcttggccttatcagataatacgaatttgtagaagtcttttgctgctgcagtctgtgtcttatctgcctcatcattctgtacctggcagatcggatagataacatcacctgtcagatcatagcttactgtctgaaggatatcgagtttgtcttcatatccgtaagtatctgaatagtatgttgttcccacttcgcaggatccttctgctaccgctgtaagtactttgcttacattgtcttcctcactgatctcaactccaccgagtgcctgtgatacctgggctgttgtaatggcatctactttcccgtctgtttttaatgtcccgagatttacgagtgcctgtcttgtatactttccgaccggaacgcttcctcctgcaagtgcgatacttttggcatctttcaaattctcaagaccggtcacctttgttccgctgtcctttaaagatacaactactacctggttgttcaggacgtttgctcttgttccgtctactaccagtccgtctgcttcgagctgatccatctgcttctgtgctgccgagaaaaacagatcgcattcatatccttcttcaatctgtgtcagaagcgttcccgaactgtctgcgttgaatgtgatcttcacttccggatgatcttcgttatactctttggcaagttctgtcataactgtattcagacttgctgcgatgaacacctggatctctgtctcttttttgctgctatttttgctgttatcggctgccttttcttctgtctttttattttctccgcatgctgccagtgagactgccatcactcccgccagaaggacagatgcaattctctttagcatctggtttctcataatacttccgctcctttttcttgtgtttttatagtttaccagttgctatatctgcaccaggattattttctgccacattcctgtacatttccccgcagaacatccagtccgtgaggaagtctcggaagaatatactccagtacctccgtcactgctttcggacttcccggaagattgatgatcagtgtcttcttccgaattcccgatactgcacggctgaacatcgcacggtctgtaaccgtcatggaataattccggatcgcatctgcaattccatttgccatgcggtcacagactgcacaagtagcttccggcgttacatcccttggtgcgaatcccgttccacctgttgtcaggatcagatcaagctgcctttgatccgccagacgaatcagctgctttttcagtccttcttcgccgtctggcagaagaagtgtctcttttatatcaaatctgatatgttctttttcttcactttctcttagcatcttttcaaccgccggcccgcttaagtcttccctctccccggcaaatgctttatcactcagtgtgatcaccgcagtgctgtatggccggtttgcctgcggcattctgacttctacactgtcacccacacagatgtttccaccttccagcacttctgcaaaaattccttctctcggcatgatacagtctcccatccgccgatagattgcacaatggctgtggcattcttttccaatctgtgtaactttcagtctgacagtatccccgatccgtatctcggaatctaccggaacatttctcaagtcgaatccctctatgatcagattctctccaaatgctccgaaatccacatctgctccctgttcccggaacgcttcaatcttctccagtgcaaggagactgatctgtctgtgccatttcccgccgtgtgcatcttcttcgattccccagtccggtacgatcctggctgactctactggatacttggcagttcctcgttttttgctgatacagattcctctgactacgcctttcttctgatccatcctgtttttatcctccaatctgtgccatctgatgtgcttctgtaatctcccccggcttttcaaaacaatgtgccgccggcttattctctatggcatgctttatctgttctcttatctcatcatctgttccgcttttcagtaattctttaagcggatatatatccccgtagcacagacacggcttcaggtctccggttgaagtcagccggatgcggttacaggtgttgcagaatttaccgtgcatcgcactgatgaatccgatgcttccttcaaatcccgggatccggtaatataccgcaggtccgtttccatgtatttccggatctatccggatatccggatactctttctttatttcatccagtaattccagattcgatacacctgtattcctctttccgcagccaatcggcatcaattctataaacctgacatctaccggcagtttctctgccagtcttaccagtgctctccattcctgtctgtcaccggcatcctgcaacacactgtttactttggtccgtattccactttctgccgaagcctccactgcttccagcacaatatcacaggcatctgttccggtgatcttgtagtacttttcatgatccagtgtatccaggctgatatttatcccatccagtccggcatcctttaatgctttcaggttttctttcaataggacgccgtttgtcgtcatcgtcacctggatgatacccggaatctcttttatcattccgatcagatccacacaaccttttcttaccagcggctctcctcctgtaatcttgatcttccggattccaagctcttccgcgagcgtgcatatttttttaatttcttcgtatgtgaggatctcagacatagccacctgcgtaattccatccggcatacagtacctgcacctcaaattacaccggtccgtaatagagatcctcatataatcaattgttcttccggcagcatcgatcatacgttcttctcctgtccggccttccacactccactttttccacctgttttctccaacagccggatatccttcatgcacatacctttatccactgctttacacatatcgtagatagtaagcagtgctacctgtacaccggtgagcgcttccatctctacaccggtctttccgactgtcttcgctgtacagcgtgcttcaatttcacaggccgcctctatatattcaaattctatcataaccttgctcagattcaggatgtggcacagcggaatcaactccgatgttctcttagctcccatgatccctgcaattctggccgttccaagaacgtctccttttttcattccgcctgttttcactttttcgaaacactcctgcgacattgagattcttcccattgccgttgcttcacgcactgtgtctgatttttcactgacatcaaccatcactgcatgtccctgttcattaaaatgcgtaaattctcccatgattactcctttttactatgtgattcctaaccacttctctgttttgctgcttatatcctgattacccggacgacttctccttccgcatacgtccgttcaccttccggaaagaccagcaggcagttgcttccgattccgttcttaagctgaccgtttttctgaatctgcggaagatatacaccgctttcatcgcatcttccttttacaatccgtttcattttgcctgtctttacaaatgtctgtttcagtactttcttctgattcttctgcaaatatctgctggcttccatatccgtcagatagccgccggctaatacttcaaataatgcttccacagcaaatggattgcctgaaagcgacagaaccggagttcccttcaccactgaaagcatcgtcggcattccgggttttacctgtatcccatgaaataacacatttccgttcagattttttatgacacccggcagaaggtctttctctcctaccgacacacctccggttgtaaggatcagatctgcttctttccatgcttctctgatctcatctgcaattttactttggtcatctcctgctgtctgataccgtactacctcacagtccatctctcttagccttgaacacagccagatcccattcgcatcatagatttttcccggtcgcaatgctatctccgtattttgtaattcatcgcccgttgtgatcaccgctgctttcagtcttttgtacaccgtaaggtttcttactcctgctgccgtgacagctgccaacagataagaatctaccggggttccggcttctgccagcaaatctccggccgaaaaatcttctcccttggggcagtaattttctccgggctgcgcattatgatatatccgaactgcttctgcgttccaatctgtatcttcctgctttaccacacagtcagcaccttccggtatcatcgcaccggtcatgatccgtactgcctgatacggatttaacacgagtgctgtctcctgtccggcatacacgcaccctgtaacttctaatgtaaccggattctgcatatccgccctgcatacatcccggcttctcaaagcgaatccatccattgcagaccttggaaacggcggctgtgtcactgccgcatataccggctttgccagaatctgtcccagacagtctgccgactgtttttcttctttttttcttacaggcatacaggttttaaacaactcctgcgcctgttcaagtgttactctggatggccgcactttatgtctcctttccaaatgggcagaccggataatagcattcccggcatcccaggcagagtcctccatgtcccatctggataatcgctttccggtcaatccggactcctgccgctattctcggaaggatcaggtcaaataccgtcgcctttgcatacatcacacaccccggaagtccgacaaccggtgtcccgtcctcaaaatatccaagacacaacattgccccaggaagtgtcggtgctccataggttacaatcccggctccggaagctttgatcgcccccggcgtcttatcatccggatcaacgctcattcctcctgtacagatgatcagatccactcctgatttcttcatatctgcaatcgcctgtgtaatcatctccatgtcatcactgcacagcacatgttttatcatctgtatcccgaatgcttccagtttcttttctactaccggcgtaaactgatccttgatcaggcctttatagacttcacttcctgtcgtgatcacacctgcagtctttaatttccacggtgtcaccttcaataatggttctttccccgctgctttttctgcttcttccagtttcttttcatctatgaccagcggaatcacacgcattcccgcaagcttgtctccttttctcactgccatattcgtatgtctggtcgcgatcatgatctcatcgacactgttcacatcatataaacgcccgacatccacttgaaataaaccgtcaatatccgcaatcaattcaatctttccttcttttacttctgacggatgcatattttcattctgtgcgatcttacgcaggcgttccgcaccttcatcttcatgaagcattccatctgtcttctcccagacatacagatgttctttcccaattgaaagcaataccggaatatcttcttctgtgacaacatgtccctttcggaatcttgcatctttcgttactcccggaatgatctgtgtcatgtcgtgacataatacatgtcctgctgcatcttctgttctgatcagtctcatatttttctcctcattttctttttgtttacattatcatcatgatatattctgtatatagcggaataaaaaatctgccgttttctcaatctcttccagtgggaacacatttttgcaacccagaatctccacatcactgatcaccgccagacattcttccggcaatagcggcatgggttttctggtccccttccggtgcagcataatcttcggccatggtccttgtttaaatccttccgtcaggatcagatctactccgtctatctttttcagaaattcttccgggtctgtctgcctgttttccatcaataccgctttttctgatgagatcagtcccgtcacatctgccccggcttttgtgaaacggtcactgtcttttccttcgtggtcaatttcaaagcggtgtccgtcatgtttcacaattgcgatcttaagtccccgtactttcagcttttggattaatctctccaaaaatgtcgtcttaccggtgccggaatatgcaacaaaagatacaatcggaatatctgtgtgcagttctttatccggtctgactgctgtcccggcagacttgccgcaggattctctgttggatatactgtctgattgtcctgtaaacgtctgatatgcctccctggtattgatattttggaatttatggcttccatccgtcaatccttctaccgctacatagcacactctcagacgccccagcagatgctttactttcaaatctcctgattccagctgttctttcagaatctccagtgtagatttccgataccatgcgcagagcacgtatttctttccggtcctgtctaccgggattaccgcatcgattccatcctcaaaatagaccgctaattcttctgctacctgccagtctataaaaggcatatcgcaggaagtcacccatatcttttcataacttgccacacacataactgaatatattcccatcaacggtcctttgttctgttccaaatcttcaatatgcgttacctttatctcagaataatcattctttcttcttactgaaagaaacatttcatccggaccattatccattatattccttacaatttgttctaaaaatgtatatttaccaacctgtaattttgctttatcctgccccatcctacggctttcaccaccacacagaatcacggcacttacctttgattgcacaataaaaacctgctctttctgaaaaaagagcaggccaaatacaggaaaaacagttatctatgattttcctgtcttatcttcactgctctcctttccaaatatgcgggaggcagatacgtttccctatctaccctgaggaactgactgttttctgtcattcctggcctgcatcccgtcacttttttcacgtcttaggcatgccggcttcggagaaccctttctatcattttattttatacgaagtcccagcttctgtaaagctgaaattattcttccaaaacaacacgacacggcatagatttatacaagagaaatcctgataactcatcatgatactccatactgcacacttcattgatattagtttctttccattctcctaacatatttactccaccacttccaaacggagcatgaatgcagccttttgttatttcacatatatttgctctaaacggctgttttccaaatacagtttctatccatattttctgtccttcatttattcctaattctgttgcatcttccaaattgatatctgctaccggatatggttctaactgtatgatttcacgaacagccggaccgaaagatgcaaaacgcacggcacttcttgcgcctgtagtcaatatcataggatattcttctttgcttcccaactcttttattcctctgatatctttataaactggtagtcctgtatatccgcattcctctataagttttgaacagatttcaaattttccagacggtgtcggaaatcccggcattccatctttcctaagatcacccgtttggtattttttatattttacaggagatttttgtggcataactgcttctgaacattttaatttttctaataattctctgtttccatccaacatccacaattccgtatcctcatcgcttttgggataagcttccccaaagcccattttttcagccagcgcctgtaaaatatgaacatcgtttcttgcttctcccaatggttgaataattcgatttcgaagtttccaaccaaataaggggctgctgacaggtatttgattttcatagtatgtagttgctgggaacactacgtctgcatacataatctcttctgacataaaacgttcattcacaaccagaaaatctaatttttcataaactttatgccataattttttatcaggataggtcaatgccggtgatgctgctgcaattagcagtcctctaaccggataaggatcatcatttagcactgcttttggtatttcactaaattgtccctggccgactattccataaaacagcggaaattctttgcttcctattggctgattctgttccggaactttttttaattttgcagtaggaaaacgacctccgttaatatacataccgccttctacatcatattttcctgtaattgcccataaaatctgtattgcacgatagttctgtactgcgcttctctgatattctattcccgtatacacacttaatacagcttttgttgtactgcataatttatccgcaagcaatcgtataatttcacaatccacaccacaataatctgacatttcttcaacggtgatttgttttagatattctgaaaattcctcaaaaccttctgtatatttttccacaaattctttgtcatatttttcttcctctacgattattttaagcattgcaagtgcaagtgctccatccgatccgggaacaactggaatccaccagtcagcctccatacccattcctttttttctcggatcgataacaatcagatatgcacctcttttttgtgcctcttttactttttcatataaacgtcccggaccagaatttgttttcaaatttgttccccatacaactacaatttctgcattctcaaaatcagcctggatcattccttgtggaattcccagtgtcgtaatcggagtaataacattggcagctgtaaagcacgtagcaccacaactcatatcatttggagaacccaaatgttgaaaaaatgcatcttttcctgctattgcacgcatggtcccgtcttctcttccgctggttccgacatatgatgcgagtgcccgggctccgtattgtttttttattttcaaaaatccttcagcagccttttccagtgcctcttcccaggttgctctcctgaattttccttctcctttttttcctatacggaccattggatgcaaaattcggtcttttgaatatataatttcttttgacaatgctcctctcgggcacactctgccaaacggagaatctttatccggctccacttttactaatttaccattttcaattgttgcttctatccaacatttatcaggacatattccacataatccttttttcttttcattttccatcttatttacttccgaacttttttttcaggcgattaacagcatctttcagaatatctctggaacatgcaacattgaatcgcaaaaatccttctccttcttttccaaaaaaatctcctgcatttgcaataattccgcattcattttttactacttcctggatattttctacatcaattcctgcattccgaaagtccacccagacaagatatgtcccttccggctttcgcacatacaaacccggcatgttttgctgaatttcacccacaaaataatccagattatcattgatatatttatttaactcatccaaccattccccagattcatcataagctccagtcaatgctgcttctgcaaacgcattgctttccgatgcatgaaatttcgatgcattttccataaaagctttcctcaattcttcgtctgcaataaaacaatttgcaacatgaataccggcaagattaaaagcttttgacggagatgtaaatataaagcttctttttcttattttctcagacaaactggtaatgaacacatgcctgttcccttctgacaaaagttcactgtgaatatcatctgacaaaatatacaggttatgctcttcacatatttgggcaagttctcttaattcctcttctttccacactcttcccgtaggattatgtggattacagataatcactgcttttgtcctggatgtaattttgcgttccagatcctcataatccatcgtataatatccgttttcatttttcatgcgattctctacaattactctgttattatctttaaccacttcaaaaaaagggccatatgcaggggtttggacaataatttcatctcctggttttgaaattgtctgtattgcataagcaagccccaccacaacattagggataaagcagatttcttctcgctgtaattcatatccgtgtctttgcttcatccatctcataactgactgataatacttttccgacaaaaactgataaccaaatgccccttgtccggctattttttttaaattattctgaattgcaggcgcaatctgaaaatccatatctgcaatccacattggcaaatctgtctgtttaataaaaggtacatcccactttacacaattcgtaccttttcgttctatccctctctcaaaatcatacattctatttactcctttcagactactgtcccttcagcttatggcaggcaacaaaatgttccttcgagacctcctgtaattcaggcatctttctcctgcatatctcttctgctatcggacagcgattacagaatacgcatccctcaggcacatctacaggacttggcacctcacccttcaatctgattatttgtctttctttttcttttttgggatctggaatcgggatggcagacattaaagcattggtgtaaggatgtactggatgatcatataactcatcagcctctgccagttccaccattcttcccagatacatcaccccaacccggtcggatatatgtttcaccatcgaaagatcatgtgcgataaaaatacttgtcaaatttctttctttctgcagacgtattaacaaattgaccacctgtgcctgaactgacacatccaatgcagatatcggttcatcacataacagaaattccggattcacagcaagtgctctggcaattcctattctctgacgttgtccgcctgaaaattcatgtacataacggcttgcatgttctggattaagtccaacctgcttcaataatttctgcacctcttctatctcttctgctttcgaacaagttaaatgatggattctcattccctcagcaatgatatcatgaactttcagccttggatccagggaagaatatggatcctgaaatatcatctgaacctgacgcataaactcttttttttcagagactttcaaattatgcacgtctttgcctcgatagagcacttctccatctgttttcccatacattccaatacaggttcttccacaagttgtctttccgcaaccagattcccctactattcctaatgtttctcctttataaatattaaaagagacatcatccacagctcttaaatactgatttgaatgtagtttaaaatactttttcagatgtttcacttccattaatatttcacgttccactgctataccccctctgtcagatctatatcctgatatacggaatcaggatggtacagccagcaggctgccttgtgccccggttcaaattcatattctggcggcattgcctctacacatatcttcatacaatgcttacacctttctgcaaatggacatccttctggcggacagattaaatccggtggtgttccttcaattgataccagtttctgtttatgccccagttccagattcggtgccgcatttaataacgcccatgtatacggatgtttgtattgataaaagatttcatcactcgtccccatctccacaacctttcctgaatacataacaacaatatgatctgcaatatttgcaacaactcctaaatcatgcgtgatcataataattgttgtacctgtttccttttggatttttttcataagatccagaatctgtgcctgtatcgtaacatctaacgctgttgtcggttcatctgcaatcagtatctctggatttgcggataaagcaattgctatcatcactctctgtctcataccaccagataattcatgtggatatttttttatacatagcgccggatccggaattcctaccatctcaagcatatgtattgcttgctttttcgcatcggctttcgaaacattcgagtgatttgtgatattctccataacctgtttccctatgttcatagtagggttcaaagaagaaagggcatcctgaaatatcatggagcatctggctcctctatactctttccattctttttctgactgcttaagaatattttttccgtgatacaaaatctgactttcttttccaatctcacccggtggttgtgcgatcagccccatcacagcttttgatgtgaccgactttccacagcccgattctcccacaattgcaagtgtctctcccttttttgcataaaatgagacatctctgactgcctgcacttctcctgcatatgtatgaaaagatacccgcaaatttttgatatctattattttttccatttacctacctctatttcatgatctttggttccaatgcatttcttaatgcatctcccagaatattaaaactaaacactgtcagcacaataaacaatcccggaaaaactgcaagaagcggctgatccataatatacacctgtgcactttgtagcattgttccccatgaagcttttggaagctgtactccaagtcccataaaacttaatgctgattctgtcaatattgctcttgccacagccagacttgccgccacaataatagaagcactcatattaggaataatatgtttaaaaataatgtacccgtcacctgcccctaaatgtctggatgccaatacaaaatcccgttcttttaatgacagtgtttctgctcttgtaatacgggctatctgacaccattcaaataatccaagaataataatcatcgaatacacttttggtggaaatacagaattaatgactaccatcagcaaaaaacttggtactgacataaaaatatctgtaaaccgcattagtattacatctactttcccacccatataaccactgactgtaccaatcacagtacctatcgctgttgacagaatcatagacaaaaagcctacagccagcgaaattcttccaccatataaagctctggtaaaatagtctcttcctaagtcatctgtcccaaaaagatgttttatagatggtgccgcaagtttatttaacaaatcctgttcatccggatcataaggacttaatggtgcaaatattgccaaaagtactatcactgccaagattacagtacaaaaaacagcaagtttattttccatgatagaacgcataacatcttttaaaattcctctgtcataatctgccatcattttttcttcttttttttgtactttctgaaaactatctttatttggaatataattttttctcaattccataattagcgtttcacctcctgacgtattcttggatctgcaacagcatacagaatatctgccaaaagattacccaaaatcagaatcagacatgagaacatcgtatatcccataatcaaaggataatctcttccattggctgcatccattgccattcttccaattcctggccatgcaaatacgctttcaacaacgaaagaaccacaaaccagtcccgcaagattaatgccagcaagtgtaataattggaagcagacagtttttcaatacatgtcggaacaatatttttgtcttgctggttcccttagacatagctgtcaatacatagtcttcttccagttggctgattgtattagatcttatatatcttgtaaatacggccatattattcaaactcagaacaattgacggcaatatcaggtgtttgatcaaatctgctgtactctgtattccgatactgtacataccactactcggaagaatttgtaatttcaaagaaaaaataataattaaaaccatagagagccaaaacggtggaattgatattcctacatatgtcagaaatccaatgatattatctggcattttattctttttcaatcccgcccataaaccaagtggtattgcaaaaatcaaagatattgcaaacgcagtccccatcaatatcagcgttgccggaagacgctctccgattatttctgtgacaggtcttttatttttcaatgaaattccaagatctccatgaatcacatgccccgcccatctgaaatactgttctgcaatattcccgtccagtccataagattctctgatgttctgcagttgttcctgtgtcattcctggtttcgaataattatccatcggatctcccggtgctgcctgaatgataaaaaaagaaaagatgcttaccagtataataaccggaatcaaccccagtactctttttataatataatttttcaaaatattttcatcctcacatttttaacgtatttaggaaaaagccgccttgcattgcatggcggcttttcggcctagatgattgtttactatttttccattgtaatctttgtatagtcctcgaaaatcggaactctcttgattgcatccaatcctttgaattcctttcttgctaccatcacataatttgtatttgccattggatagaaagaataatcttcattcatctgctcctgaagagccttaaaattcttatctctgtcttccgttgtcaatgactgcgttgctgttttccatgcttctttcgtctcaggacttacataaaatcctttttccacaaggtctcctgtccagcctgtcatctttgttgccggatcagcattcatctgatccataccattggaagcaagatcccatgaagtatcttctttaaagcttccactaatccatgccgcaaataaatgagggaagaaagcagaaccatccattccttcaatttcaagatttacatctatcttcttcaactgctgttgaacaatctgtgctgtttctttcatattcggtctctgctggaaatagatataatgcaatgttttaccagacagtccggaactttttgcaagtttcttggcttcttctatgttctgctgataacctttcatctcatcattataataaagattttccggtgagcagaagttttttgccggttttgcgagttcttctgatccatatgcaccttctacgatctcatcatcattcaaggcaagacagattgcttttcttgcatcttcatttttcataatctcactctgatagttaaatgcaagataattcagacgtccttctggaatattatatactgtataattatcatcctttttatacttgtcaagctttgtctggcttgtcacacgcataacagataattctccgctctgaagtgctgcctcctgcgcactctgatctggcatgatttttatgattacctgatccaaacttgcttttcctctataataatcatcatatctttcataggtaatactttcgccttctttatactctttcactttaaacggaccagaaccaattcctttatttgctgcctctgtctgttcactgacatttgttcctttaaatacatgtttaggaagtggttgtaatcttccgaattctgtttcaaaagcactgttcggttcctgtaatgtaatattcaaagtaagatcatccactttttcaacactaattggttttccattataagaaatgttgcttggatcagcaccatttgcaggatctaataatacatcaatcgtgaagataatgtcatcgaccgtaatcggctccccatcatgccaggtcattccatcatttaacttcaactggtaatggcaaccatcatctgatattgactcaagactctttgcaagataccatcttgtttcatccttattaataactaataatggatcaaaacatggtgtacttgccattaaccagtcatcacttccatacggcgcatatggtgtaactgtttttacactgtttgagttaatcggaacaataaaagttcctcctccactttctcccgacgttgttgcactttcagatgttttctctttgtccccggcattaccgccacaaccaaccgccaatgatgcagccatggcaaccgttaaaagcaaagaaataatttttcttttcatctttttcctcccttgttatgttatatttctctaatcattctatcgtctttctttttatcaatcaaatcaattataattatatgtaatctaacttatagctttcatctatgattttatttatactctttcggcaaatccggaaaggcaatcaccggcggctgatctgccacgtgctctccaatctctttttccatccacgccagattataccatctgtggaatttataaccacaatttgtaaaccaaccgaccatacgatatcccagatgttcatggtaatggatacttgcattcgtcaggtattcatcttcatgctcggtacatgcaatacacgcattcatatttaacacattctgccgctttaatattttttccagcatgtcgtataattttgtcccgatacccattccttttttattctgatccacgtagatagacgtctctacattccatcctcctgccggtctctcgtgaaaagcacttgcatatgcatatccacatatttctccattcacctctgccacaagatatggatatctctccaatacatgccggatccgtcctcggaattcttccaccgtcggcacatcatattcatatgtaatcactgtatgttctatataaggcgcatagattgcaagcagttcttccgcatcctcttcttttgcaatccggattgtaatctcttttttctcattggtgttcattctatattcagctccagtctgctcttattatttatttcttcactattataaacacgtccgtaaaaaaatgccatctctctgcaaatttttcctgcaaaagagatgacatttttacatattttattatccctggttctgtgccgcaaccagatgtgttgctccgtatttttcgcgaagctttggtttttcaatctttccggtaggattacgcggaacatctgcaaagatgatcttacgaggtctcttatatctcggaagtttcttacagaattcctgaatatcttcttctgtacattcaactcccggtttcagttcaatgattgctgctgaaatttctcccagtctgtgatctgcaagtccaataaccgccacatccaaaatagcttcattggtacgtaagaagtcttcaatctgtaccggatagatattctcaccaccactgatgatgacatctttcttacggtcaacaaggaagataaatccgtcttcgtcttccatcgccatgtctccggtatacagccatccttcatgcagaacttctgctgttgccttcggatctctgtagtaacaggtcatgacgcctggtcctttgactgcaagttctccggtctcaccctgttttacaggctcaccctgttcatcgatgatcttcgtttcccatccatatccggcttttccgatggctcccactttatcaatattgtctactccaagatgtacacatccaggtccgatagactcactcagaccatagttcgtgtcgtatttgtgattcgggaagtattctttccaatgtttgatcagacttggcggtaccggttgtgctccaatatgcatcaatctccactgatccagatcataatctgcaatattcagttctttgttgtcaagtgcaagaagaagatcctgcgcccatggtactaacagccatacgattgtacagtgttcttcagatactgcgtgtaaaatcgtcttcggacttgttccttttaacaacactgcctttccacctgtcagaagactgccaaaccagtgcatcttggctccggtatgatacaacggcggaatacacaagaatacatcgtcttttgtctgaccgtgatgattctgttctgcttttgccgcgtgcatcaacgattcatgattatgcaggattgccttcggaaatcctgttgttccggatgaaaaataaatagctgcatcgtcatcgtcgttcacatcaatcttaggtgactgactggagcagttagctgtatgcgcattgtaatcctccgcaaaaccgggacatccgtctcctacaaaatataacagacgtcctttactgatctcgtctgcaatctcctctactcgtccgatgaactccggcccaaataccagaatatctatctctgcaagttctacacaatacttgatctcatccgcagaataacggaaattcaaaggtactgccagtgctccggtcttcaggattccgaaatagatcggcagccattccagacagttcatcaggagaatccccactttttctccttttttgattcctctttcaaccagcagattggcaaatctatttgccttttcgttaaatacattccatgtaatttctcttctgtaataagctgcacgggatggttcaatcaggtcaaactccttccatgtagttctttttgtctccggcatctccggattgatctctaccagcgcaacatcgtctccgtacagacggcagtttttctccaatatatctgtaatcggcattggaaaattcccctttcgtgttcatttcatatttattatgttttatatgattcttagcgtctttagctttcgtactttaacgcttttattcattaaagtctataatactcaactttccttcaaatgtcaatctatatttgtattattttccattcgatcgaatttttctgcacttttgtttgatttttctgcttccccagcctataatatgcaacgggtgataaaaatgaattggatacataatcataaacgcgcattactgcacataaaccttgcatttatcggtggactgaccggtgtctacgccatcttagtccgcggtggcaacttcggtgccgcacagaccatgaatctgattgaaatgatcttaaattttgctgaaatgaatctgacagatgcttttctgcgtctggcgatttttattttatatggtcttgcaatcattgcagctttcttaatcggggaacgtttttcctccgtaaaatcttatatcgcgctggtgatagaaactgtctgtgtatggattgccggaatcattccgtcatccgttcatccattgattgcactgttccctgtattcatcctgaatgcataccagtggcagacgtttactactccggaatgttataacagttccaccatcttttcgacaaataactacaaacagaccgttcttgcgtggatgagatatcatatgactcatgatcagtcacagaaaaaacgcgcatggctttttacaggtacactaattttcttccatctaggagttcttgccggatattttgcagtaaagcacgccggaattcatggaatatggtttacattcgtgccgctcattacagctgcctgtctggtgcttccgattggtgaggcagagatacttgaagctgatgttgggatttaattcaggaaggcatgattacccggacctgcataaaaagtaggaagctgttcctgttcaggttccgtcggtgggaaatactaaagcgtaaccgtagtggcttccgctgggttacacttccgggcattttatttattaacattcgctgccagtcacgacttgaaggaaacaatggataaggattattgtgaatgtggaatgccgttagaaacagttagagagtcagaagcaccgttaaaggaacgaagcgaacgtgtttgaggcgaacgccgagtttgagcgtagttcctttgcttttaggtgattctgactctcttagtgtttcttatggtatggaacctgaacaagaagccttatctattgtttccttcaaggactgagaggccgcttcccagttaataaattaaatcccaattctcctacaatgccgctttatatatcttatacatatcttcttcatgcagcaccttcgctgatcctttgcttcccttgcatccgatactgcatttatgtgccatcaatttcagctcatcatcgcccggatcgatgccaagttcatggatagatgtcggcattttgatctcacggtagaaatcttccattgcttctattccgcgtaaggccacatcatcagctgttccttccggatctacctgcataacattcatcgcaaacttttcaaatcttggaagacagtctttgtatacatatcttgcccaggagccccagattgccgcaagtcctgcaccatgtgccacatcatagattccacctatctcatgttccaacgcatgagatgcgaagtctcctccgacgacagcgccgcagccggtcagaccattatgcgacaaacttcctgcccacattacttctgcccgggcatcgtagttcttcggatcacggaccagaattcttgcattttcaattacggtacgcatcagaccttctgcaatgctgtctgtaatctccatattcccgccatttgtaaaatagcgttccatcgtatgcatcaagatatccgtacatccgcatgcagtctgataatctggcagtgtcatggtaagttccggattcatgatcgcaaaacgcggtcttccataatcactgctgtatcctctcttgacccatccttcttcttttgtgataacagaagaattactcatctcgcttccagttgctgcgattgtaagtacaaccccaatcggaagacagcctgttgcctgacgctttctgtcatagaaatcccatacatccccttcattggctactccgtatccgattgcttttgcagaatcaatcgcacttcctccgcctactgcaagaatgaaatctacaccttctttctttgcaagctcgattccttcatacaccagagaaagtcttggattcggtactgctcctccaagttctatgtaatctacctctgcatcatccagagaagccttcactttatctaaaagtccggaacgtctgacacttccacttccgtaatgaatcagaacttttttacagccctgttcctttacgagttctccacattggtcttctgtattctttccaaatgcaactttggtcggtgtgtaataattaaaattatacataagttctccttctttcccacatacttaaaatatgctacagatttctctatagcatattctaatcttcctctttacttttttcaacaatcatttgcagccttataccatcatctgatattattttttcttatacactccttcagtgccgtcatcagtttatctgcatcaataggctttgtaagatgccagttcatccctgaaatatggctgttaatgatatcttctgcaaacgcatttgcactcattgctatgattggtatcttatccgcatccggtctttgcaatctccggatcttccttgtcgcatcccatccattcatatacggcatcataatatccataaaaatcacatcgtaatatcccggttccgactcctcaaacttcgcaactgcttctttaccgtctgccgcacactctacacagattcctttctcttccagcattaactttgcaatctccagattcaactcattatcttctgcgatcaatgcatgcaagccttccaacggaatatcttctgtactttctgtattcacattctctgtatattgcatcagattctgtaccccggtcttaaatggaatcgtcatagtcacagttgttccacagttctttttactctttatctcaattgtcccgccaagtctttctgtaatcttcttcgctatcgcaagaccgagcccggtgccttcatactgtgtccggcttgtcttattttcctgcgaaaacatctcaaatgcgtgtcctacaaactcctcactcataccaattccattatctgaacacccaaattcataaaacgctctctcgtcatcttccgatatttccctgcaccacacactcacattgccgcctggctttgtaaatttcactgcattatcagtaattactgtcagaagtttttctatataaaccggatttcccatcagatacatatgattcagctccgattttttccagtccacaacataatcaatctttttttacctgcctgcatctgttgatctgtgttgactcggtttaacactgccgccaaattaaacggtatatcattttcgacaaattgctccgtctctaacttgttcatatccagaatatcatttaccatagaaacaagatgcctggcggattccacaagcttctctctacattttttctgtatctccagattgtccggataacgatctgcaagctcggtcataccgatgattccatttatcggtgtccggatatcatgactcatattagacaaaaaccgtgatttaagcgctgcatctttcctggcttccgcaacctgctgtagcagttcctgttcttttttcttaacatcactgatactgcggatcgcacacagtacatgggtcagattaccgtctttgtcccttttcttctcgataaaacgaagtttatgccagttgccatctttcatctggtactccatcacaatggtctcttcattcttcattcgtacaggcagtgtcgttatatctgcaaatttaagaaatgcttcctgatactcttctgccacaaacttcttgcatgcattcctgttgccagaagtcacttctccggattttttataattcatattctcaacagcccggtttgaaatttcttcaaaccagtttttcgaaatatcaattcttgaaatatactgatagcttttggcaatagcctctataatctcattgcttagtttcgcttcatccagtgccctctgtaattgtttctgaattgctttttctttatacagaataccgtccacattccgataccccagaaatatgtaaaaatttttcccgtctgtctttcctttcaccgcataagcctcataataactgtcttttccgtctttggaaacactgtgataataataagtaaggctttccttctcctgaagtctctttttcagattttcacacttatgccagtctaaaaattcctcctgttccgtttccggaataaaggtctctacataccgtcttgtaaattcatcataatcagcaaatattctgtactcctctccgacgatttgttttgcgttcgtattttcaatcagccgcagaatttcatattttccggaattcagttccagccggtataatgatacatattccgtgaacagtttctttaaaacatacatatcctccgatgacatatcctgttgtatattcagttgtaactcttctttctgtgttggcataatatttctcctcatagaatacatccgtacataccataataatattatacactacttctctgagaatgtgtcaatgtaatatttatttacgcacaaatgttaaccaatcatttgactgatgttgactttctcctttcagtatgttaaccttttgactatatcagttaacaagtgatttatactacatataaaggaaggtaacaccatgatttcagaaattcacgcacacgaagatcccattttaacacgagaagaagccattgaaattcttaatactcctgatgatcagttagatacgctcatcgaacgtgccggaattctccgtaaaaaatataaaggaaaccgtgtcagcattcatattctgaccaatgtccgcagcggcaactgtactcaggactgtgcttactgcgcacaatcctgccgttctgatgcagacatcgacacttacaaatgggtagacgacgacaaattatataatgataatgattttgtaaataaatatcatctttcccgccactgcatcggattaagtggtatgggattcaccgatgccgatattgaacagcttgccgggcgtatccgcaagatgaaggaaaccggaacccatctctgctgctccattggattcttaaccgaaaagcaggccagaatgttgaaagatgccgggcttgaccgcatcaaccacaatctgaacagcagccgtaattattatagtcatatctgtactacgcacacctttgaccagcgtgtggaaaatatacatatgcttcaacggatcggatttgaaatctgcagcggtggtatcatcggtatgggagaaagcaaagaagatgtggtcgatatgcttttggaactaaaagagatcaatccggaagctcttccgatcaacttcctgcttccgattccaggtactcctcttggcgatcaggatatctccggtcttacttatgaatatggaatgaaggtcctctgccttgcaagacttctggtccctcagtctgacatccgatgtgccgcaggtcgtgaggtgtattttaaaggacatgaaaaagaattattaagtgtggtcgactccatctttgcctccggttaccttactgccggtggacagggaatcaacgatacaatccagacgataaccgatgccggattcacttacgagatagaatctgcgtaattgggatttatttaattcagaaaggcacgacgacccggacctgcataaaaagtaggaagccgttcctgttcaggttccgtcggtgggaaatactaaagcgtcaaaattatgctaaaaacgggcttccgaaatttgcaactcgccattcggctcaaacaggcaaatttcgaaaacccaacgcataattttgacgcttaactatttccaacaccttctccacattcactggaacggcttcctactttttattccgtgggtatcaaatgccttacgaatgaaatgacaaatgcgtaaccgtagtggtctccaccgggttacacttccgggcattttatttattaacattcgctgccagtcacgacttgaaggaaacaat

SEQ ID NO: 2878 - DNA, 93868 bp, Unknown
  gut microbiota DNA sequence
cacatctgcttcctcaccaccatatactcatccccattccggtaataaggacactgataatgctggtcagatataagacgcatatattcatcttcatccatattgatatcgcacatataactttcataatcttcatcgtatgtataataagtacagctttcacagctattctgagccatcgtaattctcctttttctgatttgataattgaatttctctgtttttcatcgattataacatatttttccgatactgtatgtaaaaaagagcataaacattgcgattacaggttgcccctgctttgttatccatgttatattttatgtgatatttttatcaaactattactaaaggaaagggttattatggattcaatgtttaacactccgcaggaagttgtacaggccaatatgaacggtgctgtaaaaaaagctgcgacttctaaaaagaaagtattctttatgggaatcatggctggtgtctgcatcgcactcggtgctcagtccagtaatgttgccatgcatgatatttcaaatgtagggcttgcgcgtctggttgcaggatgcgtcttcccggtaggtctgatgatgattgtatttatcggaggagaattgttcaccggagattgtatgatgacgatggcatgtattaagagaaagatcagcgttgcttctctcatccgtactctggtaattgtatatttcggaaatatggtcggtgcagttgctctcgcgtatctggtatatctgtccggacagtataattacaccaatggtgctctcggtgcatttacaataaaagtagctctcggaaaagtcagcctgtcttttctgcctgctctgatctccggaattttatgtaacatcctggtatgcgctgcagtattgatggcttctactgcaaaagatattgccggaaaatccctcgccatcttcttcccgatcatggcattcgttatatccggcttcgaacactgcgttgcaaatatgtattatatcccggccggaatctttgcttccatgaatgcggattatgttgccaaagcaaaggaattatacggcatcaccggaagtcagattgcttctttgaactgggaaaatttctttcttgtcaatcttctgcctgttacaatcggtaatattataggcggtggatttatcatcggcggcttatttttctatcttcacggaaagaactgtaaataaagataaaaaaactgcaattgataataccgttataacaatattatcaattgcagtttttttataggtcaaaattaacaggagacatagctttttccagttcccggatcatctctaccagcttttctgctgtcacttcaattccaagtctagaactattaatacacagatcataattatgtggtctgccccagcttcttccggtgtaataatcataatatgcttttctgtctttgtctttctttctaaccagcgaagttgccgctttctcgtctatggaaagctgttccatctttctctgtacacgccactcaaacggtgcagctataaacaggctgatatgatcaaggtttgcctgttccagtatgtaatctgcgcaacgtccgacaaacacacagtttgctttttctgccagctcccggataatagaactgtatgcctgatgcagtgtatcattggctgtcattccgttgagttcctgattcggcacatcataccacacctgatgcagccatggattatgttttttctcatccgccttttccagaacttctttgggcattgcaacaatcttttctgctgccttgtcaatcagatccctgtcatataattccatccccagtttttctgcaattatttttccgatttcatgaccgccgcttccaaattctcttccgatacaaataatcataacacttcctccttttcgcaagtatattctgtcttgtatactttaactatagctctttttttcagatcataaaaccaacaatccagagaaaatgtctatttatatccattttattcactcataaattcttccgttgaaaatcgtcttatccatcggccgttcttcacctgagttcctgatcaaaacttaccgctgcggcctccatgactcttaccggaagatccggtatgcacagaacttccaccgctttcctgcttccgttcgatctttcttgttgttacgacacggttcacaaagtgatccgtcctgaccgtcagatccaggctgcccgctttttcatattcggctgccgttacctgggattttacggatttgagttttgtttttttgatcattgccattacaaatgcaatcatggcgccgatcagcagatctcccgctatccaccatggtgataccttctttttcggaaggtgccccgtatcatacggctctcctttctccgcctgtgtcagaaaatcatcacacaacgatgtatatttcgaaaatgcgtccagatacgctccgtcactcagatctggtacgaactggtcttccatgtatgcaagcccggcatccgtaaacgccgtgatcgcatctccacttgtagatatattccattcccggtcatccattgccaccagaaacagaatcccactgtcgttttctccatacccatagccgttgtcatcataataatcatctgcatattcttccacggtctttccattcagagaatccacagtcactatgatcacgtcacactcctgctcctcgctgactgtatccaactgctgattcagttctttttcttcactgtctgttaggatatctgcatcatctaccagccttggcagttcgctgccagccggtacatcttctgcatttacattctgaactacgcatagtagaaacaggagaactgccacgatcataccggatatataccgtcttgttttctttcgtttcatgtcttttctccttttcttatatcagaaccgtcagccacatcagtgcataaagtatgactccgatcaccagtcctctggatacaacatacttccagaatgcgcctttatctgccggcagatctcctaccatctttcccgtctgtccgttcatggcaaatacatacttttgatcccgccaggttgtatttaatatccacaccggatacagtgcatatttctgagatgccttttggatcttcacattgtctgaaaccggttttacgatcgaatagcctttcactgtgtcccgaagttcccgctttatgcttgcctttgcacgtttttttgcccgtttcttacactcatctgcttccacatcataccgttctgccacataacctgccagatacggatctttgaacggcacagcatctttgaaatcgtatggttccagagattccatcagatcatcttccatcttccttgatccgtcttccggaatatgctcgaatgccatcgttcctccacgctcaatcttgaagaattcatgttctgtatattctacatcaccgctcatccatactcttgatcgttctgcatcataagtaaccagtgcatttgtctccatatcaaacagccagaatggtacataaattcctacaatctcatcaatatgattttcctctttaaaaacagacggtacaaaagcttttccttccagatgcttctggtaagccgcctttgccgctttcttatccagcttaaacggaatgacatagtccggttttaatccgccttcaaactgcccttttagtacaacacggttcccgcagaacggacaggttgttgctccggtcgtcttatcggccgtaatctctcctccacaggattcacagatatatgtaacaaaagtgctttctttcgtgcttttttccgtctgtccgctttttttgtcctcactcgtctgcgattcattcagtgcttcatattcttccaccgaaatctctgtatcacagtaaggacatttcatcttctgggaagtactgtcgaattccatcgttcctccacaggccggacatttatattcttttatagcagacatatatactccttatctgagtctcatccaatcgtaattcttaagcaaatggtttgccgcagtttgtacagaatttcccatgatttacagctccacagctgcaaatccagttctccggtgcctgtggcttcggacttccacagttcatacagaactttccttcattcaaagtgccacagttgcaagtccagcttccggtctgttgctgtgcagactgttcctgtgcagccatctgtcttgcctgttcttcctgctgacgtttctctgccccctggttataaagaccctgcagattcgccccgccattcataccggacgccatattcatacccatgaagcccatcattgctccattcggattacctgccgcactcttcattgcctctgcctgcgccatgccaagcgttgcagccatcatactcggatctgtatacatagcagtattctgtgcctgcttgatcgcttctgcatcctcatccttgatcgtgaccggattgaatgcaaccgatacaactgagattcccctgagttctgaccatttcttcgtcagaatctcattcatcgcatcactgatttccatcgaatgtgccgggatctgacttgggcggatctcaagctctgcaatcttcgcaaatgccggctgcagggcattcacgaattccgtctttaactgtggagcaatctggtctttctcatagcagtccgtcacatttccgccgagacttgtatagaataacagtggatctgtgatacggaacgaatagattccgttacagcggatctcgatatctttatcaagattaattcttttgtctaccacacggaaccataccggattcgccgtgccgaatttattgtccgtaatttctttggtattaaaataatacactctctgatctttcgccgtatctccgccgaacgtaaatcgtttcccgatcgtctgaaaggtcgccttgatcccttctccaagactgccgcaaaaaacacttggttccgaagacatatcatatgtgtattctcccggttccgcacatacttccacaatcttcccttgatccacgatcatcatacactgcccgtccgccacggcaattccggatccgttcgtgatcacattatcgtgtccttttgtgttcgatgaacgcctgtctatacgtttttttccgcgtaccatcaacgtgtcattgtctaatgaatcagagtaaaagaattctttccactggtctgccagtgttccacctgctgcgcctgttgctgctttgataagtcccatatatttttcctcctttatctatctctttttcacaagctttactaccgtctcgatatgatcgcagaacgggaagttatccaccggctggatcttcattgcctgatatccgtttcccgtcaaatatttcagatctcttgccagtgtctccggattacaggacacatagacaaccctctttggcccgagctttattacagaagaaaggaacttctcatcacttccggctctcggcggatccatgaataccacatctgctttttggttcttcgaagccatatctaccatgaatcttcccgcatcacctgcatagatctcggcattcttgatgccattttcttttgcgttgattctcgcatctttcaccgcatctttgttcagctctactccaatgactctctttgcattcctggctgcaatcagaccaattgtaccggttccgcagtacgcatcgatcaccgtctcttttccggtcagttccgcatagtccatggctatattataaaggatctccgtctgtacaggattcacctgatagaacgattttggagaaatacggaacgtacagccgcataatctgtctttaataaatcccggtccgtagatcggcttttccttttctcccagcaccatactggtctgcttgttattcacattcagtactacggtcgtaatctcgggatgtacttttctcaaagccttcacaaagttattctttgatggcagaattggcgatccaagcaccagaacgaccataatctcaccagtctcaaagcctctgcggatcaatacatgtctcaaaagtccatatcctgtatcttcattatatgtcttaatcttaaaagacggcagaagttcacggattgtacggatgatctcctgacttttcttatcttcgatcagacattcttccactgcgatcacacggtgcgttccttctgcatagatgccggatatcatatttccttttctgtcatgatcgaataccgcatgtactttatttctataaaaatatggatgctccataccgataatcggactgactttgcaaaagccgcccaataatttttcttcctgcttctgttttcttttcagctgttctttgtatagcatcttctggaactggcagccgccacattttttatcgattttacatgcagaagtctgattccgtgtctgctttttatttttctgtactttactcttctgacctaattgcccagcgcattttcgtgcatttcgcacggctgttgcggaagcattcttctttggacggtcggatgacgtcttttgcgatctcactgtacaggccctcctttttccattgtttgaatgatttctttaccagacggtcttcccccgaatggaaggtaaggattgccacttttcctcccggttttagcacacccggcagcttatccaggaaatcatacaatacttcaaattcatgattcacatcaatacgaagtgcctggaatacccgctggctcgacttacgtattgcttcttttctttctttttccggaataaatgcaagtgcctctccgatcacctggtgcaatcccgttgttgtttcaatctttccgccttttcggatcttttccgtaactgcttctgcaatctcttctgcataaggttcatctgcattttcaaccagcatccctgcaagttcttctcttgaaatgtcatgcagccgttctgccgcactgattcctttctccggattcatccgcagatccagaggaccttctgctttaaatgtgaatccccggtccggattatcgatctgcatggatgacacaccaagatctgccagtacaaaatcaaattttccggcttcttttgctactttgtcaatattagcaaagttctcaagctttactgtcaggatgtctgatccaaatcctttttcctccagacgtttctttgtctttgctgattcgatcggatctacatccagtccgtagatatgaccctctccctgcagtttttccagcatctttgaggtatgccctccatatccaagcgttgcatccagtccctgctgtcccggctggatatcaaaaaagtctaaaatctcctgtacacagatggaaatgtgcattcctgccggtgttccgcctttttggatcacctttgaaatagtatctgcatacttttccggattcagttctttatatttttctttataatttctcggatgtgttccggaatatcggactctccgtttatgtttcttctcttgattttcctgattctccataatctctctcccattttatcagttgttccggtacatctacatcccggagttctgcttcttctgtctcacagagcaccacatcttctttatgtccacagatgatctgttttccgcctttatcaccggaaagtctgcacaactcccggaaaaagcacgaatcccataatacgggattcccggttcttcctttccatccggcacatacaatctttcccggatgcatcttccccatctcaagcatacgggcaaatgtcccggctgtcaatcccggctggtcacatacgatgaacatagccccctttaaccccggattctcatctaatgctctctttaatcctaacttcagcgaatgtgcgattccaagatccggctccgtattctgtaccaccagcatcccctgtgtttttgccgcattctctatctcttcaaatcttgttaccactacctgtgtacacaatggaaatgcatgcattttacgaagggtatgttcgaacatctgccctccatccagtttctccagcagcttattgttcccgtatcggcttgactttccggctgccaggagaatcatcgcataatctttatctgacaggcgtgcttctactgtctttaccacggaactgccaatctcatttgccttatccgagatcagataacacaatttcttgtcctttctcggatccacatctccaatcttcagacccttttttacctgcacgccttcctgtaacatcccccggatcacaccgtccaactgagaatagaccggttttcctccggtcagagccagaagttgtccttttcggacgacatccccgatctgtgctttcggctccatccgtccggctgctgacgccctgatcagacgttccagcgcatagccgcccacatatcccggaatgccggtattgggaatcggctgtccgtcatagatgatatccgcaagtgttaatccacgcattgtctctatgacagcatggacatcttttcccgctataaaccccggtccgagaccgatcacatatggtgcatctgcccggctggttcccgtatttctttttgcaagaattgcatccacaagtacatccggtctgaattctctccggatctctgcctccgggtctacgattacggcaatcttatccgctgccagtaccctcctggcttcctgataattttccacaagaattccttctattccttctacttctatcctgccttcgtataccgcccgtgacattgcaacttcacgtctgacggtaagcggcactgcaatctccgtcatgatcacccggaatcctgccctgtgaagtgccactcctacacccgtagccagatctccggctcctctgattaatactttttttctgtttttatacatttctgacatagttaccatctttctttcaacggaatcaggtccgataccacatgcactctgtggatctgccccgggcattccatactatctgcatgcctgtctgacaactgctttacgatctcttccgcaagttccactgctatttttttctgctccttagtatctgcctgattcagtatcacctgatattccatatcatccgtcacgtattttcgtcccgcactctgacttaccgcaagtgtgacaatatcttccggacacagaatatcttcttctgtctttccgagaatcttcccggtctctttcacccggaaacaaccttctttcagcttctttccaaccgcactcatcccatatacattcaaaacaatatctgtctgctcacagatcaccggctcatgttccgcaggggttttaaccggcagacgcttcgctccgtctgcctctagaagcagtacacctggttcacggctgatctcttttagatattcttcttgaaaagatgcaagcttcccatctgttgtctctcttcccatccatacaacaccatattttatcataatctgacggaacatttccaccgaaggttttcccagaaaatatccagcatcacatttttgtatatgagttgttgtagaaatcgcacatggaatttcggcattccggcattcatccataagcctgcgtatcactgtcgtctttccgcctccgccgacaacggataccgtcttatgaaaattttctttaaaaattccaatagcctggcataaactgccaggctctttccattcaccatttatataacttattatcatataaggattatttctcctcttttttctttgcttttggaagggttaaatttaacacaattgctacgatcgttgcaagaacaaccggagattttccgaaaattgttgtcatccattccgggaactgtgccagtgaagcatttgcctgtgtcacacccattcctactgctactgcaagtcctacaactgttgtattgcggaaatccattggctctgtcgtgatcagtttgattcccgtcattgtaatcgaagcaaatacagagattgtcgcaccgccgagtacacaatacggaattgtcgtaagcagagaagaaaacttcggaatcaatcctgctgccagtaatattgctgctgccagccccattaccacacggctgacgacctttgttgttgatacgatacctacattctggctgtatgttgcagtcggaagtcctccaaagaacgcacagaaaatgttactgattccatagcctacaattccacctgtcagttcttcatctgtcggcatacggtccatagatcctgttgttgttgccgaaaaatcaccaattgcctgtactgcattgatcgcaaacagaattccgatcgcaacacatgcagatggttcaaacttgattccaaaatgcattggtttcggaagctggaagaacgctgccgatgacacagatgaaaaatctaccattccaaagaacaacgctacgatatatcctgcaataattccgatcaggatggatgccagtttccataccccttttccgtaatgattcaatgctgttacaatgatcaatgtaataatcgcaaccacccaattctgccatgatccataagtcttgctgctcgcacctccggccatataattaattgctgtcggatacagagaaagaccgatggaaaatacgaccgttcctgtaatcagcggcgggaagaatttgcggattctcttaatattcaatcccaccagaagtgcaaccacacctccgataatctgtgcacccagaattgttgcaatgtcaaaatcagacgcaattgcctgcatacttggaacatacgcaaagctgattcccatcataaccggaagtgccgaaccgatccggaaattctttgtttttataaatggaaacaattgcagtaatgtcgtcagtgccgacatcaccagtgctgcctgtattaagatcacggaatcttcctgtgaaattccggccactcccgcaacaatgatcgatggtgttacacatccgacgatcatcgcaagtacatgctggattgcaagtggcaaagcctgtccgatagatggttttccataaaaatcaaataatgctttgtccatctgttttgcttcttttgtactcatatatatcctcctgtaaatttctttcgaacgcatggcgattcatattattttcaacttaaatattatatattttttcttcttttttgtgtagtcctgcagttattgaatgttttaataaaatcttataagctacagttattatagctattacattccgttatgtatacattaaattttatcatgataaagtgctgaatttcatggtacaatgacagatagagactaaagacaaacggaggaatgaacaatgggaattttgtctaatattgaaccaaaagaagtattccattacttcgaagaattaagtatggtacccagaagtaccttccacacaaaaaaaatcagtgatttttgtgtggaatttgcaaaagctcacaatctggaatatatccaggatgaagtgaacaacgtaatcatcaaaaaacctggtactgccggatacgagaacagtgatccggttatcatccagggacatctggacatggtcgctacaaagacaaccgacagtgatcatgattttgaaaatgatcctttagacctttttgtagatggtgatctgattggggcaaagaacaccactctcggtggcgatgatggcatcgccgttgcttacgctatggcaatccttgccagcacagacattccacacccaccgatcgaagctgtattcacaattgatgaagagatcggtatgggcggtgcacatcacctggatacatctgtattaaaaggaaagatctgtctgaacattgattctgaaattgaaggtgttatgactgtcggatgtgccggcggctacatttacgataccttcatcccaatcgaatggagtgaagaaaacggaacaaagatgacgatctccatttctggtctgcagggtggacattctggcgcagaaatccagaaccagcttggaaatgcacacaagatcatgggacgcgtcctgtatgctcttgcaaaagattacgacttcaacattgtaagcacaaacggcggaaatgcagcaaacgtaatcgcacaatataatacgactgagattattgctgaccctgcacaggctcaggctatcgcagatgctgttaccggactggaacagacgatctccgctgagtttgccggacaggaaccaactttatctctgaacgctgttttcgaaggcgagactgccttaaaagcatttgacgcagatactaccgcacatgtaatcggattcctgtatggagcaatcgatggtgtacaatgctatgaccgtgcgttccctacagctgtagaatcttccctgaatacaggtatcgttgaaaccacagaagatacggtaaagatcaaattccaggttcgcagctccgttgctaccaagttagatgatatgcgaaacaaactggatcttgcaacagatcttgcaggtgcttcccgcgaaatctccggtgaatatccggcatggagctacaatgcagattccgtgatccgtccgaaagcaattgaactttataaagaaatgttcggcaaagagcctaccgttgagacaacgcacggcggtctggaatgtggaatcttattcggaaagaagaatgatcttgatatcatttctttcggaccggaactgacaggtgtacatacttataatgaacgcgtacatatcgaatctacaaagcgtatgtgggattatctgaaagaacttttaaagatctgtaaataatccatatctatccagcgttttttatgaatgcaacgtaatattaaaagacagcttttcaaactttcaaatctgaaaaagctgtcttttctcatttttattttattcttatttcacaagaaatacatctgcatttgtcaccccgagcgccgttgcctctgcgtgattatttacatagatgtcaatgtggtttccctgaattgcaccgccgcaatcctcagctgtaaatatatgacctccgatgatcactttcgttccgtaaggaataactcttggatcaaccgcaatcgtctgaccttctactaccggcgttcctgttgctgtaattccgtctgctttattttttactgtttcttccgccgttttatattgttcttccccagttgtcgtgatctgctgttttatctcatcgctgttatcgagattcttcttgtatagattaatatacattatttttgattatacgcttcctgcttttaaatttccaccctgttattgctttgcttttatcattttcataaaaactcataaaaatacgctgtcttattactaaaatttttggtatctgcacagcaaaaatgcgtctgaataagtttaaaaaccctactccgacgcatccttgattttcttattttctttcgttattctcgaatattacatatccagaggatattttgcagtcagctctgcaaccattcctttgactttttcaatattgtcttcactttgaagtaccagtgcgatgcactctgcgatcacatccatatcttcttcttttaatcctcttgttgtaactgcaggtgttccaagtctgacaccacttgtcacgaacggatatcttggatcattcggtaccgtattcttgttacatgtgatgtgtgcggcatccagacgcttttccagttctttaccggttacctcttcgcctcttaagtcgatcaacatcaggtggttatctgttcctccggatatgatcttcacgccgcgatccatcagacctttgctgagtgcctgtgcattcttgatgatctgtttctgatattctgcgaattcaggctccagtgcctctttaaagcacacagcctttcctgcgatcacatgctccagtggacctccctgaatccccgggaatacagctttattaaagttgaacttatctgctgcttcctgattgcaaaggatcagacctcctcttggtccgcgcagtgtcttatgtgtagtagttgtagttacatctgcatacgggatcggacttggatgaagtcctgctgcaacaagtcccgcgatatgtgccatatcgaccataaggtatgctcctacttcatctgcaatctcacggaactttttgaaatcaatgattcttgcataagcactggctcccgcaatgatcatctttggtttttctttcactgcgatctcacggactttatcataatcgatcacgccttcgtcgttcactccatatgatacgacgttgaaatatttaccggaaatattaaccggagaaccatgtgtcagatgtccgccgtgatccaggttcatacccataactttgtctccgggctccagcatcgcaaagaatactgccaggtttgcctgtgcgccggaatgcggctgtacattggcataatcacaaccgaataacttctttgctctttctcttgcaagatcttccactacatccacacactgacatccaccataataacgtttgcccggatagccttctgcgtatttatttgtaagcggacttcccattgctgccatgaccgctttacttacccagttctccgatgcgatcagttccagatgcgaattctgtctctccatctcggcctgaatggcatctgcaatttcactgtctgcttttttaatttcatcaaatgcgtacatacttgagtcctcctggtttgttaaaaatttgatttatttaatatgatagcactttaccacggtgaatgccagcatttttttgtatatttttcaatacctgtcagatttacagaacctgccgtcaccggttttccatagatacttctaggcaaaaagaggaaacccctgatgaaattaatcatcaaaggtttcctttaatttatccataaatccttttttctttttacctttatgctcttccgtcttgtcactcttttctgttccaagagaattacctgtcagttcatcgaatttacgaagtgcttcttttgcttcggcacttaagtgttccggtgtctggataacaagcgttacataatgatcgccgcgaacctgtgcatttctaagagatggaactccctttcctttcagacgtacttttgtatcggtcttggttcccggttttacagtatagattacttctccgtctaccgtcttgatacggatatccgcaccaagcgccgcctgtgcaaatgtaatcggtaccgttgagaagatatgcatatcctgacgctggaagatcggatgtcttgataccacgacctctaccagaagatctcctcttggtccgccgtttacacctggctcacctttttcacggatacgcacactctgaccattatcaatacctgccggaatggatacggatatcttcttcttgctggctacataacctgtaccgccgcaatccggacatttttccttaataatcttaccagttccctggcaatctggacaggtctgtacattctgtacagttccaaagaaagactgctgtgtatatacaacctgacctttaccgccgcatttcggacaagtctccggagatgttcccggtttggcacctgttccgttacatttcggacatggatcttttaatacaacgtccaattctttctcgcatccgaatacagcctcttcaaatgtgatcctgacactcttccggatattcatacctttcattggtccttggttcgcacgtccgcctctgcgtccgccgccgaacagatctccgaagatatctccgaaaatatctccaaaatcagcaccgttaaaatcgaatccgccatatccgccgcctgctcctgcacttccgtcaaaagcagcatgtccaaactgatcatactgacgacgtttttccggatcgctcaagactgcatatgcctcagaagcttctttgaacttcttttcagcttcagcatcacccggattcatatccgggtgatacttcttggcaacctgtctgtatgcttttttcaaagttgcttcgtcagcatctttactgaccccaagcacctcatagtaatctctttttgactctgccatttcctattcctcacttaatgttcttagacttctttgtaatctccgtctacgacatcgtcgccctggaatccttctggtgccggacctgctcctgctgaagcatctgcctgaggacctgctccctgagctcctgctgctgcaccagcctgctcatacatctttgtgaaaagcttctgagcactttctgtcagtttttctttacctgctttgatctcagcaacctgctcgtctgtaagagtatctgtatttgctttttccagtaactctttcagagctttgcagtcagcttctactgctgctttatctgcaccgtcaagcttatcgccaacttcctgcaaagctttctctgtctggaataccatggcatcagcttcattcttagcatcaattccttctttacgtttcttatcctgagcttcgaattcagcagcttcttttacagctttgtcgatatcttcatcagacatgttagatcctgctgtaattgtgatgtgctgttcttttccggttccaaggtcttttgcagatacatttacgataccatttgcatcgatatcgaatgtaacttcgatctgcgggattccacgtggagccggtgcgattccgtccagtctgaactgtccgagggatttgttatctcttgcgaactgtctctcgccctgtactacattgatatcaacggctgtctggttatcagcagctgtagagaagatctggctcttctttgtaggaattgttgtatttctctcgatcaaacgagtagctacgccacccattgtctcgatagacagtgacagtggagttacatccagaagaaggatgtcgccggcgcctgtatctcctgcaagtttaccaccctgaacagatgctccgagtgctacacactcatccgggttcagagatttgcttggctctttacctgtcagacgttttacttcttcctgtactgccgggatacgtgtagatccaccaactaacagtacctgaccaagttcagaagctgtgatgccagcgtctgataatgctctctgtaccggctcagatgtcttcagtacaagatcatgtgtcagttcatcgaattttgctcttgtaaggttcatatcaaaatgttttggaccttcagctgtagctgtgataaatggaaggttgatatttgttgttgttgcagatgaaagttctttcttagctttctcagctgcttcttttaatctctgaagtgccatcttatctgtagataagtcaacaccctcctgtttcttgaattcagcaatcatgtaatctgtgatcttctggtcgaagtcatctccaccaagtctgttgttaccggctgtagataatacttcgataactccgtcaccaatctcgataactgatacatcaaatgtaccaccaccaaggtcatataccatgatcttctgttctttctcgttgtcaagtccatatgcaagtgctgctgctgtcggctcgttgatgatacgttttacatcaagaccggcgatcttaccagcatcctttgttgcctgacgctgagcatcgttgaaataagcaggtactgtgataacagcctctgttactttctctccgaggtatccttctgcatctgctttcaatttctgaaggatcattgctgaaatctcctgtggagaatatttcttatcttcaattgttaccttatagtcggttcccatctctctcttgatagaagagattgttctctctgcgtttgttactgcctgacgttttgcaggttctccgacaagacgctcaccagtctttgtaaatgctacaacagatggagttgttcttgcgccttctgtgttggcgataactgtcggctgtccaccttccattacggctacacagctgtttgttgttcctaagtcaatacctataattttacccatgataatttcctcctgtattattctttattctgataattgtgaatatgcttgtttctaatttgctacttttaccatgctgtgtcttacgaccgaatcacggtatgtgtagcctttctgaaattcttcggcaacaatattttcaccaaagttttcgtcttccacatgcatcactgcgttatggaaatttggatcaaacggctgtcctactgcttcaataggcttaacctcgattccttccagagtggtaagcagatgtttatacaccttctccattccctgaacgaacggatcttctttgtcttcttccttcactgcatccagacctctttcaaagttgtctacaaccggaagaatcttttctatgatatctttcgctccaatttcatacatctgagacttttccttttctgtacgcttgcgaaagttatcaaactctgccatctgacgagtgagcttatctgtcagttcttctatcttctcgtcctttttatctttctttttactaaataattttttgccagttttcttttctgtatcctctttggcgtctccgcttcctgcttcttcggaagtttcttctgtctcttccgcttcagcttcttcagattcagtctcagctgcagactttttagcttcttccacagcttcttttaccatatcttcctggcttttttcctgcttattctccaagggttattccacctttctatcattcttatgaaacatctcatccagttctgtctggagacgcttcatagattttaaaacatgcgcataatccatacgtttcggtccgataattcctatcgttcctttcatcccatcacccagttcatacgttgcggttaccacactgcagtcccgcatggtctgtaccggcgtctcatcaccgatatatacctggattccggtattgtcttcctttgccagggtctgggttactagctcggataactgctgtttttcttcaaatgcactgatgatctcctgtgcactctgattatcactcagctccggatatttaaaaatgttcgttgcaccgcttgtataaatctgcatgtcatcatccagatgaatggcatccgcaactgcatccagaacatatccgactacctgactgtggattcctgcctgctctttcaatctggcgatcagacccaggttgatctcttcaatcgccatgccgttgagcgttgtattcagcagcatgtttaacttcagcagattctcattactgatcggttcgtcaatgttgatgatcttgttcttgatcacattgccgcccagtacaatgactgcgatcacctgttcctcatctaccatagacaactgaatgaacttaatcttattcgaattgttcatcggagtggaaaccatcgttgcataatttgtattcgttgcaagaacccttgccgcctgcttcagaagctgatccatcttgtcagccttatcaagcatctgctcctgcatctcatttaattcctgctctttctcctccatcagcatgtctacatagagcctgtatcctttgtccgaaggaatacgtcctgccgacgtatgaggctggatgatatatcccatctcttccagatcagccatctcattacgaatcgttgctgaacttaaattcagatccgtatatttggaaattgttctggaaccaaccggttctcctgtctccagataattctgaatgactgcatgaagtattttcaattttctttcactcagttcttcataatttatcaccggtacctcctcctttcggttttgggttattagcactctttatatctgagtgctaacacctttcgactattaagatagcactcccgcatatttttgtcaacactgtttagatattttttagaaagaggatactccggtcaataaataacatcccggaattactgattcttccgaatatactgcatccactctttaatctccctctcatgcccattctcactcggcacatagaatttttctccggcgatctcgtccggaagatattgttgttctacgtaatggtgcggataatcatgagcatatttatatccggttccgtgtcccagtttctgtgctcctttatagtgagcatcctgcagatgtgacggaacagtcgtctttgtcctcttcacacttgccattgcatcagcgattgcgatatatgaggcattactctttggggcagttgccacataagtgactgcctgtgaaaggatgatctgtgcttccggcataccgattctttcgactgcctgggacgcagatactgctaccgtaagtgccatcggatctgcatttccgacgtcttccgatgcacagatcataatacgcctggctatgaacttgatatcttctcctgcatacagcatttttgcaagataatacactgccgcatccggatcagaaccccgcatacttttgataaatgcagagatcgtatcgtaatgattatccccggtcttatcgtatttgactacccgtttctgaatacattcggacgcaacatccagtgttatatgaatctttccgtctgccccccgttctgttgtcaggataccaagctcaaccgcattcaatgcacttctggcatccccgccggaaatatctgcaagaaattccaatgcatcttcctctatcactgcctgataacttcccataccttttaccgtgtcatagaccgctctcgtgatcagcgtcttaatatcttcttttgcaagcggctgcaactcaaaaatgctcgatctggaaagcagcgccccatttacttcaaaatacggattttccgtcgttgcaccgatcaggatgatcgtaccatcctccacaaacggaagcagataatcctgctgtcctttattaaatctgtggatctcatctacgaacaggatggtcttcttacggtacattccctgcatctcttttgctttggcaatcacttcttccatatcttttttacccgcagtcgttgcattgatctgggtaaattccgcactggtcgtgttggcaattactttggcaagcgtggtcttcccagttcccggaggaccataaaaaatgactgagcttaatttgtccgccttgatcgccctgtaaagcaatttgtcttttcctataatatgctgttgtcccactacttcttccaatgttgtcggccgcagtctggatgcaagcggagcttccttttccatgttctgctcccgcatataatcaaataaatccattctttcatctccatttagttgaaccacaagagtacaactctaattcattatcaattcatcgactgttacaaattcaaacccttctttctgcaaaatatccactatacgtagtgctgcattcacactagattcataacagtcatgtaataaaataatatcattttcccccgcctgcgtcactactttattgataatttcgtcttcattgtccgttgtccagtccagcggatctatggtccacaacacaggcatgacatccagctttctctccagattcttctgccaaactccaaacggcggtctcatataagagacttcctctccggtaattctggtgatcacttcatttgtcatcaatatttcttcctgtgccgtctcatccggcacccgtgtgatttccacatgatgataggtatgattgcctatcagatgtccttcttccgcttccctctttaccagttccggattattttttgcgttttctccgatcagaaaaaatgttgcttttacattccgctctttcaatccatccagaagctgcggagtccatgccggacttggtccgtcatcaaaggtaattgcaatctttggatcctcttttatcatatttgatgcaacataccgaatggctttttcattctgttccgtatgcatgttatgaactttcaccgttgtcttatcttccacccgcaccatccttgtcacaagaaaacagattccaactatgcaaatgaacaaaacaaatgctttttttctcttcttacgccatttatatattgcagcagattcataatcccgatttaattccatgctgtccccacataccaccatttcattttactatatgcaaagacagaaaattccatgctcatacccttatttcgaacgcatggaattaaaaaaagcgtcagcattctgacgccctacatttattttgtttttatttctttcgttttcgcgatgtcgcttttcttcccgacgcagaaagctttctgacactccatccaaatgttccgagagtctttcccaatgtcaggtattctccgtgagaatatgccagaagtccggcctttcccagctgtagtcttccctttttatccagatattcttctcctacctgaacagcctctacttttgccagaaacatatgatgcgaaccaagttcttttatctctgttactttacactcaatgttcaccggacattcttctatgatcggtgcatgatcaagctttgacgctttgccggccgtcagatgcatctctttccatttgtcgacatcacgaccggaacgtacaccgcaccagtctgttgcctttttcagcttctcggtcgtcagatttactacaaactctccgctgtctttcaaaagattgtacgaatatcgttccggtcttacagatatatacagcatcgccggattcgtacatactgttcctgtccacgcaactgttatgatattcgatctgccggatttatctgcagtacttaccatcacagccggaagcggatacagcatatttcccggtttccagatctgctttgccatgtcttctcccccgcttcctttactgctgtaattcacttaccaaagtcggtatcagctgtttctttctggataccacaccctttaagatcatcttctccgtgttttctttcaggtcaaatgcatcaatgatatactcttttgcccttgccccacagcataacagttctgtcgactcatccagaatgtctgtcagcataaagaacaccatctgcactccattcttctccagtactttcggaagatatggtgtcagcatctcttttactttctgcagttcctctttactcatggaattcaactgtcctacgccaaataccatatcattgactgtaaactgcttaaaatcctggaagcaaatatcttctgctgtctttccggcaaggctgcttcctgccttgaacatcgcctgtgcctgttcttccagattgatacccgcaatcttcgccagttttttggcaatcttttcatccagcggtgtgcaggtcggtgaacggaataaaagtgtatctgaaataattgccgaacacagaagtcctgcaattgtcggcttgatctccacatcattttctttgtacatctgatatacaatcgttgcggtacatcctactggctggttacggaagaacactggtcccattgtctctatatttcccagtctgtgatgatcgatgatctccacaatctctgcttcttcgataccgtctacagcctgattcttctcgttatgatctaccagaattactttcttcttacttacatttaaaaaacgacgtctggatatgaatcccctgaactttccatgtctgtcaatgatcgggaaatcacggtacttcttctttgccatcacttccttgatatcttccacataatcactcatatggaaagaaatcagaggtgccttcgtcataaagcgcttaaccgggacactctggttgatcagtcttgccgcggtaaatgtatcgtgtggcgtactgatgatcaccgtactctgttcatctgcacgcttgatcacttcttttgaaacctccgcattctggcagacaaccatgcagcttacatcaatatccagggcacacatctgtgactctacacggtttccaagaatcaccagatcatccttttcaataaattcctgcatcagttccggactggacgcaccgattgccgctttccctttggtaaaatatccgtgttcattaccggttaccatctctccatccagtgtattcataatgttacggtactgtgtttttgctttggaaaggatcatgttatcatatacttccatataagatgttgcaatatctcctgtggaaatcacaccaagaagttcttcgtctcttaatataggaatggtcttgatattattctccttcatctttatccatgtatctttcatagacacattcggaccgataccatcaatctgatggatatccatatcctttacctgcagttttacattttcaagaagtgtcggtacttttaccccaaacttctgtaatacataatgtgtctcttcatttatctgaccggctcttttggctacataatcattaccggttatttctctttttaaattcgcataggcaattgccgaacagatggaatccgtatctggattcttatgtcctacaacgtatattttttcttcttttttagccatcttttatctttcacatccttttgcttatatccttcaagtattaagcttgccatctttttgaagtttcgtcaacctttatttccatgtatttcgtatttttctttgaacaatattatggttctatgctatactgaaattaatactggagaacatgttatttgcatgttcttactattactaagaagggaattattacactatgagcgaagaattattacacgaacaaacacagacagaagcagctgttacaatggctgaccttgaggaacatttcgatgatgcaaatccatggaacgtagtaaaatcttatatggaaaaaggcacgatcctgcctgtaaaagtagaaggaatcgtgaacggtggagccattgccatgatcgagggaatccgcggattcattcctgcatccagattatctctttcttatatcgaagatctggaaacatatctgttaaaagatattgaagtcagggtcattgatgtagatgaagccaataaccgtcttgtgctctctgcacgtgagatcctacaggaaaaagcaagaaaagaaagagaagcccgaattgcagctgttaaagtcggcagcatagtaactggtacggtagaaagtcttcagaactacggcgcatttgtagatctcggcgacggactctccggactggtacacatatcccagatcagtttaaaacggatcaaatcaccttctgatgtgttaaatgtcggagatgaggtaaatgtaaagatcatcggcgtaaaagacggtaagatcagtctcagcatgaaagctcttgaagaagagaaaaaagaagaagaggaaatccatgtagagattcctaaagctgaggagattggtacaagcctcggagatttattcaaagggttgaaattagattagttgggatttaattcagaaaggcacgacgacccggacctgcataaaaagtaggaagccgttcctgttcaggttccgtcggtgggaaatactaaagcgtcaaaattatgctaaaaacgggcttccgaaatttgcaactcgccattcggctcaaacaggcaaatttcgaaaacccaacgcataattttgacgcttaactatttccaacaccttcttcacattcactggaacggctttctaccttttattccgtgggtgtcgaatgccttacgaatgaatggcaaatgcgtaaccgtagtggccttcaccggattacacttccaggcatttcatttattaacattcgcagccagtcacgacttgaaggaaacaatagataaggattattgtgaatgtggaatgccgttagaaacagttagagagtcagaagcaccgttaaaggaacgaagcgaacgtgtttgaggcgaacgccgagtttgagcgtagttcctttgcttttaggtgattctgactctcttagtgtttcttatggtatggaacctgaacaagaagccttatctattgtttccttcaaggactgagaggccgcttccccagttaataaattaaatcccaattacatccctaccggcttcgccttctccagatctctcagccatacttccgcgcatgcatcactcggcattctccagtcgcctcttggagacagtgccacagttcctacctttggtccgtccggcagacaggagcgtttaaactgctggatgaagaatcgtctgcagaacgtatataaccatttgtaaatggttgcatcatcatattcaccgttaaatgcatatctcgcaatacggtatatcttccccggttcataactgaatctcagcagataatacaagaagaagtcatgcagctcatacggcccgaccagatcctctgtcttttgggcaatctcaccgtcttttggcggaagaagttccggactcaccggtgtgtccagtacatcatacaagacatcttttaattcctggtctttacaggtatccgcataataatgtaccagatggcgtaccagtgtctttggaaccgacgcattgactccatacatagacatatggtccccgttataagtcgcccatccaagagcaagttcagacatatctcctgtaccaattacaattccaccggtctgattggcaacatccatcagtacctgtgttctttctcttgcctgggaattttcataggttacactgtgatcttccggatcatgtccgatatctttaaaatgctgctctactgctgcccccaccggaatctcacgcagtgttgctcccagtttcagtgacatcttacatgcattctgataagttctgtccgttgttccaaaacatggcattgttaccgctgtaattccactgcggtccattccaagtgcatcaaatgcctttgcggacacaagaagcgcaagtgtagaatccagtccgccggagattccgacaaccgcactctttgcatgtgcatgtgcaagacgtttcttcagtcccattgcctgaattgtcagaatctcttcacaacgtaaatttctctctgccatcacacttggaacaaacggtctggaagcaaattttctggtaagttccgtctcttccacatggattgaaaatggaatacggatcaacattctttctttttctgtctggaatgttgtattcttacgtcgctcgcttaacaggcgcttcacatccaattctgtataaatcacttcatttgtgaagcgatcactcgacacaagtgttgttccgttctccgcaataatattatgtcctccgaataccagatctgtcgtagactctccctctccggcattggcataaatgtatccgcagatcagtctcgctgactgtccctcgatcaggctttcacgataagatgctttaccgatcgtctcatcgcttgcagaacaattcacgatcacagttgctccttctcttgctgcaagtgtacttggcggaaccggcgaccacacgtcttcacagatttctgcggagattaccaattcttccatctgatctgccacgaataaaagctgtggtccgaacgggatctgctttccatccagtttgatccatctcgccttatccgctcccggacggaactgccgcatttcataaaactccccataattcgggagaaatgtcttcgtcgtaaggccaaggatctcaccatgattcaaagctgctgcaacattataaagttctccatctatggcaagcggaaccccgataaatataatcgcatccttctcttttgtatattcggctattttaaacagtgcttctttcgatttctttaacaaaatgtcctgcgtaaaaagatcactgcaggtatatcccgttacacataattccggaaatacgataacttttgctccttttgcaacagtctcatcaatcatcttacagatattttgtgtattataggcaacatccgccacacggatatccggagttactgctgccacttttacaaacccgtctctcatgacttttctccttatcgtttacagcgttttaagatatctttcaactcttctacgctgtatttatatgccgtattacagaaatgacattttacttctatatcctgaccgtcatctatcatatcctggatttctttctttccgacactgatcacagccttttctactctttcttttgagcaattacaatagaattttgtcggcattgtacttgtaatttcaagtccgagatttccaagcaggatttccaggatctgctctggtgtttcaccttttttcagatgatccgttacagatgtgatattcttcagattttcctcaatctgactgattgtctcttcctttgcaaatggcatcatctggataatgaagcctcctgcacatgccactgtattatctttatccatcagcaccccaagtcctaccgaagatggcacctgctccgaattggcaaaatagtacgtcagatcttccgcaatttcactggataccagaatggtctgtccggaatatggctctttgagtcccatatctttgataacctggagaagcccgattccaacagcaccgcctacatccagctttccattctttggcggcagcatgacatccggatgatttacataacctttcacatctcccttgctgtccgcagtaactgtaatcccgccaagcggtccgtctcctcttacctgaagtgtcagcatatctgtatcattcttcatcatacttcccatcatagctcctgcagtaagaagtcttcccagtgctgcggttgccaccgggctggtattatgatgttctctggccgcttccacaagttcttttgttgttgcagcaaacgctcttacctggccgtctgctgcggttgctcttacgatatagtcgttcatatatattcctttccttcttctgtttttctatttttattccgatgagttacttctcatctctattatttaccatgctctcttgcgatcacggtgatccgttcactcgtatgcatcggtgctttctttgtatacgcatcataagctgcaacgaatttcagacccgctttttcaattagtgctctgatttctctgagtgtatatgctttctggaaatgactctcctgatactttctgtacagtgcttcctcttcatcctcgcggacaaataatgtcagttcatattcattgatcatcgatgtatgattgtaataattttcccagataaaactgcactcatccctgtcttctgcgattacctgattacccagaatttctctgtacttatattctgtattaaaatcaaagataaagattccctgcgggtccagataattattgaccaggcagaatacttcctgcaattcatttttatctgtcacataatttacacagtcacatacactgacaatagctctcactgttccatataattcgaactcctgcatattctgtaacagatagaggatatcatgtccactctcgatacgcttctccattgcgatttccagcatgtcttcggaattatccaccccgatcatatcatatcctttttctgccagtagttccgtcatgcttccggttccgcatcccagttccagaaccagcccgtctcttattccatattcttttaatctgtcttccagataatctgcccattcctcatatggcacattatccatgaatgtatcatagacctcggcaaaacttgtatatgcctccatctcttcctccttataaatccttgcatatttaacatttctattatatctgctatctgtaaaaaaggcaacgcagaaaatatgaccattagtcaatttaattttgacttcttatctttattttgttatacttatattattgaatatattatttcaatatcttgttcaaatgaattttatataacgaaccaagaactgtagatctgtagatctgtgaattttaagaaggaagtctgattactcatgggaagagtcgaagaaaacaaaaagaaaaaaaaagaggcgctctttcgcaccgcatatgaattatttaccacaaaaggaattaattcaaccgccatttccgacattgttgaaaaggccggtgtagcgaaaggaacgttctatttatattttaaagacaaatatgatattaaaaacaagctgatcgcacataaaacaaaagaactgtttgatcatgctgccgttgcactggaaaattccggcatcaccggtctggaagatcagcttgtctttattatcgatgacatcatcaatattctggtcaacaacaagccattgctgaatttcatttctaaaaatcttgtaatgggtgccttaaagtctgctttctggtcagatgaagaagccgacaagatcttttatgaaagatatcttgaactggtagaagccgacacctataattataaagatattgacatcatgctgttcacgatcctcgaactggccggttctaccggatataattctattctctttgaagagcctgtatctatcgaagcgtacaagcctttcctgtaccgtacggtccgcctgatcatccggagtcaccgcgaagaagcttaaagcttcttccggctacaggacttgtcatccggctactgataccgtgcaattatttctttcacggcgtcttctgttcctttcacagaaccctggaccatctccggctttccgccgccgcgtccttctaatgtactgtttaacgttttactgattgaacggacatcttcacttctgcttccgatcacatagcgatacccctcctcgtccgttcctgcaaataccgcacagatgactgcccctttatccagcagttggttcatcatctctctcggaagatttcccgacaaagatccgtcaaatacagtcacaatcttctcatccaccggtatctctgccacacaaaacttcagaagtttctgctgcagttctgcaatctgactcttcatacgtgtctgctcactcttcagtctgccgaccgcttctgctacttcatattctttcgcacacaacatggttgaaatttcttttgtcatggcatcctttttctcatagtctctcatggcacgtcttccgcaaagcatcgtaatgcgttcaccgcctttataacttaccatgcttaccagtttgacagctccgatctcaccggttgtcttcacgtgcggagcacagcatgcacatacatcatatcccggaatcttcacgatacgaacctgaccttcaatctcgatcttactgcggtaatccatatctttcaattcctctttggatggatacagaacctcaacttccagattccggtatactgcttcattggcttctgtctcgatttctttcagctgcgctttactgatcggtccgtcaaaatccatggtacaatagtcggctcccagatggaaaccgacattattatagccaaatctttcatgcacaataccggacactatatgttctcctgtatgctgctgcatcttctcaaagcgttctttccagttaatcttaccggatactatacttcccacttccaatggtgctgtcacagaatgaaagatcacatcatttttttcgtgcacatcggtaacttctgtattgccgagaatgcccgtgtcggcatactgaccgccgccttccgggaagaatgctgtctgatccagcaccacacagaaaccatccttcgcttcttcacaggaaattacttttgctgtaaattcggttctgtgactgtcctcataaaataatttctctgtcatttttcctacatcctctccggtgcttcaaatccaagtacgtcgatacaagcttccagtacatccttcgtcactttcagaagcgcaatataactcttttgttttccggcatcttcttctgccagaatcttggtctcatgataaaaacgattgaatgcattggcaagatcataaatgtatgcacagatcttatgcggtgcaagatcctggaatgcattcgccatcacatcattatattttgcagcttccagcatcagagctttttcacactccgcatatgcttcctgtactttcagtccatccaggctatttccctgtgactggtatttattcaggatcgatttgatacgtacaattgtatacagaatgtacggaccggtatttccttcaaaggaagtaaatctgtctacgtcaaatacataatcttttgatgcctggtttgacagatctccgtatttaattgctgccattccgatgagttttgctgtctgttttgcttcttctccctcgatagaatgattttcagagattttctcatacatcttctctgtaatctctgagatcagtgtctccagacgcattaccccgccttctcttgtcttgaacggcttgccatcttttccattcatggtaccgaaacctaagaatttcagttctgtttccgcaggaacgattcctgtcttctttgcagcacggaacacctgtgtaaaatgcagttcctgacgcttatccaccacataggcaaccttgtccggatgataatcctgtacacgttgtaccagtgtggcaaggtctgttgttccataaagagatgctccgtctgatttctggatcatgcaaggaggaatctctttggtatctgtctcttcctgcacatcaatcaccagtgctccctggtcttcatgtgcaaatccttctttcttcaatctctcgatcatatccgggatgtatgcctgggcatcagactcccctttccagagatcaaaacttacattcagattcgcataatttttcttaagatccgataccgatacacgaatgatatgattccagatcgcacgatatcctttatgcccgttctgtaacagatacgtcgcatgcaatgcattctccctgtatgtctcatcttcttttgccttaccgcttgctgtcggatagatttcttccagttcgctgattgtaaatggagcctcttttggatattcaccttcaaacgcttcatcaaaatatggcaattccggctttctttctttcaattcagtgatgatcagccccatctgatatccccagtctccaagatggatatcgccaagaacttcatgccccatctttcttgagatgcgctttacgctttctccgatgatcgccgaacggagatgtcctacatgcaacggctttgccacatttggtccgccataatccagcacgatcatctccggatgttctgtcttctcgattccgagattatccgtctcttccatctgattcagataatctgcaacaaatgactttttcagtctgatattgataaatccaggttttacaacctctacttcttccatacatgcactgtcttctaacagggcaacgacatcctctgcgatcatgaacggtgcttttttgtaagcttttgctcctgccatcgctccgttacactggtattcgcagagatccggacggtttgacagtgttacttttccatacgttctgtcataacctgccttttcgaatgcttctgaaagttcttctgcaatataatcaatgattttcttcacttcatatctcctatattttctataattcctataaatttccatcaaaaatagcaaaaaaagtacacacccgggcggattcgaaccgccgctcccgcctccggagggcggtgctctatcccctgagctacgggtgcgtatacaattactatatgaaattgccttagtaatattaacacatctttgagataaagtaaaggaaatgcatcccacttttcgatcatttcctctactttttttatatttttctttaattttcctttttaaatcttacagcgcaagttttccactctcccggtcataataatatgccctgtccgaaagtacttcttccgcctctacctgtgtctcattgatctcctcgatcatgcttcccagttcttctctgcccggcgcttcgctttcagccacaataatggtctcatgcacactgcttgggatcacaaaaaaattttctcccactacaccggcaatctttctcagacaatccggatagatcagtgccgcagccccatagctacgcatttcattgctcaggatatacattttttctgccggtccctcttccatcccaagtcccagcaattcttcgatcaccgtgcgcatcggtgcaaattcatacggcagtaactcctgggtattcttagaagcccggtaatataaatcttcttccgttactttccacatatccatatgttctgctctgaccatcatggatgccatgccatattcatctagctctaacagtacataataaataattgcaagatccagataacttttatatggaatttcttttaaaagctcctgattctcctctctgcctatcagacggtatatgatcttatctttgacaaattcatagtcttttaccttttcaccgtcctcccatgaattctgaaaccggattttctcatataatccgacaatatcttttgcaatctgttccaacggataccccatccggaactgatgaaaatactcttccagataaatcgtcggtgaaatattgattcctttttccgaaatcataataccgcttctcctcacaccattattcttcacattggtatgaatgcttactgttttttcttcttccacctctttctttacttttgtctctactgcatggataaactgaaaatatgtcataaaagctccttcctatccagcaatatacaaaaatcatcttgaaaatctgcggtgatattaccgcctgagataacagaacatcttttgaattgtttctgaaatattatggtaattagattataaaaaagccctgcacaaaatgcaaggctttttataattatttaatttagaattcttatgactcttatgctcttgagaggtatgctcctgtacgggtatcaatcttgatcgtctcgccctgatcaacgaaaagcggaacgttaactttcgcacctgtctcaacgatagccggctttgtagcacctgtagctgtgttaccttttacacctggctctgtctctgttacaaccagttcaacactgagcggcggctcgatcgcaaatgcatttccctgatagaagctgatagatacttcttcgttttcttttacaaacttcatagaatctgctgcatcatctgcgctgatcataatctgctcaaatgtctcgttgtccatgtagttatagaactcaccatcgttgtacagatactgcattttctttctttcaatgtgagcctgttcaaatgtctctgtaggacggaatgttgtctctaccacaccaccgtcgataatatttttcatcttaacacgcacaaaagctgcacctttaccaggttttacgtgcatgaaatcaataacctgacatacttttccatcaacttcgattgttacaccattacggatgtctcctgctgaaactttagccattaccttatcctccttaaatcgcgtatacacgcttacgtaatttcatctcatattattctataatacatgatattatttttcaacctttttttcgtgtctctgactcttcttgtagaaatgtaacacaattttttccagataacgcttcaaaacaatctggatttcttcctttggatgtatcggttttaccagaatattcgggattccggcacgttttgctccccatacatctgtaaaaagctggtctccgataaacacagaactccttctgtctgttcccataatctccatcgccctgagataattcctggttgatggcttgtgcgcattataaacatagtccacctggatatctttattgaacatctctacccttggcttctggttattcgagatcagacagcatcggaatccgattgctttcagtctggcaaataatgcctttgctctctcgtccgccggtgctccgtgcggaaccagcgtattatcaatatcaaagatcagtccgcgtacaccctcttcatataatttttcaaaatcgatcacataagtagatgctacatactgatccggaaaaaatctatcaaacatattattcttctgactcctgcagatgctgtaccagctcttcacagatctgaagaacggtcttatcatccgtattgattactatatctgctgccgcttcatatttctcacggcgctgctccataagttctgaaatgcctttgacattctttctgccatttaataccggtctgtcattgctgtcttttacacgttcaaaaatcgtctccggtgtagcagtaagaagaacaacttttccgttctttttcatctctgctacatttctctctcttaaggccgcaccaccaccgcacgagattactgcattcttatgcgactgcatctcgatcagaagattcgtctccagatcacggaaatattcttcgccatatgtagcaaagatatccggaatactcatctcttcacgttctgcaatcacctgatccatctctacaatatccatatcaaacatcgtgctcagataatcagaaattgttgactttccagcccccatgaatccgatcagtacaatgttataatcaaagagttttcttgcctggattctcttactgttacgcaagatacatccaaacacatcaaagatttcttctttatatttattttctttcagtttttcttccagtcttctcttctgtttttcttcctgatgcggctgtaagattggcataccatattcttctttatacgccatgatcttttcaataatagaactacgttctaccaaagcgtcaataatcttatcatcacacagagccagctgctctctgtacatttctaaatcgttcattcttctgtactctcctataaattgcaaactattgtccgatatattcatgtattatagcaagaaatatactttcacgcaagattatccggcgtattcctgcatatttcctgcatattccctgcatattccggtcatcaggaaattcctgtactctcactgttcttctatttttcccgcatctgccgttcccattcatgcagctttctcgctgcctccggattctgtttttccagccgtctctccaatcgttcgcggttctttttcagatggtccaggatctccggatgatgcattaataactgctgctcgatcttgcgtcttctcttttcaatcaactgcaggatcacttttttgtctccacgcagattctccggaagttcatccagatgcatttccattcgtcttaagatctcatcttcatccaatgcccccagtgaatgccagtttttgagtttttcttcaaaccctacgtctgcaagcctttccagatccggaagtctatggatctgttccataacctgatggactttcttttccatctcttccaccgcatcatcaccgaacgcccatgcgaattcttctaatgtattctcttcttctgccgggatcattgcttcgtgaactgcatgcactgccgccgggatttccaactgccacggcatctggataaccggagatttctccgattccatactcgtccccggtgttgcaacacctgcatcctgcaatgctgcaagaatcgttcttctgacctttccttcctcgatcagatgaccgatcccaagactgcgcatctgttcatttacattttcggaatgctccgtaatataaaacctgatccctttcttatcaaaattttccgccatcatttccagccggtctgctgccgtaacgtcaatactgttgatcgcagccgcatccacgattacaactttcgtatcctctttgatactgttctcaatgtccgactggaatatctttacatttgcaaagaaaaggttctcactgaaccggtaaatgatcgtatggcgtatcggatatgcattgcggtttctcttaagatcgtaataagcctcttttcccggaatcataccgcggaaagacctcggaggattcgtcgcacgaagtaccactgctacaaaagaaagcagcaatccgatcaccacaccataaatagtacctaaaaataatacactcacacacgcagctacaaaaatatagaattcattacggcttactttaaataagcgcaccgccagatgcagttctactacattcatcagtgccgagattacgatcgctgtcagaatcggaaccggcaggtatccgataaatccagttgcacatagcaatacggctgccatcgtaattgccgctacgacagataccgcctgtgtctttccttcatactgttcattcatggatgttctggatatactgccattcaccggacaacagcctacacatgccgctgtgatatttcccatcgcacaagccaggatctcctggttttcatcaatcttatagccattcttcatggcaaaattattttccgacaacagcgtctccgacatgataaccgctgcgatcatcagacttcttccaagtgcctgcctcaggtcaattcccgcaaaatggaaatgtaccagcttcggaagtcctttttccaccgcatccaaaagtaccacaccatgttcgtctacacgaaagcacatcgttgctgctacacctgctgccatgatcacaattgctgccgggaatttgggaattacttttcctgccatgcgaagcagcagcaacgctcccacaccaagtaccactgacagccagctgatttctttgcacgtctctgcgatatgcctgagcagttccggaagttctccagatccggcctttccgccaaggatcttcggtatctgcatcagaataattgtcagtgcaatcccgctgataaatcctcccatcaccggtgtcgaaatgaagtccacgattcttccggcttttaaaaaataaaacagcagcagccagattcctgtcagaaatgcgatcacaggcacatactgcattgccgcttcacttccgctttcaatcccaagtgataccagtgctgctccgacaattgccgccggtgccgcatcgactccgaaaatgaattgccgcgatgttgagaacagcgcaaagaacagaatcgggaataccgaaccgtatagtccatatactgcaggcagtccggcaatctgtgcatagcccatcgagatagggattgacactgctgccatgatgatccccgagaaaatatctttgggaagatattcttttttataatttttcattgttgaacacaatatatgtttcatgcaacctctccttacgattttataatccgggtataaaaaagagacaagccagctatttacacagtgtcccgtctcttctttctacattttcaacatctgtaaaacaattaacagatcttgcagatccatccttccggagcttcgatgtgtcccatctgaataccggttaatgtctcatataatttctttgtaactggtcccatctcttccattccgcttgggaaacagatctctttgccgtggtcaacaatctttcctaccggagagataactgctgctgtaccgcaaagtccgcattctgcaaagtcgccaagttcatctaaataaacttctctttcttctacttccagtccaagatagtgttctgcaacatacatcagagaacgtcttgtgatggatggaaggattgtagatgattttggtgttacaactttgttatcttttgttacaaagataaagttagctccaccggtctcttccacctttgttctggttgctgcatccagatacatattctcatcatatccttcttcatgagctgttacgattgcatgaaggctcatcgcatagttcagtccggcttttacatgccctgttccatgcggtgctgcacgatcgaaatcagacaccttgatcgtgatcggttttgcgccgcctttgaaatatggtccaaccggtgttgcaaacacacggaactgatactcatctgccggttttacaccgattacagcactggaaccgaacatatatggtctgacatataaggttgctcctgatccatatggcggtacataagctgcattagcctttacaacctgtttaatagcatctacaaatctatcttccgggaatacaggcatctcaagtcttgctgcagagtctgccattctcgctgcatttaagtccgggcggaatgttacgatatgaccgtcttctgtggtatacgctttcattccttcaaaacatgtctgtgcatactgaagtacacctgcacattcactgatagtaatctgatcatcggaggtaagtgtaccttcatcccatgctccgtttttaaaatcggaaacatatctcttatctgtcttcatatagccaaatcctatgtttgaccagtcaatattcttcttctccattgtgactcctccgtcctttaaacaaatgtttgatttatcatcttgtcttattataatactactgtttttaaaattcaagagtgcactctgtttttttatctttccatcatacttatggattcaattcccacacttccgcctcgtacaacttcaatactggcgaattcttctttcataagtttgattactgcatcatttttcgttgccgtctgtacaaattccagcagtacactgtctttgccgtaatcaatgatttttgccttgaatgtctctgcaatctgaaaacattccactttatcatcttttgaacattttcgcactttgacatacagtatttctttcatacggacaaatacatctgtaaaatcgatgaccttgatcacttccaccagacggttcagctgtttcttaatctgttcaaatgtctcatcatcgctgactgttgcgatcgtcattctggacacggtcggatcttctgtcgtaccaacagtcagactgtccaggttataagatttgccggagaacagccctgagatttttgacagaactcctacctggttctctacatataaggaaatccatcgttttttcatagcgttattattcattgttttttcctcctgtcctcttcttcctaacaatctatgatcagatcttccagtgtcccgcccggttttaccatcggatataccagatcttccggatcaatgtcgaattccaggatatatggtgtctttgtactcttcatagcttctctgaatgccggctcgatctcttcttttttcgtaatatggatgccttttgcaccataagcgtctgccagtttcataaaatccggtgtgtaaacaggacattcaacctctccgcattttcctctgcaggctgctcccgagcgcagacatgtcatggaatagcgctttccatagaataatttctgccactgacgtaccattccaagattattattattaaagatacaactgatgatcggcagttcttccaacactgcggttgccagttcctgactgttcatctgaaaaccaccgtctccggagattgagatgaccggtgtatccggattcccaatcttcgctccaatcgctcccggcataccatatcccattgttccgagtcctccggacatcagaagctttttcttctctgtaatctcaataaactgcgcggtgaacatctggtgctgtccgacatccgttacaatgatcgcctcatcaaagatccggttaatcgcctcaataacatcctgcggtgtcatgatcggtttctttttcatcttcagcggatgctccgctttccagtcttcgatcatatccagccattttctcgtctcataaggagtgacatattctaacatcttcgtaacggcttctttggcatctgctacgatcggcacatccacctgcacatttttagaaattgcggctgtatcaatgtcaatatgtacaatctgtgcattcggtgcaaatgaatgcagctttcctgtgattctgtcattgaacctggttccgatcgaaaataacagatcacattcatttaccgccatattacatgcataggcaccatgcattccaagatttcctatatataacggatgtgtagtcggaaccgccccacgtcccataactgttgttacaaccgggacactcgtcatatccaccagtttcgtaaattcttcattggcatgtgctatattgatacctccgcctgcgaggaacaatggtttctttgccttggaaagcatcttaaccgcacgttttaactgtccgacatgtacatgggtattcggcttatatccacggatattcacttcatccggatactcggcacttcccaattctcccattacatcttttggaaggtcgatcaataccggtcccggccttcctgttcttgcaatataaaatgcttctttcaggatacgtccgaggtcttccctgtttctgaccgtaacaccatatttcgtaatacttctggtgattccgataatatctacttcctggaacgcatcatttccgatcaaatgtctggacacctgccccgtaaagcataccagtggtacactgtcgtaataggcagttgcaagacctgtcacaagattcgttgcccccggtccgcttgtaaccagacacactcctgtttttccggttgatcttgcataagcatctgcctcatgtaccagtgctacttcctgtctcggaagaattaccttcgtataatcctgcttataaagttcatcactgatatcgatcgtacaggctcccggatacccgaaaattgtatctacctgttcttctctcagcgcttttaccaataatttatttccactgatctttttcatatactacctccttgaatttttacttttctataaaataaaagaaaagccctaagctgcaagctcagggcgattattgcatctttacagcatttcactgaatatttataaaacattataggtgacattctttggtattgtcaactctttttatccgattcatttactgctgatttttataatgaacttttgcacaatcgtgttattgatcttttttatcactttcccgacaaatttcgttatttttccatctttcacaaatttcacatttaattttaattttttttgtgattttttgtatttttttccaaaaatgtatagcaaaaaaatgcaaaaaattatacaatagatacataagcaataaggaggatatatcatgaaacaaaataatatgttagcgatgatattagccggcggtagaggctcacgccttcacgaactgacaaataaagttgcaaaaccagctgtttcttatggcggaaaatacagaatcatcgattttccactcagcaactgcgcaaacagcggaattaacgtagtaggagttttaacgcagtatgaatcaattctgctgaacagttatgtggcagccggacgtcgttggggattagatgccaaagaaagcggcgtattcgttcttccgccacgtgagaaggcagatgcgaacctggatgtatacagaggtacagcagatgcaatttctcagaacatcgattttattgatacatattcaccggattatcttttggttctctccggtgaccatatctataagatgaattatgacaagatgctgcaggcgcacaaagacaacggtgccgatgcaaccatcgcagtcatcgaagttcctatgaaagaagcaagccgtttcggtatcatgaataccgacgaagaaggccggatcatagaatttgaagaaaagccggaacatccaaagagtaatcttgcttctatgggaatctatatctttaactggaagcttttacgtaagaaattaattgctgatatgaaagatcctgattccaaccatgacttcggaaaagatatcattccgtctcttctgagtgatgaaaaaaaattatatgcatacaagttcaaggggtactggaaagatgtcggaacaattgattctctctgggaagcaaatatggatctgctgagcaaaaacaatgaactggatctgaatgatccgacctggaagatttacaccgaagatgcaactactcttcctcagtacatcggtccggatgccaatatcagacatgcatttgtcaatcagggttgtgtgatcgaaggtgatatccagaattccgttctcttcaccggtgccaaagtcagaaaaggcgcaaagatcatcgacagcgttctgatgcctggtgttgaagtggaagagaatgctgtcgttacacgtgcactggttgccgataatgtaaagattggtgcaggcgcagttgtcggcgatgccaagagcgagcacatcgagctcatttcaaaacgtgtaaagggggtagaataacatggctaaagcatttggaatcgtaaattttgccggaaatcacattgcagtagaaggtatgcaggaatatcgtccggtaggtgctttttctttccttggacgttaccgtgtcatcgacttcacgatctctaatatgagtaacagcggcatcgaccatattcaggtttatatccgcagaaaaccgcagtcactgactgcacatctcggaaccggacgtcattataatatcaactccaagagtggtaatctccagattctttattccggactcggaatgaatatgagtctgtataacaatgacattgcatcctacatcgagaacttagaatatattgaacagcaattggaggaatatgtcgtaatcgctccaagttatatgatctatacccaggattacaacaaactgttaaacactcatatcgaatccggtgctgatattaccttactgtatcactccgtagacaatgcaaaagaatattttctgaattgctatgctgttaatctgaacaagcagaaaggggttctttcactggaacaaaatcacggaaatgcaaagaacaaaaacatctttatggatacttatatcatgaagaaagatttgttcatcgaactgatccacaaatcaagaaagacttcttctgtatacacattactggatatcgtaaatgcttcctgcgaagaccttgatatccgcggagtttctcacagaggttactttgcagcaatctcagattttaacagctactatgagtccaacctgtccctgacagatatcaaaacagcacagaatctgttcgtgccggactggccgatctataccaagaccaacgattcctgcccaacccagtatttcgaaaccggaacagccaaaaactctgttgtgtcaaatggctgtctgatcgaaggagagattgatcattctgttatcggacgtggatgtatcatcaagaaaggagctgttgtcaaaaactgcatcgtactttctgatgcttacatcggtgaaaatgttcacgtagagaatcaggtaattgacaaacatgctaagatcacacatgcaaaagagttgtccgcttctgaagaccgtcctggatatgtaagaaggaacgatacattatagaatatacttttaacggaaatataacaaaagagagcggaaaaatcatcaagttgatcttttcgctctcttttatctaccttttaccggatgacttcctgcgcaatcttctgccaggatattctgctcacatcacatgccctgtttttcacaagtcctctattttcctgttttactgtcctaattgcatcttccagtgcctgtgccagtcttttttcaaaaaccggaagttcttcttccactgcttcatccgcacctttcatctttggcagatccacataacggatatcagcatccggtatcatatcctcaagccagtctgccactccatccagcctcgtcatcactacgcggtcaccacacgccaggctttcgatcactgtaagcggcagtccttcatacatagacggcaagacaaagatatctccgtcgttatacagttttgccagttccacctgcggcacacaaccggcaaatctgaccggatatctgcagtgtgcagccagttcttttatttcttcatattctttctgatttccagctccacccgcaagcacaagttttatctgtccgctttcttcatccagcaggttcatcgcacgcaaaagactttttacgcctttcttctgcgtgattttcccggcaaaaaccagccgcaccacatcatccttttttcccggcttctcaccggttatccggaacacatgactattgtaccccgtaccgattaccgtcatgctctcacttttcaccggatatatctgtctgatcttttctttctgtgcttcctgaagtgcaaagatccggtcaagacgcggaatctgactgcgtataaattcccgttgaaatgacgtatttttcatctgtctcaaatccgtattgtgacagaatccatatactttcttttccggatagcgctcccgcaccagtgctgtcagataatacagatgatggcataagatcagttccggatcttctctttctattacttcatccaatactgcaagaaatgcatttctgaactgtactgtcatatcttctgtcatatccttgtatcttgtactgatatatggcatctcatctgacatacccacaaccggatatggtaatccttccgattcaaaatataccggatatgccttcacaccatccggcatatccatctgttcccctcttgcaatgcctgccagcacagtctgcgtatgtccctcttttgcaagtgctttcacaacctctgtcagatagactccactcccggtactgcatggtttctgtgccgtgacactaagtattctcatcccgctttctttatctcctctcatatatcgcaaatacatattccagatcaaaatacgtctgttcgtcactgatttttgtcatctcccattccggatctgcatccagatccgggaagtatgtatctgcatcatacgcatgatcgatctttgtaacataagcctttgtacaatacggaagaagctggcggtaaatactctctccaccgatcacatagatatcttccgaatcgtatttttttaattcttctaccatctcttctacagaatgtacgatcacggtatcttttactttataattcttatctgtcgtaagtaccacgttaactcggttcttcagcggctgtcctcccggaaagctttccagtgtctttctgcccatcgcaacaacttttccattcgttgtctcacggaaaaatttcatatcctgcggaatactcaccagtaatttattctcttttccaattgcccagttcgaatctactgctacgatcaaattcatattatttcctcctacttataccgctaccggaatatttttaatctggtcgtgtgtctgataatcgatcaatttcacatcatctcttgtaaactgatagaaatccctaatctccggattcagccagaattgcggtgccggaagcggttcacggccgatcagttcttcgatcatcggtacatgtctgtcataaatatgcgcatctgcaatcacatggacaaattctcccacttccatatcacacacctgcgcaagcatatggatcaacacagcatactgacatacgttccagttatttgcagccagaacatcattggatctctggttcaggattgcattcagtgtcagtttatcatgtcccggtttcttcgtcacattaaatgtcatactgtaagcacatggatacaggttcatctcatgcaaatcctgatgtacatagatattcgtcatgatccttctgctgtatggattatttttcagatcgtagatcacacggtctacctgatcgaacattccttctttataccgatgttttacgcccatctgatatccataggcttttccgatcgatccgtcttcatctgcccagctgtcccagatatgactgtgcaggtcattgatattatttgatttctgctgccagatccagagaagttcatccgtacagctttttatcgcggttcttcgaagtgtcaatgccggaaattctttcgacagatcataacggttcacgactccgaattttttgatcgtatacgccggtgtcccgtcttcccataccggtcttaccttttctcctctggtatcggtaccgttatcgatgatgtcacggcacatgttgataaacactttatctgcataactcatttttacatctcctgtctctctgcttttcgttctgtctacggatcactgatattataaaggacccggtccagcatcttttccaatgctgcaatttcttttttactcattccgatcgtaagccgccggtcgatcttcttccggtagttatccatttttttctggatatcgtatgctttttctgtcgggtatatgttcttgcatcttttatcctgattacttggaaccgccagaatgaatcccttttcatccagcctttttaagattcctgtcaccgtcggattcttaagacttagagctttctcaatgtctttctgattcatgaattctttgctgctgccaagaaggtaatccagcaccgcacactgtgacgatgtgattccaatcccgcggagcagattattgaattctttctcgtaaatattattaatctgtttgaacataaatccaacggacaatcgttctttcatcctttgtcttctcccatttcttgtaaatacccggactgatccaatttattttatcatattctagcatgctatgcaatcttatccatcgcacgaagttcttttactgcaaatccgattgcaacaatacctgccgccgcatctgcgatcggtcctgcatacatcacaccgtcaattcccataaagagtgggaagatcaggatcagtggaagcaggaagatcacctgtcttgtaagtgataccacaatacccagtttcgccttaccgatcgatgtaaagaatccggaggacatcggctggattccgttcacaaatgtcatgaacataaagatccggaagtatcttgccgcaaactcataatattctttgcttcccgtaccaaagatactcacaagctgtgtcgggaagaactgaaaacacaggaagaatacgataccaaccgtcattgcgatccggaacgctttccagtacgtacgttttaccctgtcataggatcctgcgccataattgtatccccagattggctggcatccctgtgagatcccgattgcaatcgccatgaacaccatatttaccttggagatgactcccacacacgccagtggaatatccgttccatatacggaagccgcaccgtaatgacgcagtgtattattcattgtaatctgtaccaccgccatcgcaatctgattgatacacgaagccatacccagcgacaggatcatcttcaggaattgtcctctcggccagaacatctctttcttcagttccattttacggaatcgtccgaaatatacgattaccataatcccggatacgatctgtccgatcaccgtcgcccatgcagcacctttgattccccagtggaatccgaagataaataatggatccagaatcgtattgataatcgctcctgtcagcatacaggtcatagaatacgtcgggcttctgtctgcacggatcagatggttgcctccggtcgtcaatatcagaaatggaattccgaatgccgtgattcctgtataatcctgtgcataaggcaagatcttcgccgtcactccgaacagatgcagaagcggatttaagaataccagtaccactgccgcaatgatcactccgcagatcaccagcatggaaagtccggttcccgcaactctgcttgctttctcatgatcccccgctccggagcacagattaaaattcgatgcgctcccgattccaagcaaaagcgccgttgccgtacagatgatcgacaccggaaatgcaatatttgtcgccgcatttccaagaaggccgacgccctgtccgataaaaatctggtctacaatattatataatgaacttaccagcatactgatgatcgccggaattgcaaatttggcaatcagttttccttctttttctgtcgccagaggattcacttttttctgttcttccatcttatcttcactccttatctatattgttatctgattattcttttttaccggcagtttttcaattgtctgccggcgtttataaaggacggagcttattacggtctccgtcctctgaaactattctgctatttataattttgtaattatacttttatattcgtaactctatattcgtgactgtatatttctgatctaatattcacggatcacggttccgatctcccgtgttgtgtccatatccgccagatgttccagtgcatcttccagatgcttttcctttactgcttctgtcacgataaccagttctgccgcatcatctgcctccgtcttctggatgactctggcaatacttaccttatgcactccaaatacactcgcaattgctgcaagcacacccggtttattatccaccagcatacggatgtagaatttattctttacttctttaaaatcctttaccggtgtgtcacgataacaggtgcagctgattcttcccgtacaatgatactgaatatcacggatcacatcgatcacatcacccatgatcgcactagctgtcggaagttctcccgccccacgtccataaaacatcgtatcatctgccgcatcggaatgtacgaatactgcgttaaaggaatctctgacagatgcaagaggatgctccttcggaatcatcatcggatgtactgcaacttctataccaccttctgtattatgtgcgacaccgagcaatttgatcacgtcaccgaattcttctgcgtactctacgtcttttgccgtaatcttcgtaattccttctgtatatacatcatcaaatgtcactctggaatggaatgcgatcgatgccatgatcgctactttacgtccggcatccagtccttcgatatcggctgtcgggtctgcctcagcatagccaagctcggtagcaagtgccagtgcatcgccaaaatccatgccttcttcgatcatcttggtcaggataaagttcgttgtaccattgacaataccgatgacttcctgaatctcatttgcagccagacactgcttcagtggacggatgatcgggattgctcctgctacggctgcctcaaataagaagtctactccactttcttctgcagcttccagaagttcatgtccatgtgttgccaccagatctttatttgcagttacaacattcttccctgcatgcagagcttccagaatcatagttcttgcaggctcaatgccgcccatcacctcgatcacgatctcgatttcatcatcgttaatgatatcttcccacttatctgttaaaagagactggtctacgccttttctcttcttattcatgttatgtaccagtattttctggatcttaagacctgccccggctttcattgccatctcatctttctggcattctacaagcttatatacaccactgccaaccgttccaagtcccagaagacctgcttttactactctttcctgattcatcttctcacatcctcgttttcttgttcactctctttttgtttatgcacactttagtatagcacagtgtcacatatgatttcaatcggattctttctctgctcgtaaattagtacaacaaaagacgttgcaaacagtcttttcagagcgacagacgggactcgaacccgcgacctccaccttggcaaggtggcgtactaccaactgtactactatcgcacatcaagtatatttcatgttttcatgttcatcagaacgatatttagtatatcgcaactttctcattatgtcaatatctttttcaagttttttgaatttttctttctatctgaaaattcaaataatttaataaatgccaggaataatctttatctgactgttcccggcattttattctttacttactcagcgtcgtctttcttctcttcctttgccactactgcaattccgagttcctccagctgttttgcatctacatgtcccggtgcttctgtcatcaggtcagatgcatcttttaccttcgggaatgcgatcacgtcacggatgctgtcctgttttgccatcagcataaccagacggtccagaccgtaagccagtcctgcgtgcggcggtactccgtatttgaatgctgtcagaaggaatccaaactgctcctgagcctgttcttccgtaaatccaagtactttgaacatcttgctctgaatatcctgatcgaagattctgacacttccgccaccgatttcattaccatttaatacgatatcgtatgctttcgcacgcactcttcccggatcactgtcgatatactgaagatcttcttccatcggcatcgtaaacggatgatgcattgccgtaaagcggttctgttcttcactccactcaagaagcgggaactctgttacccacaggaatttgtattcgtttttatcaaggagttccatctggcgggcaagttccagacgaagtgctccaagtgtatcccatacaactttattcttatctgccgcgaataataacaggtcaccgttctctccgcccattgcctcgatcagtgctttcatctcgtcatctgtcataaatttggcaaatgaagattttacagttccgtcttcatggattgcaatataggcaagtccctttgcgccgtaatctttcgcaaaatcaaccagcttgtcgatcttcttgcgggccattccaccctgtcctttggcgttgataccgcgaacagttccaccatttgcaattgcatttttgaatacaacgaactcgcagtcttttacaacatctgtaacattcgtcagttccataccgaaacggatatccggcttgtcagaaccaaagcgatccattgcctcctgccatgtcattctctggatcggaagggatacttctacccccagtacttctttgaataattttgcaagcagtctttcatttacctcgatgacatcatcaacatctacaaaagataactccatatcaatctgtgtgaattccggctgacggtctgcacgtaagtcttcgtcacggaaacattttgcaatctgaaaatatctgtcatatccggagcacatcagtaactgtttgaataactgcggcgactgcggcagtgcatagaactgtccctgttggatacggctcggtaccaggtaatctcttgctccttccggtgtactcttgatcaggaccggtgtctcaatctccagaaatccttcttctgcaaggaactgacgtgtcagagttgcaactttacttctcatcatcagattgcgctgcagatccggtctcctgaggtccagatatctgtatttcagacgtacttcttcttttgtcttggagttttcttcaatgtggaacggaggtgtctctgattcggaaagaatacggagttcttccggaagcacctcaatttcacctgttgcaagatgatcattcaccgcaccggaacgctttgcaaccgttcccacgattgctactacatattctgcacgaagctttgctgctttttcgatcagcgcagcttctgattttccttcttcaaataccacctgaatgataccggagcgatctctgacatctacaaataccagacctcctttgttgcggttcttctgtacccatcccatgatggtaactttttctcctacattggctgcagataattctgcacatctatgggttcttttcaaccctttcattgattctgccatgttcttttctctcctttttcggcgtctttacgccgtgatttattgctctctaaaacatattataagttctccacggaatctgcatagcagtccacgatttctatataaccatcttctgccagctgttctttctggaatttcttattctttttcatgttgacgatcagaacctgttttcctgcctgacggtctgtctttgcaagtgacattacttttaaaagaccttcttttgtcatcttcttttccaacagatatgctttcttctcttttacagtcggaacttcatatccattttccaggagcagcataacaattctctcgaatccgatggagaatccacatgcaggtgtatcctgtccggtaaatttaccgatcatcttatcataacgtccgcctccggctactgatccgccgaagtcatccattgttacttcaaagatagttcctgtatagtaagactgtcctcttacaagtgtcgggtcgaatttgatattaaattcgcattcctttgcagtctcaacgctggaaatgatcatttccatactgtctgctgtctctccacttaagcagtctcctaatttttctttcagaaaacggatacctgtcacatccggtgcaacatcctgaaacagctgaagataagtctctacattttcctttgcatatcccatctcttccagttcttttgcaacgccttctgccccgatcttgtccatcttatccaggataatgaagacttcatcatagtcttcctcacggaagccactatatgcagccattgccttcagtatgttacggtcattgatacataccgtaaagttctggaagcttaactttccaagcatagctgtggttgcaaggatcagctcaatctctgcaagatttcccggttcacccagaatatcaatatcgcactgcatgaactgtctgaaacgtcctttctgcggacggtctgctctccatacattcccgatctgcaatgctttgaacggcgccggaagctcattcgaatggttcgcataatatctggcaagcggtacggtaaggtcgtaacgcagacctccatccaccagatcattctcttcttttgctgtatcgatcttcagtttttcacctctttttaaaatcttgaagatcagtttctcgttgtctcctccctgcttgctgcacaggttctcgatatgttccacacacggtgtctcgatggaacagaatccgtatgtcttatacgtctctttaataagtccgatcaggtaatcacggatctccatctcacgtgggagcatgtctttcataccggtaaccggttttttctttaatgccataaccattctcctttgcgttctatcatttcgtcgatcctgtcgatataggcatctactgccttgacattctcctgacggatcagacgtgtcattttcttctttttactgcccggcataggaatcggattctttaatacgatttttgtcgatgcacctgcgcctgcggcaataatagattgtttttcttccataataagtatattgtatattccggctttgtcaacctttgcataaccaacattttcaaaattccctgcaatattcttctgtctgtacagataatacgggaaaagttccatctcttctgccgtttttgctgctttttcgatcatgccggaaaggatgtcatgtgtctccttcacatcccggtgtaaatctctcatttccattctggccgctctcttgattgccagtgaatgcaccgtcagactgtccggcttcatctgagcgatctgagccagtgtatcttccatatcagaaatatcttcccccggaagtcctgcgataatatccatattgatattatcgaatccggtctctctggccaatgcataggcctcttttatctcttctacggtatgctttcttccgatcgcatccagtgtcttctgctgcatgctctgcggattgatggaaatcctggtaatgccgtggctctttatgacctttaatttttcttctgttatgctgtctggtcttcctgcttctacagtatactccaacagatgttctctcgaaaatttctcatcaatccatcccatcagtcgttccagctgctctgccgtcagagtagtcggtgtacctccgccgatgtagattgtattcagctttttattttttgaacgctctgcgataaattccaactctttacaaagtgtatctacatatacatctactttttctttccagcgatccagcggtccggaactgaaagaacaataagaacagaccgacggacagaacgggattcctacatacaagctgtacccttcttcataatccagttcttccagaatcttccgctccctctcggcaatcttccatgcaagcactgccttttcttttcttactcttgcgctttcccatgcccatctgatataatcttcttttttccagccggcttccagcttctgcatagcaagcttggtcggacgtacgcctgtaagcactccccatgcaagtggttctccggtgatcttctccagttggtcatacagattcaggtctgtctgccgttttttctccgtttgcagattctccgtttctgcaaaaatttcctgaccatccggtaattgtaccgttacataattagaggcttcttcatccgtcttgcaggatacttcctgcgacggataaaaagcctttaatatatgatacgcattataagtataagactcgcttttacatataatctgaatcattttaattctccattctgttttttatcactgtcttttgccaacattcattatataaatggattatggagtttttcataaccgatcgtcgtttcttccatatgccccggatatacatgtgtctcttccggcaataccaacagtttctcctttacagaacgaaccaatgccgatgcacttccgcccgggaagtctgaacggccaaccgatgtctggaataatgtatcaccgctaaagagaacgccttcctgttccatataataacagcatccacccggtgtatgtcccggtgtatggatcacacggaactgaaaacctgcaatttccagctgttgcccatcactgaccggaaccgcctcctcaaaccggtatcctccacgcacatatgtagaagacagattactttcaccgtccgtcatcatcggaaggtctgcttcttctacatataccggaacttttacgtcttccatcacatcagaaagtcccataatatgatcaaaatgtgcatgtgtcaaaagcaccgctttcagtttcagtccctgctcctttaccgcattctttaccttcgccggataagctcccggatcaaccatgaccgactcttttgtctcttcgttaatcaccagataacaattcgtaccaatcattccaaccacgtatttttttatcttcatacttttatcctgttgccctttctatatcaatgattccggaaagctgctgcaatttcttcacgatacgctccagttcttcacggccgtgaacgatgaatcccatctcaattgttgctgttcctttcttgctggtacggacattcatagatttgacatccacattttcttctgtgaaaattctggaaatctccatcagaagtccctgctggtcattggcatacatcttgatctcggcaagatactgacctcctgatttttctgtcacttccgtctcccactctgccggaatcaatcttgcgcgttccgcttcggacagatgtatcatattgatacagtctgtacggtgaatggacagacctcttccacgagtaacgaatccgacaatctcatctcccggtaccggattacagcatctggaaaaacggaccgccatatcatcaatccccttgactacaataccgctcttggacttggcaatatgtaccttattctttgcagcctcagccactctctccagaacaacttcatccgtaattgcctgtctgtgatcttttccatactcttctgcaagccggtttactacctgtccttcttttaatcctccgtgaccgattgccgccagcacagattcccagtctttgaatccatattttttctgcacgatctcctggtacttcggctgaataatatttgtaagattgatactctttgccttgcagtatgtagcaatcatatcctttccacggatgatattactttctttgaattcttttttaaaccactggttgatcttgttctttgcctgtgtactttttacaatattcagccagtccctgcttgggcccttggaattctgtgaagtcaggatctcaattcgatccccgttctgaattttataatcgatattgaccagttttccgttcactctggctccaaccatcttatttccaactgcactatggatcgcataagcaaagtcgatcggcgtcgaaccattcggcaggttcttgacatctccctgcggtgtaaagcaatacacatcttctgcaaacagatcaaggtcacctttgatcagattcaggaattcccggttatccgacatgtctctctgccactccaggatctggcgcagccagcttaacttctcttcttcctgtgcttcaacactcttcttaccgtcattcgactctttatatttccaatgcgccgcaataccatattccgctgtcttatgcatctcttctgtacggatctggatctcgaacggctgtccgaccgaactcatcagcgttgtatgcagtgactggtacatattcggttttggcattgcaatataatctttaaatcgtcccgggatcggcgtatacatctcatggatcacaccgagtgccgcatagcagtcctttacagattctacgataatacggactgcgaacagatcatagatctgatctaccgtcttatcctgattgaccatctttttataaatgctgaagaaatgtttgacacgcccgttgacttctgctctgatgcccgcattcttcatatgtgtcgacacttcatctacaatctgctctacaaattcttcccgctcagtctttctggcattgatctgattcaccagatcatagaacacttccggctgtgaatacttaagtgccagatcatccagttctgtcttgatcttggaaattccaagacgctgtgcgatcggtgcataaatgtccatcgtctcttttgctttttctttctgttttgccggtgtcataaactgcagtgtacgcatattatgcagacggtctgccagtttgataatgataacccggatgtcctttgccattgccaggaacatctttcttaaattttctgcctgtacctccagtttatccgaagaataagaaagtcttcccagcttggtaactccatctaccagaagtgctacttctgctccgaattcctttcggatatcttcttccgtaaactttgtatcttcaaccacatcgtgcagcattcctgcagcaatcgtctctttatccatctcaagatctgccagaatgatcgctacccataacggatggatgatatatggctctccggattttctgcgctgatctccatgtgcttcaactgccagcttataagctttctcgatcagggaaacatctgtggacggatgatactttcggatacgggcaatcaatatgtcatacaaccgatccggatcttcataatcttcctgcgatttcaccgcatgtccgtctatgaccgcaagtccttttgtatggtctttcgtcagggcttccggtgcaatccggttgtccagtgattcatatgttgtcttgtctgacatatcaacgcctccttcccttgatgcttctcctatttacccggatatgtgatcacggcatccacatcatatccttctaatcgatctcttccatttaatcccgcaagttccataagaaatactgtctttaccacttttccgccaagtccttcgatcagttttaccattgcctcattcgttccgcctgttgcgatcagatcgtcaatgataaccactctttgtcccggtttgatcgcatctttatgcatctcgatcgtagcagtaccatattccagttcatattcaacagaaacagtctcgcaaggaagctttcctttttttctgatcgggataaatggcttatgcaggttatacgcaattggaactccaaaaataaatcctctggattccggtcctacaaccacatcaaattctacgtcttttaatttttcctgcatcagatctattgccagatgtaacccctccgcatcctgaagaatgcttgttacatctctgaatataattcccggttccggaaaatccggaatgcttcttacatactcttctatcgctttcatgatactctctccatttctgtctaaaatacaactttaagtatagcattactttttctaattttcaatctatggtttaacggtaatgcgtcacaacaatctgtggtgtctttttccccatatattcattaatatccggataatatgtcatcgagatccggatctgtctgccacggccttttaagagtgcctccacttctgtctttccatactgttcttccagtttgcccaggaaatcatctgcatgatggaacagcattgcttcgatcctgcatccattcacatcctgcacctgtaatttcagtacatttctattcttcccaagaattcttgcaccaagtaatgtgacatcgcgtgctgcaaataccggttttgtatttccttttccaaatggttccagaagttccagttctttcaccaatccttccgtcacacatccgaacggcatctccatatcgatagttactttttctttcatctcttcttcggtcagcgtacattttttattcaacatctcacgaaatttcccgacattctctttcggaagtgacaatccggctgccagccggtgtccgccaaacttcgtcagcaattctttgcatttattcagttcttcatacatgtggtatccgtcgatcgaccttccggatcctttcactccttcttctgcatccgtcagtacaaacaccggtttataatagttctctcttatccttccggcgacgatacctgccagactttcatgacaatccggaagataaacgaccaacaccttgtccttggaaatggttgttgtctccacctgctcttctgcctgttttacagcctcttccgtcatatcctttctgctgtcattcaacgctttcaagtctcctgcaaggatatctgcctccttttgcgttcctgctctcagtaattccagcgcacgttttgctgtatccaatcttccgctggcattgatacatggcccgagtacaaaaccgatatgataggaattcaggctgttcttgtcaatccctgtacactcgatcaaagctttcaatcccggattctttgtgcgtctcagcatctgaagaccttctttgacaaaaatacggttctcatcttccagatccatcacgtctccgatcgtagcgatcgcaacattttcgatcagatcatccagatccgccgaatcctttcccatactctcccacaatgcctccatcagcttgtatgcaactgcagcaccgcagagtcctttaaatggatagagacaatccggctgcttaggatccataaccgcatctgccggcggaattctgtatcgtttttctccatcgtgttcatcaaacgggacctcatggtgatctgttacgatcactgtcatccccatttcttttccatacgcgatttcatctgctgctgcgatcccattatcacaggtaatgagcgtatctacaccggcttcataagctctttcgaccagatgcctgttcagtccatatccgtcactgatacggtctggtatatcactgtccacatccgcaccgagacgttccagtccttccagcagaatgtaagttgcattcactccgtctatatcataatctccgatcacccggattttcttatcttccaggatcttctctttcagaatatcgattgctttatccatatctttcatcagcattccatcatacagatcactgattgttccattcagatagcggtcaaccgcttcttccccgatcacatccctgttccggatcagacatgccagccgcgggctgatctggtatttttttcctattgcctcaaaatctgcgcctttccgcagcagaacccatcgttccattgttgtcgctcctttgtctcttcagtctaagtacaattactttttaattttaaaaaagcagttataccctgtcaacaggcacaactgcttttcaaatcattttctgatttattttttctttttgtttgttgcttttttagagacttttgttttcataacataccacagggctcctgtgatacatacggaagaatatcctccgcagatgatacctgccataagcggtgctgcaaattcacgaatagaacttacacccataataaacagaacaaataccatgataaatgtcgtcaacgatgtataaatacttcttgtcaacgtctgtgttatacacttatttaccacttcagccagatcatcgtttctcttcatcagtggaagttcctcacggattctgtcaaagattacaatcgttgcattgatggaataaccgacaatcgtcagcatacatgcaataaatgttgttcccactgagattctggatgccgcatagaatgcaagtaccaccagaacgtcatgtaacagtgccgcaaccgcacttgtagcaaaacgtacatctttgaagcggaaccagatgtaaagcagcataaagattgttgccacgatcacggcaattactgcatcacgacgcatctcaccactgatcgtagaacttatattttcagctgtgatatcggattctttcactccgaatgtagttttcagtgctttgttgacctgctcacgtttcgcaagacttaaggtctttgttttaataatgacctgtttggttccggacactttctgtgtctgaatgttgtggtctccggtaatcttttctactacaggaacaatctcttcatcgatctcatcgatagaataatctttgtcaaatttcacattcatagaagttccgccctggaaatccagactgtatgccagtgctccatttccctttgccgaattgactcccatgatcacaaatcctgcaaggatcagtgcaatggaaacgctgaagaatatcttcttctttccgaggaaattcaccggctttctttctttcatctgatgataatacagactctctttgcggattccgattccatagaatgcatatactatcatacgcgtgatcaccagtgcggtaaacatggataccacaataccgattgccagtgtctgtgcgaatccttttactgttccggaacctttgaaccacagaaccgctgctgcaatcagggttgttacgttaccgtcaacgatagctgacattgctttctggaatcctgccttgagtgatgacttcacagttttccctttcgccatctcttcacgcacacgggcaaagatgataacattcgcatccaccgccataccgatacttaaaatgatacccgcaatacccggaagggttaaggttacatcaaatgcattcaggatcaccaatacaatctctgtatagatcagcagtgcaagactggatgccagtcccggaagcctgtataccagaatcataaacaggaatacaaggatcagaccgatcactcccgccttcaggcttgtgctaagtgcctgttctccaagttgtgcccctactacattcgaacggagttcttccagttccagtttcagtccgccgatacgaatcgttgatgccagattgtcggcttcttcgtatgtaaagtctccggtaatataagcctgtccgcctgtgatcgcagaccggacaaccggactggagatggtctcaccgtcataaatgatcgcaatctgttttccgatattgttctgtgttgctgtagcaaatttctttgttcctgattttgtcaggttcagttctacggagtattctttattccccatatcatcctgaccgctctttgcagatgcgctctttacatcggttcctgtaaggaccgtctcaccatctgccgtctggaaagaaagggaacctggttttccaagttcatccagaatcttattggcatctgtaacaccaggaatctcgatattgattcggtcgtctccctcctggtatacacttgcttctgtactgtactgctctactcgcttttgcagcttatagattgtatcactcatctcttctttggtcggattcttatcttttacctgataagtgatgctgacaccaccggctagatccagaccaagtttgatgttcttcatcgcaccggtcttagattttccaattcctgcgataacagtaaaaccaagaccgacgatgaggattaccgtcagaagcagactcagtatgctttttgactttttcatcgttctcctacacatcctctcgaattatttattcttctgcaagtgcagccttcatcatgatcgcacactctacacgcttcctttgcatctcacagccgatctcataggtatcatggatcgtaccgtggaaattgtaagagtttgccatacatccaccactgcaatagaattttgcaaaacagtttctgcatttatctttcgaatacacattacagcttctgaaatcgtccgcaatctccggcttcacgattccatcgtccacattacccatcagaaaatcatcctgtccgacgaactgatggcatggatagaggtcgccccatggtgtaacagccagatattctgttccggaaccgcatccggataaacgttttgccacacacggaccaccgtttaaatctatcataaaatggaagaaattgaagccttttccctctttctcgcgttcgatcatcatcttcgcaagtttatcatattcctccatgatcttaggaagatcttcctccctgatcgcatacggatcgctttcatctccaacgaccggctcgatcgacatctgtttgaatccaagatctgcaaaatgcataatatcattggaaaagtccagattgtttcttgtaaatgttccacggatataatatttttcctgatttctgctttctgcaagtttctggaatttcggaacgatcaaatcatagcttcccgttccgttacggaacggacgcatctggtcattgatttcctttcttccatccagacttaatacaacattgtccatctctttatttacaaattcctgtatctcatcatttaaaaggacaccattggtcgtaacggtaaaacggaaatgcttgttatggatcttctcctgttctcttccgtaagccaccagatcttttacaacctgccaattcatcagaggttcccctccgaagaagtcaacttccaggttgcggcggtttccggaatttgcgatcaggaaatccagtgccttcttacccacttcaaaactcatgagtgcacgtcttccgtggtactctccctcttctgcgaagcaatatttacaggcaaggttacagtcatgtgcaatgtgcaggcacaatgcttttacgaccgttttcctcttcttcacctcttcaatcatgcattcgtatgtatcttttacaaataactgtccgccttctgtcagctcgatcacgtctgacaatgcatcttcgatatctgacgcttcgtatttatttcccagtgactgcagaagctgatcttttacatctgtttcttttaatgttccggcagttggttctgtctctgatccgttcaattttgcgatcacatcataacagacatcatctaccacatgtacagagccgctgtacacatccataacgatattgtatccattattacggtactgatgaatcatatctggtacccctttcttgtttttcatattctatatcggaaaattcctgttatttctctgattgtctgaaatctcatgctgtcaaataattccatgaacagcaagaaacagcgaccctaaagaccgctgtcccgagtatccatatgattttaaattatttgttctgttcgcaagtctgatttcctactgtgcaggatgtcttacatgctgactggcatgatgtctgacattcgccacatccactttttttcaggttgctgttcataggtttattcaatgattttacatgtttcatgttcatgtccctccttactattacttaacttatattattataacatttcaatataggtttcgcaatccttttcttaggatatcattccgccggccatgccgcctcccgcacacaacgcaaatgtcaccaatatctctgtactgcttccatgaaatgtgcggtagattccgactgtgacaagcaaaagtaacgcaaaatacaatattcccagaacaattccccacaggaaccgcctgacttttgcaagttttcccaccacaagtccgccggtaaatgtcgagatcagatagactgccgtcactcctgccgtcaccgcgccttcatttaattcgaatttataaagagccagcgccagtattatcagaagaatacctgtcactacatatgccgcaagaagagctttcaccatccacatgatccatacttcattttgttctttttttctcatctgctccctcctcatctatcacagattatgaagagagactctcatttatgcttctgttctgtccataattgttctattgttccatctgttttcccagaaccttcgctgtatattccgcaaggcagatttctctttcttcaaacaggtctttctgatccatgttcagcaggagtaccgccccgatcacatcccccgcacacaggatcggactgatcacctcctgactgtaaggttctgttttgctcaccaccggcacatatcttttttctcctgcttttgcattctgcgtctttctttccttcagaaactctccgagttcccttgttatatcttcatcctgcagctctttcttcccgtttcctgacgctgcgaccacctgatccatatcacagattcctgccagacatcccagcatctgcgccagactttctgcatactgtttggcgaatgccgataattctccgatcggagaatatttcttcagaataatctctccttccttgtccgtgaatatctccagtgggtcgccttccctgatcctcagtgttcttctgatttcttttggaacgactacacgtcccagatcatcgattcttcttacgattcctgttgctttcatagcatttatcttcctcctgttttttctgtttttttctgttttttccatattttctaacatatggttagtatgctgagaaaaagatggaattattcattctgatattagactggatattttttcaatagttttgtataatagttggaagaaaatattaggaggaatgaatcatgagtaaaattgatgaagtacgtgctgatatggtcaaagccatgaaagcaaaagacaaagacacaaaggaaactttatccatgctgcttgcagctcttaagaataaagcaatcgacaaacgtgcggatctgacaccggaagaagagacacaggttatcttaaaagagatcaagcagacaaaagagacactcgatatgactcctgcagaccgtacagagatcatcgaagaatgcaataagcgtcttgcagttctggaacagtatgctcctaagatgatggatgaagcagagatcaaagaagttgttgcttctgttcttgcagaaatgggactggatgctcctactgcaaaggataaaggaaagatcatgaagaacctgatgcctaaagtaaaaggcaaggcagacggaaagctcgttaacgagatcgtatctgcttttatgaattaagacagtaccattattaatgggcagcacccggttggatgctgcccattcttcttatctctattcgtcttagttacccgaagcactgtctgtgcttgttccggttgtacttgtatctttggcttttacgctcaatttcgtgaaatcaatcttattccatgttcctttgtgaacggtgattttttcctctttcttccatttctttaatacttttttatagtatttatcctgtttctccgtgagcagggactgtttcttggtctctgtggctgcttcatcattgaggcttgtaacttttgccacatagcatgcggtatcgctttcaaccacacccgtaagctcaccttctcccaatttgtctgctgcttttacaacttctttagacggacttacagaatccgaatcaaacgttgcatcttttgcttcggttccctgttcggttgcataggatgcaaaatcttccgccgtctttgctccctctgcaaatgccgcagctttttcctttacctgcttcttctcatcatcggatacagtcgtatctgatgaatcggacgaatctgatgatgtagtataatcaaactccacatactgcatatgcttctgtactgcttcttcatctgttacattcacatttgcttccgctacgattgccgaacgcatcttctgctcgatcaccatcaatgtcatgacacgttttacattctcttcggaaccagataccttgtcttttttcttctgggagttggccttgtcaaattcttcagccgcatcattgattgcttttttatctgcttttgtaagctttacgtcataatccttcatatgcttttccagaagtgccatattcttcagatcatccagcaaagtttctttgatcgattcttcataggtcttgccgtctgacgcatttttcgtccacatatcatctccgccgaaatagcttgcaaagtatgtttcgtactgagcctgtgtatatcttgcatagaaatttgcaacacctgccgtgatctcttcatctcctgcttttacgaccaccgcatcatccttcagcgatccacatccggtaagtgatgctgccataatccctgccagcgctaatattaatgctctttttttcatttatcctaacctgcctttatttgcttaatgggtcaattataccgcttttttctccgcctatcaatcctttcaacccatttaacacatttttcgtaatttccagtgcatctgtctgcttctctttcagatttcttctcttcttctcatagataaaacatggctgggctccgtctgctttgaatgtcagttccccacggaaatcttcgatcagcttcggaatccgttccggatgtaccttcgctttttcatacatgataaatgtgtaaacctctcccttttgttcgacagccgttacatacaactgatgtgcctgtgctttcaatgcggcaacttccagaagtttctccaccttcttcggaatatctccaaaccggtctgtcagttcttctgccatatcttccatttcttcccggctctcaattgcagcgattcgtttatagacatccagtttctggtattcattcggaatataagatgccggaataaatgcatccacattcagatccatcgtagttgtgaaggtctcctcttcttccatctcacctttcagatgcttcactgcttcgttcaacatcttacagtaaaggtcatatccgaccgcctccatatgaccatgctgctccgcccccaaaagatttcccgctccacggatttccaggtcacgcatcgcaatcttgaatcctgagccaaggtccgtgaattcacggatagcagccagcctcttttctgccacttctcttaacatcttatctctccggtagagaaggaatgcatatgccatgcggttggaacgtccgacacgtccgcgcagctggtaaagctgtgaaagtccaagccggtctgcatcatgaatgatcatcgtatttgcatttgagatatccagtccggtctctatgattgttgtggataccaacacatcgatctctccgttgataaagtcgtacatgatcctctccagttcatgctcccgcatctgtccgtgcgcataggcaaccgacagatccggcaccagcttctgcacatgtcctgctacctcatcgatatcttccacacggttatagacatagtatacctgcccctgtcttgcgcattcccgttcgattgcttcacgtaccatctcgtcattatattccataacatatgtctggatcggcatacggtcattcggtgcttcctccaatacactcatatcgcgaataccgatcaggctcatatgaagtgttctcgggatcggagtcgctgtaagtgtcaatacatctacattttccttcaatttcttgattttttctttgtgctgaacaccgaaccgctgttcttcatcgatgatcagaagccccagatctttgaatttcaagtcttcactcagtacccgatgtgttccgataatgatatctaccagtccctttttcgcatcctcgatcgtctttttctgctgtgccggtgtacggaatctgcacatcaggtcaatccgcaccgggaactctttcatacgctgtacgaatgtccggtaatgctgctgtgcaagaatcgttgtcggaaccagatagactacctgtttactctcctgtacagctttgaatgccgcacggattgcaacctctgtcttaccaaatccaacatccccacagatcagacgatccatgatcttatgactttccatatctttttttacagcctcgatcgccatcatctgatcttccgtctcttcaaacggaaacatctcttcaaattctctctgccatactgtatcttctccgtagacataaccatcctgctcctgtcttgccgcatacagcttcaccagatctcttgcaatctcttttacggcaccgcgcaccctggtcttggtccggttccactcctgggttcccagtttattcagctttggtttctttgcatcggcactggcgtatttctgtatcagatccagctgtgttgccggaatataaagatttccgccctgtgcatacgagattttcatataatcttttgaaatcttgtctacaacaatcttttcaattccctgatagatgcctacgccgtgattctcatgaacaacataatctcccggcttcagttccgaaaagctctggatcttccttccttcataagtctttctctttttcttcttttttctttttccgaaaatatccgactctgcgatcacagtgaatttaagcattggatattcatacccttccgcaatgtatccatatgccgtcataatttctcccggctttacttcgcgctccaattcttcaccgtaataactgcttagattataatctcttaaatcttccgccagcctctttgcacgggttctcgatcctgacagcaggactaccctgtatccgtttcttttcagcctcttaagatcctgtgtcagcatctcaaaactgttattgtacggattcacactcttagcctggatttcataagattctcttacttccaatcccctgcacttcatctctaacgcaaaaaagccgatactgctgtaagtattgatcttcttcaggatatctgcaaccggaaatatctttgcctcttcctcttccagttcatacccgttctccagacgctttttctgcgcttccataaactcttcttcaatattctgtccgcgctccacaagacgcaccggttcatccagaaaaagaatggtatcttctttcgaaaaataatccaggaacgatactcccttctcttctccctgcggaaattccaccgccggatagatggtaatttctgtcatattctcaatggaccgctgactctccacgtcaaaagtccggatagaatccacctcatctccccaaaattcaattcttaccggaaactcctccgtcagtggatagatatccagtattcctccccgcactgcaaactgccccgggccttctacctgtacttccctgtcataccctacatcagaaagtctctctgccatctcgtccagtttaaggacactgtcgttttgtatcttcagtactttttcttcaatactctctttttgtgcgaggtgatccatgaacccgtccagacttgtcacaatcgtcacaggtgttccggaaagcactgcctggattccttccattctctgcttcaccagctctttactacggatatctgctttatagaacagaaaatcctttgccggatacagataagtattgttgtccagaaatcggtattcttcatatatctgttttgcttttgtctcactggaacaggcgatgaccttgtatttacagccatcgccaattgcatacatcatatgagatttctgggaattcacacatccgcatacacggatcattcctgcatcttttttcttatttttacagagttcttcaaactctgcaagttcttttaacggtccgattaagccctgcatctttttatgcctccttaggctttactttcctgttatactggttcatggcagcctcgatctctccatttaagatcattcccaccgcatggtctgcgcggtcatatccctcttccatcaattcacggtcttctttcgaaaaatgtcccagtacataatccgccaggtcgtatttctttggcttctccccaacaccgatcttgattctcggaaacacatcggttccaaggttggcaataatattttttattccattatgccctccggcgctccctttcttacggattctcaactgccctacatccagactgatatcatcatagatcacaagaagttcgtgtccttcatcaatcttataataattgaccagttctcttaagctttccccgctcagattcatatacgtctgcggttttaccagaagcaccttctgtcccccgatcattcctttgccgatcagtgctcttccttttcttccgtctacagaaatattatatctgtctgccaacatatctatgacatcaaaccctacattgtgtctggttccttcatactgaagtgtaggatttccaagtcctgcaataataaacataatttttcaccttccatttcttttatcattctacaagaaccttttccatttgtcacggaaaaattaaacgaataattcttccacatttttcatacattatagaaaatgaaacaatctttgaaaccaattaccaggaggtctcactatgagttccaaaacaaaaattgttgtacttcacatgaaagaaatcatctataccgttattttcgcagtattggccattattctgatcctgcttttgatattcatgttccgtccggaacatcgctccgcctcaaaagataaccggatctatactccgggaatctacacctcagatatcactctgaacaatactgcgctggaagttgaggtgactgtagatgaatcccatatcaattccatccgtttcaccaatctgaacgaatctatcacaaccatgtatccattcatcgaacctgcgatcgaagatattgccgaacaggtctacaaaaaacagtcactcgacaatatccagtattcatctgacactccttacacttcccagctgattgtccaggccattgaaactgcattgaaaaaagccggaactacaaagtagttgcggctttttcttacatctgacagtggcctgtgtgatgccacccggcaggtactttcgtctttttgcttttatccttcaacgataagataacgaccatccgatagcgcaaatacttctgatgcatcttcaatctcttcgtcagacattccactgacatccattccttcctgatcaaggaattccctgacttctccgatattatctacgatagaagccatacagtcctccagaaaagcctctgcctcttccaaagtctctgcaaccggttcatcaaacagctgtccctgattcaaaataaacgtctgcagacattcttcatcatactcgtacatacatctcaacctcccttatcgtaatattacacaaactgcaacagttcatccggtctgtcgatcagatcatctgctcccgcagtttctaacgtttttctgtcccggaatccccacaacacgcctatcgtcttaaggcctgcattccttccggttgccgcatcaacttctgaatctccgatatacaggcattcttcttttgatacgtgcatctgttccataagataccatactccgtccggttccggttttcttcggataccttctttctgtccctgtgcataatcaaacaattcttctccaaagattgctttcacaacttttactgtctgacggtccggcttattggaaaggactgccagctgaattcctttatctttcaatgctttcaacatctccggaattccttcataaggtgttacatgatatgtacaattccggtcaaatatacgtccgtatatttccatcccctcttcaattcttgaagcatctgtgtctccggctgccttcagtgacttttccattaataccctggctccattcccgacgaacaatctgcactgatcttttgtgatctttgaaagtcccatctcctcaagtgtcagatttacggaatatgtcatagattccaatgtatttgttaatgttccatccagatcaaatatacaagctttcattatacaaattcctcctgcaaatatcatagtatgagaccgtcaaaaatgcaataccaaaaatgcgccagcccttagataaggtactggcgcatagttttcaacgcattcttctccagcctgctgacctgagcctgggatatccgtatctcctttgcaacttccatctgcgttcttccctgaaagaaccggagcttgataatataacgttcccgttcatcaagatgcttcattgcttcctccagtgacaggtcttccacccatttttcttctttattcgtctgatcactcaattgatccatcacatacaatgcatctccaccatcattatagaccggttcctgcagactcatcggtatttggattgcatccaaagcaaacataatatcctctttggatatgccaatttctgtcgcaatttcctgcaccgtcggttctttctggttcttctttctgtaactttcccttgcatagattgctttatatgccgtatctctgagtgaccggctgacacgaatggaattgttatctctcatgtaccttctgatctctccaatgatcattggtactgcataggtggaaaattttacctctaattctgtgttaaaattattaaccgccttaatcagtccgatacacccaatctggaacagatcatccgggttctccccgcttgccccaaatcgtcttatcacgctcaggacaagtcgtaaatttcctttaatgtactcttctttcgcttcccggtctccttctttgatgcgtacaaacaaagcttccttctcctcttcattcaggataggaagctttgccgtattcacaccacatatttctacctttccctgtgccattacagacctcctgtcagaatctcatccatcagtttctattaagatgatgctccttatcgcacaggcttatgcggtttcttatcaaataaaaaaaattttactccttgacatctggcagattctgcgttatctatcccacttatctgccagattctggatctgggtctcgaacttggccatatctttattcgccaggccttcattcttatacacaacgttcagcaaacgctttgcagctgccaccagacgattaaatgcggatgcactcttaagcttactcggtttctcatctgattttttcggaatcttctgtccgatcgttataatctcatttgctgcgaggtctaccgttccacctgaatatggtgcgaatgccggacaaccgaatgtatcttctaccaattttgcaaaatgatctgtcactgtatcttccccatgcacaaccattacgcggtctggtattttttcaaatcccctgatccagtccaaaagaccattcatatctgcatgtccgctgattcctttcaatacctcgattctggcattgaccgtgatattctctccaaacagctttacactctctgcaccctcaatcagttttcttccaagcgttccgactgcctgatatcccacaaaacagatcgtgcattccggacgccacagattgtgcttcaaatgatgccggatccgtcctgcttcgcacataccggatgcagacaggataactttcggttttgtatcaaagttgatctgtctggactcgtcactggtaatcgtcgtcttcagaccccggaacagcagaggattgatcccctgatttaccaattccattgcttcctcatcaaaacatcctttgacatttttattaaacacattcgttgcttcgattgcaagcggactgtccacatatacttcaaatcccggaaattccggaagcagattcttttctttgatctcacggataaagtacaaaatctcctgcgtacgtccaaccgcaaaagaaggaatcaccacattgccgcctttttggaatgtctctctcaaaatccttgtaaactctcccacataatctggaatatcctcaccatgtgtacggtctccgtatgtagattcgattaccagatagtctgcctcttttactaactggggatctttaatgatcggctgattgacatttcccacatctccggaaaatacaaccttctttgagacatctccttcggttatccatacttcaatgcttgccgatccaagcagatgccccacatcattgaatcttacttcaattccgtcacacaacgtaatcttctgtccgtaatctaccggtgccagaagcttcgttgcggcatctgcgtctgcaaccgtataaatcggttcgtattccggttctccgcttcttcttgccttcctgtttctccattccgcttcaaattcctgaatatgtgcgctgtcacgaagcataatatcacaaagatctgccgttgcaaatgtggtgatgatctccccggaaaatccttttttcaccagaagcggaatatttccggaatgatcaatatgtgcatgtgtcagaagaatgtaatctacatctcccggtgcaaccggaagttcctgattctcgtaaagatccggtccctgctccattccacagtcaatcaagatattctttccgcatgcttcaagaagatgacagcttccagtcacttcatgggctgctccaaaaaaactaagcctcatatgaccaacccctttttctttttattgtagcacattttcaggaatacttcaccatttcccggcgcaatctttgcataatctttttctctaatctggatatgtaagactgggaaataccaagcatatctgccacctctttctgtgtcttttcttctccgtcggctgtccccagaccgaacctcatccggatgatcatctgttcccttcctgacaggcggctgattgctttgatcaatactttcttctctgcatcattttccagatccttatagacagcatcttcctctgttcccaaaatgtccgacaacagcagttcatttccatcccagtcgacgtttaaaggctcatcaatcgacacttccatcttggtcttactatttctcctcagatacatcagaatctcattttcaatacatctggatgcatacgttgcaagtttgatattcttatctggatcaaacgtattaattgcttttatcaacccaattgtacctatagaaatcaaatcctcaactcctactccggtattatcaaatttctttgcaatatacacaaccagacgaagattgtgttcaatcagcatttttcttgcctgttcatcattctctgtccccagtccccgtattgcttttctttcttcctctgtttccaatggtgccggaagaatatctgatcctcctatataatgaatgtcttttttgtccgaaaaaaagagagaccggaaatccggaataactttcaatttaaactgatgtggaactgccacttttatcaccatttttctttcctcctgtcaatatatctggattgataatcatctgataattttctgaacctaattcttcttcacttactgccactaatggatgttccacatttatcttgtttccatcccgtatgatctgcatcttatccagccggaacgccggcatcacaccctcttttttcccgatggaatgataagaaatatatctgaatcgttccggtttcttttcctctgtcagtcttcttacagatgctctgtctataatactgacaggatcattactgatcgtatcactcaatgtattccctgtatctatcagtcctctcagtctgtcatttttttctccaaaaaacacttcgacttcacagtaacgatttcctttctctgaaaagaataaaatgattttccagattaccgacacgaggtagtaactgattacagccagtaaaaagaacatacttccccgccttatatactgttgaacgaactggaacacacctcccagcagaaatgactctatatacaagagcacccatcctctgaacaattcccggccccattttattccaaggccggccttcatcattactacattaatgactccatgaaatactacaaatcttaataccggtgttttcctgaatatgacaattgcaatacatgtcatcgcggctccagttgctgctcctgcaaaaacccttccataccccgccggacaggcaagtaatttcttcagaaggatcaaaagaatcgcatccattgtaaaattcaccataaaaaacacatctacatataattcatagtacacatcaggccttctttctctttccgtgcacagaaataaatttgttgttttaaacaagtaacattatataaattttttcaaaaggattttgtcagatactgtatgtgattccgtttttcgttcgacagctctcgtaaccctgcgaacatattagtaaaactaagatacacaaaaaaagaccgtatacaagtcagctcacgccaacctgtgtacgatctttcttatagtaatatatgtaagagaaactgcctgcggcatattctctgtattctaagtagtactattctttatgtgattattttttaaagaaatcaggaattttaattgactgttccttcaccttgcttgtaggtgttctaggtgtatccagtgtaggagtggttccacccattggacgtcttgttgcagttcccgttgtctctctctgtgttgttgttccgaaatcaagtcttggtgataccggacgttctgcctgcggtgtacgtactgcctgctgctgtccatacattgcactgctctgacgtactggtctctcatatgcagatgcatgtccttgctgaccatgtggcatcgcagatgttcttccttgattttccagtcttgattttaattttgaagcacttccgccaacattatgaagtcctgtagcaattacagtaattgtagcttcgtctgctctggaatcatcatacattgcaccaaaaatgatgttcgcatcttctccggcaagttcctgtacatattctgctgcatcggatgcatccataagtgtgatatcaccggatacattgatgatgacatgagatgctccggcaatagttgtctccagaagcggactggcaacagcctgttttacagcttccagtgctttatcatcaccacgtccctgaccgataccaatgtgggcaattcccttatctgtcataactgtctgtacatccgcaaagtcaaggttaatcagtgaaggtacattgatcaggtctgtgattccctgaataccctgctgtaacacttcgtcagctttcttcaaagcttccggcattgttgtacgtctgtctacaacttccagcagtttatcattcgggattacgatcagtgtatctacactttcttttaatttttcaattcctgcaagggcattgttcatacgtgtctttgactcaaaacggaaaggctttgttacaacaccaactgttaatgctccctgttcttttgcaatgcgggcaacaaccggtgtagcacctgttcctgttccgccgcccataccacaagttacaaataccatgtcagcacctttcagtgctgctgatacttcttctgcactttcttctgcagctttctcaccaatctctggtcttgcaccagctcccagaccttttgtgatcttatcaccgatttgcatcaatgtcggagctttacacagctgaagtgcctgtttatctgtattgatcgctataaattcaacaccggcaatctgctcatcaatcattcggtttactgcgttattaccgcctccaccgactccaacaacaattatttttgccgctgcttctgattcatttgttttaatttctagcaagggtttctcctcctttgttatccttattatatattatacatcccattgatagagcaagtgagatgaactcagtttgctatatatagtatataatatagactttcgtgtaaaatatcaatagaatttctctaatttttctaattttcttgtgaaatttctttcatctcaaaagtaatcgtagtgttattctctgaataggtctccaaatgcaggattccctctttatcaccaagcttttttaagatcggcttgatctgagcaatctgttcaccagatacctggcttcccagacaggcacttacatttccaaatttcatatagatctgctgctgttttaccgtcacattttccggatatatcccatatttctgactttctgcacatgcttccagtatttcattaaattttgtctgatttgatgttcggatctgcttatacagtttgcctgattttatcttcactccctctacaaccggtatctgcgcatcttttactgaagattgttttaccacaagtccactctgatcaaaataactataggttgttccggttttcacgcacccggtaattgccttttcttttaccgtaatctgcagtgtccacggatttttcattctgacttttaaagaatccagacatttcggtacggttccttttcccatagaatattttgcaactacatataaagaattatccgacagcttatcattctgcacgcaattcacaatctcctgactgtcacagtactcatttccgcttacttctatttcttgaatatagaacagcaaaatacctccgataatgatgatcgctgctgccagcagcagaacaatcactgcatatacatgatgcttttttccattcttcttgttcccttgttttttctttggcctctggtttcccatatatgattcaaacttcctttcatccacatgtatattattttaccaaacatgacacattcaacacaagccccatttcaaaaagcaggaacataaccgaagttcctccataactgatgaatggcaatgtaattcccgtattcggtatggtatttgtcacaaccgcaatattaagaattacctgtatcatcatgtgtgccattgcgccggatgcgatcaaagctccctccagatcgggtgcatgagatgcaataataaaaaagcgccatatcaggatgaaaaataataacattacaaatactgccccgatcaatcccatttcctcacagataatagaaaatatcatatcattctgcgcttccggtacaaatccgagtttctggatactgcttccaagtcccctgccaaacaatcctcctgatccgattgcatacagcccctgaagtgtctgatagcctttctcatatttttccggatgctgccagatctgcagccgttcaagccggtaactttccatagtaagaaatatccccataaatgcacaccccagacacaccatccacgcaaattgcccatacttcggacttgcgacaaataccaggatgactgctattcccagaataataaccgctgtgctcaaattgctcgccccaaccagacctacaattggcagcacactgataacaatcttgcagactgttgaaaatttccacattttttctgcatttcttagtatgatatatgtcaggaacagaatcaccgcaacctttgcaaattccgatggctgaaaagaaaatggtccaaaagacaaccatcttttggacccattgtattcttctccgaacaacattaccagtactccgagcaaaatagataacagatatcccggaactgcccactttttccagatatgatagtctatattcgctatacaccacatacccataatcccgagaagcgttgcaaatacctgttttttcagataataaaacgtatcctggaattttatctctccattatatgcacttgtgctgtagagaatcacaagaccagttacgataatgattgccagtactaatatcagaactctgtcacattttttctgttccgtttgttctgactgccacgaatacttcaactcgttcactccttataaggaatttacaatctctttgaacttctctccgcgtacttcgtaacttgggaacatatcccagcttgcacatgccggtgaaagcagaaccgcttctccctcttttgcaatcttcgctgccgtgagcactgcttcttcaaatgaatctacaaacatataatcagtaaatccgcacttttcagcgtcagcagcaattttttctctggtatccccaagaagaatcagtttttttacttttccgtcaaaactttctatccactctgtatattcagagcctttatcatatccgccgccaatcagaacagtcggacgcttcattgcctggattcctttgatcgcagcatccggattggttccttttgaatcgttataatatgtaactccattcttctctgttacatattcaatacgatgctccacaccaccaaacgctttcacactttcgcggatcactcctacaggaactccgtaaactgctgccatcgcacatgccgccataacattctcgtgattgtgtgttccaagaatctgcagttcatctacatggcagatcgtctcttttacaccttcataattgtagatgatatttccctcttccagatatattccctcttccagtttacgctgactgctgaaatatagaactctggcttttacttcattgccaaattcccttgtcagtttgtcttcataattcaggatacagtagtcttcttctgtctgattctttgcaatattcttctttgcattcacatacgcttccatcgtatgatgccggttcagatgatccggtgtaaaattaagaattgcactgaccctcggacggaattcaacaatactttccaactggaaactgctcatctccgcaaccgtgatcgaattctctgtcatatcttctactgcagttgtgtacggtgttccaatgtttccaacaacaaatacatcatcctgataattcttcataatctcaccaagaagtgtagttgtagtcgtcttgccgttcgttcctgtaatagcaagaacatcgccttttccaaactgataagcaagctccacctctccgataaccgtaattccctgcttacgcatcttttcgatcaccggaaggtctgtcggaactcccggacttaatacagtcatatcaagttctgcaaggatttcttcaggaaactcaccgattatgatctttgcgttgctgtctgcaccggactgctgtcttactttttcttccataagcttcttatttccatcatacagtacgacttccgctccctgtctttccagaatctttccagctccgattccactgatcccaagaccaaatacaagtactttttttccttttacttccatgttatcctcctacatagccatcagtgcgatcaggcataaaattgctgtgataatcgaaaatactgcaacaactcttgtctctgaccatccgcacagttcaaaatgatgatgtatcggcgccatcttaaagattcttttaccgccggtctttttaaaatatgttacctggatcataacggataatacttctaccagatagataaatccaacaatgatgatgaaaatcggcatctggagcatatatgctgcggatgccacaaatcctcccagcgccagggaacccgtatcccccataaacacacttgccggatatacattaaacagcagaaatccaaggagtgctcccaccaccgcacaggtaatcggctcaattccgctttttgttccaattgcgacaaccgtaaagaatgttgcaaccaaaaccgtaacactggatgccaggccgtccagtccatctgtaaaattcacaccatttacggttccgatcactacaaagaacatcaatggaattgccagccatccaatgttcagatatcttcccccactaaaaggaatcagcattgtaagtggaacccctgcaaatttcaccatataaaatgcaaagattgctgttaccacgatctgaagtgccatcttctgctttggatataatccgtccgaacgtttcattacaactttcagataatcatccaaaaatccgatcagaccaaatccaagtgtcaaaaacaggatcggaatgatcttcggataacgtccgatataaataacggaagtgatcacaaccgccaacaggatcattacgcctcccatcgtcggagttcctgctttcttcaaatgagactgcactccatcttctctctccgtctgatccatcttaagtcttctgagtacaggtatcacaagaggaccaagaatcacacttaacacaaatgaaatcaataccggaataaacaccttataatccataatccacctctttaattcttttgttattcagttaatctctaactttacctagtatactgcatttccaattgtttttcaatgccaagataaggcaatatattttcgaaaatattaccaattaccggagctgcgatcgtacctccgtaatagattccctgcggatcatagatcacacacattcccaggatctccggatcatctgccggggcaaatcccacaaaagaagatatgtacttgttcgcacttctcggtaatgtctgggaggtcgccgtcttgcctccgattctgtatccttccacatacgcattctttccggatccttcagaaacgacactttccagaagtatcctcatagtttcagatgtcttttccgaaacaatatgctttttttcactatagtgaaattctttcgttactttcccgtcttcattcaggatctccgttccaaagtgcggcgtcactctctttcccccattgatcagtgcacttactgtcgctgcaagctggattggtgtaatctggaacgactgtccaaaactgatcgtagccagttctacctgtccgatattttcctttttatgcatgatcgtccctgcttctcccgggatatctacccccgtcagattcatcagaccaaacttatgaaaataatcgcaaaatctatcgactccgatacgaagtcccagttctataaataccggattgcatgaattctgtataccctgcacaaagttctccgtaccatgccctcccaccttatgacaccgtatcctgcggtcttctaccattttatatccgggacattgaaactgatctgtaagacggactaccccttcttccaggcctgcagatgctgtaatgatcttaaatgtgctccccggctcataggtatcgttgatacatccgtttctccacatctgattcagagcatcctgcttctgctcatccgtcatattttcatccgactcttcttccgtattcagctcaaacggccggttcagattgaattccggaacgtttaccatcgcatatatttccccgttctgaggattcataagaagaattgccgttttttccgcctgcttttcctgccgcactttttccgccatctgcatagcatacttctgcatattataatccagactgatctttaatgtattccctgccactggctcttttctgtcttctgcgacaccatccagttcgattcctcttgcatctgttgttgtcaggatcttaccgtcaacacctttcagatatttatcatattttacctcaagtccgatgattccctgattgtcagctccggtaaaccccaatactttagaggcaagcgcatcatatggataaaatcttttaaaatcttcatctacttttactcctgccatccccagatttcggatcttatctcccgtttttttatccacatttgattttatcctttctatggatgatatcttttccacacgtttgcgcacctcactgctattcatttcaagaagttccgataagttatcaatgactgtttccgcttccctgatctgactatgtatcacagaaattgtacacaccgtccggtttgttgccaaaactttcccattcctgtcaaggatttctcctctcgcagccttaatgtcacgttccctctcatgcagatcttccgcttttttctgataatattctgcatcaaataccataagataggtcagtcttccgatcaaaacaaatatcatcgcaaaggctccggcgaataccaccagtatttttcttttatgaaatgttttgtttttcataataaaaaatcctcatagaagtttttcttataatttatgaaaacttctatgaggttatgaattccatatacttttacagttattcctgtgctgtctgtgttgttgtctcttctgcggatgtttctatagtatcagacgcaccgtcttttttctctactccaagataagggaatatatctgtcatgatctgtgatgcaagctgtgttgcataaccactgtttgcctgaacagccgagtttggctcatcaatgacaacatacaccataacctgtggattttcctgtggtgcatatccgatgaaagaaacaagatattttccatttccacgaggcagcttctcggctgtaccggtcttacctccgacagcatacccctctaccgccgcactcgcaccggttccttcctcaacaactccctgcatataatccttaatgatatcactggtctcttttgaaattgttttcttaaccagcaccggatctttgttctctgtaacatttccattttcatcctgaatctgctttacaacatgcggctcataataattgccgccattgagcagcgaacagaaagatgccgccatctgagtcattgtaacattaaaattctgcccaaatgcatttgtcgccagactggccggatccatagtcgccggtgtatacaacagtccgctcgtctctccctctcccggaagatcgattcctgtatattctccgaacccaaacaatctttgatacctgcagaattcttctgttccgatacttgcaccgatctgcatcagtgcaacgttgcacgaattctccaaagcctgtttcaacgtctccggcccgtgtcctgatctgttactacagtgaatgtcatgatctcccacgtgcaatacaccgccgcagacataattctcatttcctgtaagatctccaagttcaagacctgccgatatggtaaatggtttgaatgtcgatcccggttcatacgtattgctgacacaataattattccaaagatcattcagtatattcagcttttctttatccgtcatctttttcagctgtgcttttgtataatactttgtcagatctcttggatgattcagatcataattcggatacgaagcttctgcaagaatctctccattctgaggattcatcacgatcactccggtattcttacttccttctccctctgtctcttcatccttgtgttcttcgttaaatgcaagtatatgctgttctacaatactctgcacctgaagatcaattgttgatacaacagtgcttccattatccggttccttcacagttctttcaaatccagaactttcatccagatacccatactccctgccatctgttccattcagaatggaattatatgatgcctctattccattacttcctacatttccattcgttgtaaatccgattacatcacttgccagtgttttatacggatattgccttgtataatcttcctccagccatacgccctgcacattaggattatgcttcgtatctgctgtaatcttctcaaattcctgcgcctttgcatagctgactccttttttcaggacaatataccggctgttcggattcttcttcacctgagtacggattgctttcttcttcaaactgaagcactctgccaatacttttactgtcggattcatatactttttgttacttgttatcactttggcatcgactacaacattatatactctctcacttgtcgcaagtttcgtaccgttacggtctacgatatctccacgtttaaatggaatcgtacggttattatactgttgttgatccagcacgactttggtatatttttctcctttcgaagcattgatataagtaatccaccctatcaagaaaacaaaagctagtatgattactccaaagagcattactagctttctctgcataaggcctgaaatttttttcttaaagaaatttttcttctttcttgccatatttccacctatttcttattcttgtctgactgagcaagtacaccattttccggaatattttcatactgttttacatagtctgaagcaggattatcatattccacgatctgatcagccgcagcatatgtcatgccaagttgattgatcgctctttcccggatctcgtcaagattgacagaatccactactgcgttatattttgtcgtattttcctctttcagatccgccagttcttcctgtaatgcagtgacatgtttggatcttcgagtcagttccgactgtaagcgtacataattaacgcacaataacagcacaacagttgctgcaactgcgagaaaaatcacataagctgcattcatatgcagtgcacgatttctgttcttctgcacctgtctgcttactttcttttttggttttgcagatgattttcttcttcgcggttcatattccggcttggtaactatattaccatacatataagcctgtctgcttccatactgcatggaacgatatccaccggactggcgtctatcgcttgcataagatcttcttgctgccatctacgccactcctttctatctgatcacatatcattcttcattaagaacgctcaaatattctgagtttcgcacttttagaacgactgttatactctaattcttcttcacttggaagaatcggctttctggtaacaacacgccctttagaaacattgccacatacacacacaggaaaatccggagggcaggtgcatggattctcatttttcttaaatgcactctttacaatccggtcttccagcgaatggaatgtaataatacacaatcttccacccgggtttagtatttcaatcatgtcatccagagaatttttcaatacttctaattctctgttcagttcaatccgaatagcctgaaatgttctctttgcaggatgtccggattttttctgatatttcattggtattgaagctctgataatctctgtcagctgccccgttgtttcaatcggacttttcccgcgtgccgccacgatatgttttgcaatattttttgcaaacttatcctccccgtagtctctgatcacgcggtacaaatccatctctgagtaatcattgacgatgtctctggcagtcatcttctgacgtctgtccattctcatatccagaggtgcatcttcgcgataggaaaatccccgatctgccgtatctaactgataagaagatacgcccagatcaagtacgattccatcgaccttgtcaattccctgttcttgaagcttcgacttcatatcacaataattgcttcggattattgtgaccttctccccgaagtcttttaatcggatgcctgcagcttcgattgctgcttcatcctggtctattcctataatactccctttttcaccgagacgcctgcacacctcgtatgcatgtccgcctccaccaagcgttccgtctacatagataccatccggcttgatgtttaatccttcaattgtctcattcagtaatactgatttgtgttcgaatcccatatcttctccctctagatactgaatccgttttcttccatatcagatgcaatatcttcaatgttaagttccacttcagcattcttttcatcccatcttgccttatcccagatctcggcacgcttccccataccgatgaatacaacttctttatccagatgtgcaaatgtacgcagtacagaagggattagagttctgccttgcttatcaaggtcgccgtccgctgcacttccctgaaagaaatatgcaaacgcacgtgcttttttgtcagtggtggttggcaatgcattaagtttttcttcaaaagtgttccattctgcttccggatatacgtacagacaattctccattccttttgtaatgacgaaatgctcccctaaatcgtcacgaaacttggccggaatgatcagccgccctttggcatcaatattatgactgtactctcctttcagcatagaattctccttttcccggtggtatcttctgaagttcttccggtaaaatcagttattcttcctttccggcttcatccattttcataccactttgttccacttttcaccactttctaccacttgaacccattgtaaactacttttttactgttttcaagccttttagggaaattaagagaattttaaggcaaaaaaatagtgaacaggatttttcctgttcactcgcatttttctttcttcttctctattcggccgacgttccgttatctgacaaagactgactgagacttgctattgcagaataatcaaccgttacttcctgcttcggctgttttgactcatatatattatatatagaaaaacctgccattcctatcagtgctgctgcaacgatacatgccacacctctgcgcagatagctttgtatcttttcttttttcatctgttttttccggtttttcttcgcttctttatatttatctacttttgcctgactcatagttcttttgctcctttttttccgatgtatctattctaccacactccatcggattatacaactacaatcacgcctccgtcagctgcatacatactactgatccccgcagtatctacaataataatatctttgaatcctactttttcaagaagcatatttttcactgtctctgcgcgttctctgcaattgcagtgagaaatcgcaagtatcttctcttccgggttcttaagatcagccactatttgttccaccattctgaccagcccttttttcattcctcttgtatttgcaagctgttgaatatttccatccggagtagatcccatcaccggcttaatatttaatgccgttgcgaccactgcttttaaccctttcagtcttccgttctttttcagtatatccaatgtttccagtaagaaataggtatgctgctcttcaatataagcttctactgtatcaattacttccttaaagctgagtccttttttctcacattcggcaatcttcaacccgatcagcgtctctcctaccgatgccgatctggaattaaatacgtaaatatccttctctccgtattcttcttcgtataaattctttccaagtaccgcactgttataagaaccgctgagttctgcagacaacgtcactgcatatatgtgctctgcctcacagtgatattcttccatataacgttccggagacgggcatgatgacttcgggcattcttcagattctctgatcttcttcaaaaaatctgcctgatcaaatgtttcatcatctacgatatgatgtccgccaacatcgatctgtaacgaagctgtctcgaaattccccgatttcttcatttcttctgtcaattcaccacaactatctatgataatcttgtaactcatatattcctcccaatgcaacgtattattactttatattattgatatcaaaactctttccgagtcatctattctcatcagaagtagttttaaatactacattatttatcatagcatatttgaaaaagaaatgaaagctttttattcagcaattttaatctttgaagagactcccaatgccagtcccatttccgccattaagaatagcaccgacgtaccgccatagctgataaagggaagtgtgattcctgttgtcggaatacaattgatcacaaccataacatttaatattacctgcaatgcaatatgtgcaaatattccgctcaccactaatgaaccataaagatccggtgcattctgcgcaataaataataatctgtacagaagcattccgaacaggatcagaaccatgattgcaccaaatactccaagctcctcacagataatagaaagaatcatatcattctgaacttctggaatgatcattttctgggcactgttaccaagaccttttccaaaaaaacctcctgatccaattgcatacaatgcctgcatgatctggtagccgccttctgatgcatatttctctggattcagccataccagaatacgtctcagacggaagttcccgctggtctccattgccataccaagaaccctcgcaccgacaattcctattaaaataattcctacggcaattatgataaatattcttgtctttggatgtaccacaaaaatcataatacacgtaattcccataacaataattgccgtacttaaattttctgtaataataaagactactgctgctgaaaaagccccccatgccagtactttcacaattccttccagcgtctttatctctcttcccatcgtacagatcaatgccggaataaacaatatgatcgcaatcttggcaatctctgccggctgcagctgctgttcgaacggaagtttaatccatctttttgctccatttacttcttttcccaatggtgtctttacaaggaacatcataaaaatagaaataaaatagaagaactttgatctttcaaaataccaatgataatctattctacttacgatccacatcccgatcaaacccacaatgcagaacaggacttgtcttttaaagtaaaacaggctgtctccgttttgtttcatcattgcgctgtaagagctcgtactatatagcatgaccagtccaaaacagatcaggcagatcaatattgccagcagactgtaatcgaagtatgcgatgctgtgttctttctttttcactctggtattcgtgcttctttttttattttcttttaccatattctactctccaatcgtatctattatactcagatacgttcttaaaaacaactgtctgattcacaactttctttaattttcatatactattattgcataatcttatcgaaaggagtactttaaatgccaaattatcgttataatacgccggattatatgcgtcaaaaccattctaacggatgtcatgtcggtggaagcaacagaacaatgccgccttctgtatcaccgtccacaccgtcccgtccgtgctgtaatatttacgatcacgacaaattaagcggtctttccattgcaatggcctatgttccatggcaggagtggcgttctctctatgaagttgaaaaaggattccggtgcggaactatttttgccgaactgaatcttccattttgttggaaaggtggtagccctcgatgaatgaaaacagaccttgtaaaaaagagcttctggaatggatcaatatcgtaagttttgctgttgatgacgtaaaattatttctcgacacacatccaaattgtcctgaagccctggaattctttgatgaatttaaaaaacagcgtgtgcaggccttaaaggaatatgcaaaatattatggacctctaacactggatactgcaaatacacctatggattgctggaaatggatcaatgaaccttggccatggcaggaaggaggatgttaatttatgtggaattatgaaaaacggttacaataccctgttaaaattactcagacaaatccgaagattgctcagattatcttatcacagttcggtggaccggatggagaattaggagcttctttgagatatttttctcagagatataccatgccttataatgaagtaattggcacactaacagacattgctaccgaagaatttgcccatatggaaatcgtatgcgccattgtacaccagctcacacgcaatctgactccggaacagcttgaaaaatccggttttgataaatattatgttgaccatacacttgctctttggccacaggctgccagtggaactccttggagtgctacaactttccaatctaaaggtgaccctattacagatcttcatgaagatatggctgccgaacaaaaagcccgtactacctatgataatattttgcgtcttatcaaagatcctgaagtctgtgatccgatccgattccttcgcgaacgtgaaattgttcattatcaacgttttggagaaagcctcagaattgtccaggataaattagatagtaaaaacttctacgcatttaatcctgaatttgatcataaatcttgttgtaaataaatataaaaattctcccactgatattttttctgtaaaaaaagcaaccaacatatgttgattgctttttaccttttatatataccttcaaaactgcatacaagaaatattttcttcatcctacctatcaccttgcttggtcatgccctcgaccgattagtatcagtcagctccatacattactgt

SEQ ID NO: 2879 - DNA, 20534 bp, Unknown
  gut microbiota DNA sequence
aggttcacgtcaggtgactcgtgatacaaagcattataatcttcaaatgattattgcggttggattcaaggtgaataatgagcgagcagtgcagtttcgtaagtgggccaatggcatcgtaaaagactacaccatcaagggctgggtcatggatgatgagcgcctgaaaaatggtggatctgtgcttacagtagagtattgttacaacaaattgtaagcagatattaacagataacagttgcatttagtattttagaagcgggatatcaggagtatattgcaactgttttaaagaagaatttttaattaaatgtatttataacatattaaaaaatacagtatataaaacataaaaaaccacaaacccagatttccccacacctctcacaaattcaagtgatgtgtccaacggggagattattttattgacaaaaagaaggaatcccccatgaaccaacaagaaatattcacatacatccaaaagcaataccccacccacccgaaagaacaactttcatggaggttcaggcagagccggacatgataggtaactacagcgaaatgtagcacctgtcattgtgatcgagtgtgatctggatgtgatgaagaatgcagattacatgattgatatgggcccgggaggtggagatgccgtgggaacgattgtagcagcaggcacgccagaggatattatggcgtcagaacagagcataaccgaaaaatatctgaaaatagaaagaggataaaaattacatgagaacatataaaatacgtttattaaaatgcagcggaaaagcccagaagatatccgcttatctgcagcttctgacaggcctcgataaagtgatggctaaccgcatcgtatcgaaccttccagccacactgtttgataatctggacgaagaaggcatggaatattttaaagaggcgtttgatttttatgaagtagaatacgagatcacaccactggaagaaacatgtgaggtgtgtggctatccatccagacaggtcattgtacttgggagaattgtagaatattatggtcagagaaatggcttcttacagcttgcgaaaaaatataattttgaaacgaaggaagacctgtctatggcaccatttctgatccgggatggtatggatgcggagaaagccgttaagcttcagcaggaactgaccaacataggaatccgttcacaggttatccgcagcggaagtccggtgacagaaagaaagcggaaaaaattctttcagagattgctctcttcggaagtatgatctataatgagcggtgcatgttttcttgtaaagagaaaatcatactgaaaaaggaaggacattgagaaagaatgaaagatttaacgaagggaaagccctcggcactgatactaagttttgcattaccgatatttttaggaaacttattacagctgacctacagtctggtagataccaggattgtcggctcgtttctgggagaagatgcactggcagcagtaggtgcgaccagcacactgagcggtctgatcatcggatttttactgggattatccaacggatttgcgattattaccgcacagaaatttggtgcgaagaacatcgcagatatgaaaaagtcctttgcaatgtcgcttgtgatcgggactggaatatccattttatttacgatagcaggactgctatttttgaaaccaatcttatatttcttaaatgtgccaaagcatctggttccggtggcgaaaggatatatcgcgatcatcatagcaggactgcttgcaacatttttatatgatgcctgtgcggcgacgcttcgtgcaatcggagatgcagtaacaccattgatcattctggcgatatctgtagcactgaatattgtgggggatctgttcttcgttgtggtattgaagactggcgtaaaaggagcagcaattgcaactgtactggcacagatcattgcatttgtgatctgctggatctatatgatcagaaaatatgagatattaaggcttcagaaagaggattttaaagatccaagtccaatcatggtaaaagagatgataagtgccggaatgtcgatgggatttatgagttctctggttaatatcggttctttgacattacaaacggcgatcaataagcttggaaaagacattatcattgcccatacagcggcgagaaagatcacggagatattcatgatcatgttcagtgtattcggacagacgatggcaacttactgtggacagaacatgggagcagggaagatcgaccgtgtgaagagaggcatctggctggcgattgtctacactgcgatctggtcaggacttacgatcattgcaagttacacgatcggaggatggctggtatatctggtaaccggaagtcataataagacagtaatcttaaatgcaacaaattatctgaagtttgatacgctgttttatattgtgactaccttgatctgtattttaagaaatgcgatgcagggattaggggatcatattacaccactgatctccagcggccttgagatggcagggaagatcgtgatcgcggccactctggttccgtggcttggatatacgggtgtgatcatctgtgaaccgatcgtgtggttcattatggtaatcccgcttttgatccagacattccggatgccggtactcaggacagaaaagacagatggaaaaatatagaggggaaatataaaaaaatataaataagaaaaatcaatttgagaggataagatagatggagatacatattcttgatatgatccagaatttaagaacgccaataggagatgtggttgttccgctcattaccagacttggagatgcgggaatcatatggatcattctgacggtattattactgatcattccgaagacaagaaagacgggggtgatcatgatggcggcattgctggtggatgtgctgctctgcaatgtgttcataaagaatctggtggcaagaaccagaccattcgatgtcaatacaacagtacaattactggtcgcaaagccgcgggattactctttcccgtcgggacacacggcggcttcatttgcttcggttacggcattgtatcttgccggagagaagaagatgtggaaagcggctcttgtacttgcggttctgatcgcattatcaagattgtacctgtatgtgcattatccgactgatattattggcggcgtgatattcggaagcctttctggatatctgggatataagattgtggaatggatacagaagaaaaagataaaatagagatagaaaaaagagcagggcaggcagcattatgctgtctgccttgctcttttactgactaccagtgcgatacagaagatcgcagcggcaaaaagtaactggattccatagttgcggtataagagttgtctctgtgcctgagtgagaacagcagagttgttcagcagattgttactgatctcataccagtagaccggaagaaaatgagccacagttttcacgccttttcccatgatatcaagtggaacgaatacgccgcacaggaagctcatgccaagtgtgacaacatttacgagggcggtcaggatatcttctttggtgataaatgtaccaagaaggaaggaaagcgcaaggccgaccagaagcagggtcaggctgttgagcatataatatggcatctttggcgactggaaaaatgctttccggtaaaagaagaaagcagggatccatgttgtaagcatccagacggagcatccgactgccagatatcccagtgcaagctgcaggttctggcttctgatggatacagccgagcaaaggattcgcttttgcagatccggctgatggaatgcgatcatgatcagtcccattacatagcacagtatggagattaacacatatggcagatactgatacatgtaaccataacccggcgtcttttcggaagaagcagattttaacattgtaacatgagaagaactgtctgtatgtttcagaatatatgcagctgcctctttatcggaataaccactgtctgtcaggacacgtgcctgattcagataggtgttgatctgctggtcgatgtagtatccgtccgtgctgcccggaatcttggataccggtaatgcctgatgctcacggaggcaggaggctttaaaatcttccggaatggtcacgatataagagacattccggttaaagagtgcgtcctggagtttcgcagtgtcatccggcatttgcctgacggtatgatactgtgataaatatgtggaaagtcctttggaaagcacgcctccgtcatgatcaaccacacctaccgtgagtgcttgggcatggaacccggtgccggaagtattgctgtcgctgccggaggcaaggattccgatcgtaaggaagattgccagatacatgaataccatcaggagattgcgtttggttatgattaaaaatcctttaaatactgtcataacgttccctccttatcataagaaatgagaagctgatacaaagcagacacatgattacaagaatcaggatacacctgcggtagcggacagcatcatcatagacactgaggcagtagaatgcatcacttaagacactggcaggattgatccggttgatgaccgggcagtgctgttcgatcacatttttcattccaccgaacatcaggcctgcaaggaaactcggcaacagtgtaacgaggacaccgattccggatttgacactgtaggacagtttgccggcgcatccgatcagaattccgagacagataccgatcagggttcccataaatgtaatgagaagaagtttcggaatgtcatgcccaagactgatatgaagtacctgggtaaggtaaagctccaggatcaggatgttgacgaaatgaatactttccagtaccagcagatcgccgagaatcagggaaagtttgtgggtcggtgtgatgctgcgccgttctccgagtgcacttaagttcgcctgaagctgaaccgtggaatggatgcttaagtagactccgcttaagcaggcaaatgcaatcagtgcgagaaaataagtcagtgtcggatctaaggaatgtccgcctaaggacttttctttcaccagtgtctggtagtcgttcagggatgaaagggcgtccgaaagcttttccggatgctgtgtggcaatatcccggatcatgtcagcattcttttcatagctgtccagaagggaagacagaatgctctggttaatgccattggaagcaatggtaagggaaggaaccgacttcacgtaatagatgccggatatttcctcccgccggagcgcttttttggcagctttttctgtcttgtaagaatggatatcaatcatgtcctgatccgtttcattcagaaatgtcaggaaagatgccgcatttgcggaactgctgtctactgtgacgatggcaacaggaaccggttcccagtcagtctctccggttcctgcaagaccggtatttccaaaggacacatagaacagggttccaaggatgagcggaaatgcgagagcccagaacatgatagagcgggaacgtattgtctgtaagaattgatattttaataaatgtaacataaagtgtccctcctttaatccctgagttcttttcctgtgatctcaaggaagacatcattgagagtcggaagctcggagaagacgcgtccgaatggaatgtcctgttcctgcaggtaattcagtacccggatcagattgtgttttgcaccgctgcagcgtaggatcattgtctgatcttggtatgataagtcaaatacatgtgaaagggagcggatatctgccaggttgtttttcgttaacgcaaccgcttcgatcgtgatcgtctcaccggtcttgatcattttttttagttcttcggttgtgccggaagcaagtacacggccatgatcaatgatcgcgatacgggtacagatctgttccacctcttccatgtagtgagaggtatagatgatggtagatccctgacggttgagttccagaatcccttccagaatcttattacggctctgaggatctacagcaacggtcggttcatccatgatgatgagtctgggcttatggacaatgccgcatgcgatattcagtcttcgtagaagtccgccggagagtttcttcgggcgcatcttacggaaatcggacagaccggtgaatgcgatggcctcttccacgagttctcttcgtttttgtttgtctctgatatagagtccgcagaaataatcgatgttttcatagacggacatctgctcaaagacggcaacgttttgcatgacaacaccgatatcctgcttgatatcgtagctgtccggcttcatatcctttccaaagatcgtgatcgttcctttgtcatattttaacagtgcgagcaagcagttgatggcggtggttttaccggaaccgtttggtccgagcagtccgaagatctcaccttcttcgatgtcgagtgacaggtggtcaagcgctaacagatcaccgtaacgttttacaagattttctatatgtacaagcataagatttcctccttgatgatttgttacttgtagtatagcggatggctgattataatggtagtgtcacaggtcataagttgaatgtgacaaatgtaatataggagaaaagaatgagaaagataacagatgaaggatttttgttcctttacggagtaggacttctggtgacagcggaaacagggcttcctgcggttatcgctattctgcttgtgtgtatctatacctgtgtgaatctggtaggggaagaaaagtatctgcattatattatgacgattgttttcgtggcaaccggaattgttttcaaagaaatgtggatatttctcccggtggttttatataatatgctatgcttttattctccggtttatataggggttggtggtataatcgtggcctgtgaggcgccggcgttccgggaatattacgggctggaaaaagagatgcttattgttgccgggctggcagcagcagttctgttatatggacggaccaggaggctaaatgaattggagcaggaatataaaagggccagagatgacagtagagaactgacactgatgctggaaaagaagaatcaggatctgctggaaaagcaggacacagaagtatatctggccacactgaaagaacggaatcgtatcgccagagagatccatgacaatgtgggacatatgctgtcgcggtccatcctgatggtgggagcattaaagactgttaatcaggctgagaatctgaaagtcccgatggagcagctggatcagacgctgaacgaagccatgacgaatgtaagacagagcgtgcacgatctgcatgatgagtcggtaaatttaaaagaagtgatggaatcgctggcagaagaattccgtttttgtccggtacagcttacttatgatatgggatatgatattccaaaagagatcaaatacagctttatagccattacgaaagaggcactaaataacgtgatgcgccacagcaatgcaaatgaggtgaagattttggcaagagaacatcccggactatatcagctgatcatagaagataatggaacgtcagataagcggatccagtcagatggagacggggaagaatatatagagcaggaaagtgccggaaagaccggaaacgttcgaaaaacagaaaatacagaaagcagcggaatcgggatcgagaatatgaaaaaacgtgtccgcatgcttggcggaaccatacagatccagaaagaaaatggcttccggatatttattacggttccaaaaaatgaggggaaaagatgaagatagtaattgtagatgatgatatcctggtgtccagtgcgttaaagacaatcctggaagcaggaggagaagtagaggtaactggcaccggacaggatggaaaagatgccgtccggttatatgatgaactgctgccggatgttcttctgatggacatccgtatgaaggatatgaacggtctggatgccgcagaacagattttgaaaaggcatacggatgcaaagattcttttgcttaccacgttttctgatgatgagtacatcgtaaaagcattaaaatatggtgtgaaaggatatctgataaaacaggattacggcagtatccttccggcactgcaggcggtgcagatgaatcagaccgtattcggaactgcgatcatgtccagaatcccgggattgcttcagaaggagcagaaagaaaaagagcagacatttgactggaacagttacggaatcggagaacgggaactggagatcacagcattggttgctgagggactcagtaacaaagagatatcggagaaagtctgcttaagcgaaggaacggttcggaattatatcagcaatgtgctcgagaaactggagttgagggaccggacacagcttgcggtatattatttacaaagaagcagaaagtgagaaatagatgaaagcaaataatgaatatacaaaagcgatcaactggaagctattctaccggaacgtatttgctctggttattcctatcgcaatccagaatctgatcaatgtcggagtcacggcgacggatgtgattatgcttggaaaagtcggagagaaggtgttatccggagcatctcttgcaggacagatccaatacatcatgacactgatcttttacggagtgacttccggagcaaccgttctgacggcgcagtactggggaaagaaagacaccagaacgatagagaaagtcctgggtatgggattaagtgccggactcatcgttgcggtagtattcgcaggagcagcccttggcatgccggagacactgatgcggatctatacctctgatccggaagttattgcagaaggtataaaatacttaagaatcgtaggattttcctatgtgttcatggcggtgacgcaggtttacttaaatatcatgcgtagtatcgagagagtgatggtagccacattcatttatctgatctcgctgcttatgaatattgcggtaaatgcggttctgatcttcggactatttggattcccggtaatgggagtaaggggtgcggcaatcggtacattgtgtgccagagcagccgagacagtgatggttctcgtttatgccatcttccgaaataaagtagtaaggatccggcttaaagatatggtgaagatcgataaggttctgttaaaagatttcgcagtttattctatgccggtggtattaaatgaactgatgtggggactgggaacgtcggcgaatacggcggtgatcgggcatcttggaagcgcagcagtggcagccaactcggtggcgcaggtggcaagacagcttgcaacagtcgtaacattcgggatttcccatgcaacggcgatctatctcggcaagacgatcggggaaggcaagatggaactggcaaaggcatacggaaaacgtttcgtgtggttaagtctgattcttggaatcctgggtggtgtgctgatactgatctcggcaccaatcgccaatgcgaatctggcactgaccggaccggcaaagaattacttaagtttcatgttcttcgttatgtcgtattttactgtggcacaggcatttaataccacaatggtagtaggggtattccgtgcaggcggggatacgaaattcggattgatcatggatgtatcgacgatgtggggattctccattttactcggggcagtggcggcatttattttgcatgccagtgtgccggtcgtatatgttatactgatgagtgatgaactgatcaaagtaccgattactttaaagcggtatttgacatacaagtggctgagagatgtcacaagggaacaaaaagaactggaggaaatgtaaaatgatcgtattaagcaaggagcagatcgaagaaatggtcgatccggatcagatgatggatcagatcgaagaggcataccggatctatggatcaggcgagttctatatgccgccaagaccaacggtagaacatgaaaataagcagctcatgtatatgccatgttacacaaaggatatcatagggacaaagatcctgtcgatcttcccggagaattctaaactgggattgccgtcgatcgatggtatcgtgttactgaatgattatacgacaggcgcgccgcttgctgttatggacgggcaatcggtaacggcatggagaaccggagctgtcggcggtgtggggatccgtcatctgtcaagaaaagactgtcgcaccgtaggaatcatcggagcaggaatgcagggattccatcaggctgtgtatgcatgtgcggcaagagatatccatactgtatatgtgttcaaccacagtgaccgtgatctgacagattatctggaaagactgaaaaaagctattgataaggaagatgtaaaggtagtacaatgtaaagcagtggaagagcttgtacgaaacagtgatatcatctgtacaacaactccttctaccacacctgttcttccagatgacaaagaacttctgagaggaaaatgcatcattgcgatcggctcttatatgccggagatgagggaaatcccggatgcagtactggatttggtggacaatgtatacattgaactgccatacgcatgtgaggaaagcggagatctaagccagcccctggcaagtggaaaacttacaaaagaccgcataaaactgatgcatgaatatctcgtatcgggggaaaaagagatcaaagaaggtcagacaacatatttcaaatcggttggaatgggattatttgatgtgtgtatcgcacagaaattatatgaagtagcaaaggagaaataacattatgaaaatcgtagcaacagaaaaagcaccaaaggcacttggaccatactcacagggatatgtacacaacggagtattgtatacagcaggacagatcgcaatcaatccggaagtgaatgatgtagaagcaactacaattgaagcacagacagagcaggtatgtaagaacttaggagaggtcttaaaagaagctggaacatcatttgacaaggtattaaagacaacatgcttccttgcagatatgagtgactttgcagcattcaacgaagtatatggaaaatactttacatcaaaaccggcaagaagctgtgttgcagtaaagacacttccaaagggagttctgtgtgaagtagaacttattgcggctgtagaggagtaagacaaatggcagaagaacaaaaaacaggctgcagcccgtctgattgtgcgggctgttcccatgcaggtgaatgcggaagcaaaccgcagagtctgatcaaaccggaaaataaaaaatcacacatcaaccatgtgattgcagttgtcagcggaaaaggcggcgttggaaaatctatggttaccgcatcgcttgcaaggctgatgagagaacagggattttctgtaggtatcatggacgcagatatcacaggtccatccattccgaagatgtatggaatccatgaaaaagcaaaaggggatggagaaaatattttcccatgtgaggcaaaggatggaacgaagatcatgtccatcaaccttttacttccggaagaagatgatccggttatctggagaggtccggtcatctcaggtgttgtcacgcagttctggacagatgttgcatggggagaactggattatctctttgtagacatgccgccgggaaccggtgatgtaccgcttaccgtattccagtcccttccggtagaaggcattgtgatcgtaacttctccgcaggatctggtacgcatgatcgtaaagaaagcttacaacatggcaggacagatggatatcccggtacttggaatcgtggagaactacagttatctggaatgtccggactgcggacgtaagatctccgtattcggcgagagccacatcgacgaagtggcagaagaactcggcgttccggtcatcggtaagatgccgatcgatgcaagccttgcagaggcagtggagaatgagaactttgcagaagtaagcaatgattatcttgcggaagcagtgaataaactttagaagataccatttttgtgataaaaaattaacttatggatttactgttgacttagagaagataacctgttatgctaattgcatagttgatggatgaatttgtgagatacctatatacaaagtgcataaatgagaaagtaaagatagcacgcagcataggagccgaaggggcatgcaaaaactctcaggtaaaaggaacgaattcggacgacgctctggagaacaattagaattgtaccgaagaagtaatctttcaggtaaaaggacagaggcagacaaaaaacacttttgagaagaaagtattttttgcctgcttttttaatgcttaaaatggggaatgggcatgaaaagcaggcagattccgaaggaggtaaaacaaaaatgaacagaatcgaagatgtaacaaattacatcacagaatgtgacaaagaaattggggaagcactttcattagagcttggcagacagagaagaaatctggaactgatcgcatctgaaaatatcgtaagtccggcagttatgctggcaatgggaactgtaccgaccaataaatatgcggaaggttatccgggaaagagatattacggcggatgtgaagatgtggacattctggagaatctggcaatcgaaagagcaaaagaattgttcggatgtgaacatgcatgtgtacagccacattcaggagccaatgccaatactgcagtgtatcaggcatttttggaaccaggggacacggttatgggattaaatcttgcacacggcggacatctgacacatggttcaccggtgaatttatccggaatcttatatcatttcgtaccatacaatgtgaacgacgacggatatctggattatgatgagatccgtaagaccgcacaggaatgcaaaccaaagatgatcgttgcaggcgcatctgcatatccaagagagatccggtttgatatctttgaagatatcgcaaaggaggtcggggcatatctgtttgtagatatggcacacattgcaggacttgtggcagcgggactgcaccagagcccggtcccatatgcagatgttgtaaccacgaccacgcataagacactcagaggtccgagaggcggtatgatcatgtgtaaagagaaatacgcaaaagcgatcaacaaagccattttccctggaacacagggaggaccgctgatgcatattattgctgcaaaggccatctgtttcggagaagctttgaaaccggaattcaaagaatatcagcagcaggtgatcaaaaatgcgaaagcacttgcacaggcaatgcttgacgaaggtttcaatctggtaagtggcggaacagacaatcatctgatgttagtggatctgcagaatatgaatatcacaggaaaagaactgcagaacagactggatgaagtctatatcacagtgaataaaaatgccgtgccgaatgatccggcaagtccgttcgtaacaagtggaatccgtatcggaacaccggcagtgacaacgagaggtctgaaagaagaagatatgaagaccatcgcaaaactgatcaagatgacggttacagattttgatacaaaagcagatgagatccgtgaagcagtaaatgaaatctgtggcaagtatccactttacaactaggaggtattagcaatggaattaaagactccactttatgacgcgcatgtgaaagccggtggaaagattgtagaatttgggggatatcttctcccggtacagtatgaaacaggtgtgatcaaagaacatatggcagtacgtacacaggcaggactttttgatgtctcacatatgggagaagtactgtgtgaagggaaagatgctctggcgaatctgaaccagatcctgacgaatgattttaccaatatggtagacggacaggcaagatacagcccgatgtgtaatgaacacggcgggacagtggatgacctgatcgtatataagaaatcggatgaacactactttatcgttgtaaacgcagcaaataaagacaaagattatcagtggatgttacgtcatcagtttggcaaagtaacattcaaagatgtatcatccgagtatgcacagcttgcactgcagggaccgaaagcaatggagatccttaagaagctgaccgcagaagagaatattccaaagaaatattaccatgcagtattcgatgctgaagttgcaggaatcccatgtatcgtttccaagacaggatacacaggtgaagatggtgtggaactgtatctggcaagtgagaaagcagaagaaatgtgggatgcattgttagaggcaggaaaggaagaaggactcgttccttgcggactgggcgcaagagatacgctccgtatggaggcagcaatgccattatatggacatgaaatgaacgatgatatcactcctcttgagaccggactgaagttcgcagtgaagatggcgaaaaatgattttattgggaaatcagctttagaggagaaggggactccgcccatcaaacgaatcggtcttaaagtaacgggaagaggaatcatccgtgaacatcaggatgtatacgtagacgataagaaaatcggacatacaacaagtggaacacattgtccgtatcttggatatccaatcgcaatggcactcgttgatgctgattctgtagaaattggggatacagtagaggctgatgtacgtggaagaagagtggcagcagaagtggttgcacttccgttttataaaagagaaaaataaaaagatataataaaaagatataaaggagaataatatcatgattttaaaagaagaattaaaatattcaaaatcacacgaatggatagcattagacggagatacagcagttgtaggactgacagattacgcacagtcagaacttggtgatctggtgttcgtcaatcttccggaagtaggagataccgtagaagcaggagaagtattcggagacgtagaatctgtaaaagcagtatccgatgtctattcaccggtaacgggagaagtaacggagattaacgaagaactcttagattcaccggaactggtcaatgatgatgcctataaagcatggtttatcaaagtaaaagacgtatcagcaacggaagaacttttaactgcagatgaatataaagcatttgtggaaagcgagcaggagtaaacctaagtcattgaaaaaggcggtgaaaaagcgatgggaagctatgtaccgaatacgttagaagaacggaaaaaaatgcttcgggaaatcggctattcgtccattgaggacttatttgcacatattccggaagaagtaaaattaaaaggggaactggatattccgaaaggaaagacagagtttgaagtgcggcgtgagatggaacagattgcagaaaagaaccaggtgttccggacaatcttccgcggagccggagcttacagacattttatccctgccatggtaaaaaatgtgacatccaaagaaaatctgctgacagcatatacgccatatcaggcagaaatcagtcagggaatcttacagtcgatcttcgaatatcagacgatgatctgcgatctgaccggaatggatgtatccaatgcatctgtatatgacggtgcaactgcagcggcagaaggtgttgcaatgtgtcaggaaagaaagagacataaagcattgatatcaggaactgttccgccatatgtaatggaagtggtagagacatactgctttggaaacggaatggaactggaagttattccggaaaaagacggactgacagataaagaatatttaaaggaacacattgatgcacagactgcatgtgtatatatccagcatccgaattattacggtaatctggaagatgcagaagagatcggtgagattgtacacgatgcaggagcaaaatatgtgatgggtgtgaacccgatttcacttggagtgataaagacgcctgcagaatatggggcagatgtggcagttggtgaaggacagccacttggactttcacttggattcggaggtccttatctgggattcatggcaagtaaggaagcaatgatgagaaagcttcctggaagaattgttggtgagacagtcgatcataacggaaagaccggatatgtattgacacttcaggcaagagaacagcatatccggagagaaaaagcttccagcaatatctgttcgaaccaggcactttgtgcactggcagtcggagtatatcttgcaacaatgggaaatgaaggtgtcagacaggctgcggtactttgtacttccaaggcacattaccttgcggaagagctgcaaaaaataggatataagatatgtaacaaggcagaattcttccatgaatttgtgacagaatctgcaataccggcagaacagatattaaaggcacttgaagacaagggaatccttggcggatatccactggatgagcatcatattctgtggtgctgtacggaagttaatacaaaagaagagatggatcaggtgattcggatcttaaaggaggtgccggcatgttagtatttgaaaaaagcagaccgggaagaggatgtgatctgttaccggcatcggatgtagagatttatttacctgaggaaaaagataaaagagagttgccgcttcatcttcctgaactttcagaaggagaactgagcagacattatacagaacttgctaagaaatcacatggagtgaatgacgggttctatccacttggatcatgtacgatgaagtataatccgaagatcaatgaagatatggcttcactgcctggatttacagaaatccacccgctacagccggagcataccgtacagggatgtctggaagttattggggagattgagaattccctttgtgagatcacgggaatggaccgtatgacgttacagccagcagcaggagcacatggtgaatttacgggacttcttctgatcaaagcttatcatgagagcagaaatgatgagaagagaacgaagatcctggtaccggattctgcacatggaacgaatccggcaagtgcggcaatggccggatataaagttgtaagtattccgtccgcaccggatggaggtgtagatattgaaaaattaagagaggcagcaggagatgatgtggcaggattgatgcttaccaatccgaacacagttggtctctttgataagaatattctggaaattacgaatatcattcatgaatgcggcggtctttgctattatgacggggcgaacttaaatgcagttatgggtacggtacgcccaggagatatgggatttgatgtgattcatctgaatcttcataagacattctccacgccacacggcggtggtggtccgggaagcggcccggtcggatgtaaggaaatgttatccgacttcttgccatcttatctggtggaaggtgaagagacgttacatctggaaaaaccggcaaacagtatcggtgagatgaagagcttctacggcaacttccttgtagtagtaaaggctctgacctatatcaagacactcggaagagaaggcatcccggaagcaagtcagaatgcagtactgaatgccaactatatgatgaataagttaaaagatctgtatccgatggcatatgatgagatatgcatgcatgaatttgttatgagccttgcagatctgaaaaagaagacaggtatttcagcaatggatattgcgaaaggtctcttggacgacggtattcatccacctacaatgtacttcccgctgatcgtggatgaagcactgatggttgaaccgacagagacagaatcgaaagaaacactggacgatgcaatcgcagtattccgcaaattatatgaactggcagagacagatcctgaaaagttacatcaggcacctgtgacaactccggttacaagactggatgaggtcaatgcggcaaggcatccacatctgaggtatgagttttaaggaaaagtgaagagaggaacagctatggtcacaaagcttacatatatagaaagcgatcaggtgaacccatataagaatcttgcagtggaggagtatttactcctccactgtgaggataaagagtgtattttgtatctctggcagaatcagaatactgttgtaatcgggcgtaaccagaacgcatggaaagaatgtaaagttacaaaattagaagaagagaatggtcatcttgcgagaagactttccggtggcggagcagtctatcatgatctgggaaatctgaactttacatttttggtaaataaagatgaatatagtctggaaaaacagttacaggtaatcataaatgcaatgggacggttgggattgaaagcagagaaatccggaagaaacgacatcctgatcgatggaaagaaattctccggtaatgcattttatgagcaggaaaaacactgctatcatcacgggaccattatggtagatgtaaacaaggaaatactgtcccgatatctgaccgtatccaaagataagttgaaatccaaaggtgtggattctgtaaaatccagagtgacaaatctgagggaatatcttccggagctgacactggaagagttaaagaaggcacttcgcgaatcttttgaagaggtttataatctcaaatcggaagaaaagaagatgcaagatctggatgcagatgaggttgaagaaaagaaggcacatttttcatcctggaaatggctgtatggaagaaaactggacttccagtacgagatgagtcacagatttgcatggggcgggattactatgcagtttcaggtagatgcaggaaagattaaggatgtggaagtctattccgatgcgctgaacattgaactggcggaggcaattccaaaatttttaaaaggaatcaaataccgaaaagaaaccatgtgtgtgcagcttggattattctggtcgaaggatgagaatgtcgaaaatatgatgaatgatgtgattgcctggattcaggaaacagatttatagaaatgataagaaaaccttgtaaagatcacagattttacaggaggaaaatgaaatgagcggaaaatatgatgttgtggtaatcggtgccggaccggggggatatgtggctgcgatcaaagctgcaaagctcgggcttaagacggcaattatagaagaacgaagagccggtggaacctgtctgaaccgtggatgtatcccggcaaaagcaatgatccatgcgtcttcgttatacagaaaaatgcaggaggcagaacggttcggaatatcagcttcggatgtaacatatgattacggaaaaattgttgcttataaagaagaaacaacggacaaactggtgcagggagtcgagcatcttctgaaggcaaatggcgtagacgtatacgatggaaaaggtacgcttttggaagaaaaaaaagtgcggatcaggaaagaacaggaagatgttgtgctagaaggggaaaatattatccttgccagcggttccaaaccattaatacttccaattccaggaatggatagtgaaagagtcctgaccagtgatgcactctttgcgatgaaagaagctccgaagagtctgatcattatcggaggcggtgttatcagtgtggaatttgctacagtatatgcgaaccttggatgcaagattacaatcctggaagcaatgccaaagttagtaccgaatatggataaagagatcagtcagaatttgaagatgattttgaaaaagagaggtattgatattcatacttcggctgcagtacagggggtaacaacagaagacggaacctgtacctgtcactatatagagaaagatcaggaacaggaagtaacggcagattacgttttgtgtgcagtaggacgttgcccgaatacggatggtctgtttggggaaaatgtaaaaccagatatggagcgcggccgtgtgctggtgaatgcgaactttgaatccagcatcccgggggtctatgcaatcggtgatctgatctttggtgtacagcttgcacatgcggcaagtgcccagggaatcgtggtagcagaaaaacttgccggaaaagaaccatccatagatctgagtattgttccgggatgtgtctatacagatccggagatcgcatctgcaggaatgacagaagatcaggcaaaagaaaatggaattgctgtaaaatgcggcaagttcatcatgagtgcaaatggaaaatctatcattacgcaggaagaacggggcttcatcaaagtcgtagcagacgaagcaaccggcaagattctgggagctcagatgatgtgtgccagagcaacggatatgatcggagaatttgtgactgcaattacaaatgggatgactgtagagcagatgcttaaaggaatgcggtcgcatccgacttataatgaaggaatcggggaagcactcgaggaactcgaaggcggtgcagtgcatgtggtgccgagaaagaaaaaataaattgggatttaatttattaacggggaagcggcctctcagtcctcgaaggaaacaatagataaggcttcttgttcaggttccataccataagaaacactaagagagtcagaatcacc

SEQ ID NO: 2880 - DNA, 229 bp, Unknown
  gut microbiota DNA sequence
tcagtggaagccactacggttacgcaattgccatttattcgtaaggcatttgatacacacggaataaaacttggaaaggcgttccagtgaatgtgaaagaggcgttggtaattcttaaggggcaaaattctgcgttaggttttcaaaatttgactgcctgaggcgtatgccgagtttcaaattttgaaagcctgcttttagcagaattttgcccctttagaattgaccc

SEQ ID NO: 2881 - DNA, 1839 bp, Unknown
  gut microbiota DNA sequence
gaaaggacagatatgataaatatatcgagaatggggctgtttgctgtagtatgacgcagacggaatctgtcagtgagacgctgtaaatcagaaaaagtgggggactttaagatgggagtaatggatgttataaaatataatggaaggccggatgtcttcgcatggaaatatccaggtgaagagcttggaacatggtcgcagctggtagttaatcagtcacaggaagccgtgcttgtaaaaggtggaagtgtggcagatgtgttcggacccggcacgcatacgttggatacaaagaatattccgattctgaataagattattaatcttccgtttggcgggaaatctccgttcaaggcagaagtatggtatattaataaaggatattatctagatattaagtggggaacgccaacaccgattcagatccaggatccaaagtatggaatatttattccgatacgctcgaatggagcatttggaattcacgtaacagattcggtgaagtttctgacaaaacttgtgacaaccatgaatgtttttgacgcagagactgtaacgaagtatttcagaagtctgtatgtgacgaagataaaggatacgatttcttcatatctacttcacagaaagatcagtattcttgagatgaatgcgtacatagatgaaatttcacaatatatgaaggagacaatctgtccgataatggaagagtatggactgggactgacttcattttatgtaaatgaaatcagtacaccggaagatgatccgtctgtgggaaaaatcaaggaggctttatccaagcgtgccgagatggagattataggctacaattatcaacaggagagatcctttgatacattggaaaatgcggtcagtcacgggaatggagatgcaggttctgtgatgggagccggaatgggacttggaatgggatttggcgttggaagagagatgggaaaccagttttcttctatggcacagaatatagatttgcgcggcggatatagaaaatcaaaattctgcccgcagtgtgggagcgaagtcctggcgggagcaaagttctgttccgagtgtggaagccgtcttataagcaaagagagacactgtacacagtgtggaactgtgctggaagggaatctgcgtttctgtccggaatgtggaaaacgattaggtggggaggaaatataaaatgttgatcatgaaaaagattctgtcagttgtggggattatcggaggaacatttttccttctggttgcagcaatctgcgtggaagcatggttctctgatccggcatatgcagcggatatggaaatttcaggattgattatgtgcgttgttcttggaattttcggggtgatcttgattgtgttcggaatccagacactccgtctgcaaaagttttatcgagaatataaagagattgcagaagcttcgaatgatggatttatcccggatatggcagcaattcttaaccagccggaggataaagtacgtcgaaatcttgaaaaattgtgtaaaaagaaatattttaacgatgcttatgtggataacaaggcaaagttatttgttcgaaaggatcagatgagtcagaagattggtaacccctcttttacaaagacggtcaaacagacagatgcagaacttgttactgtaaaatgtaagggatgtggtggtatcaacaaaattcaaagaggagccgtgggcgagtgtgagtattgcggttcgccaatcagcggggaataataaaagtaagacctattgtggaagcattatccacgataggtctttcaaattgaaactgcaaatactattctgcggtatactgatcaaagagatcc

SEQ ID NO: 2882 - DNA, 8360 bp, Unknown
  gut microbiota DNA sequence
ggcattcagtcctgccgccagatcttcttttgttccaccggcattgatgtaattcattacatgagaatagatacatggctcgcattttcttgaaacagctgcgacaaggattaataattccattgttttcgcatctaacgatccggaattttccattgctgcagtaactgtagcaccgaaagcccccattacttccgaattcgcttcagcatacacaccaaactgtctctggtaatcggctaatttttcctttgcattcatttttaaaaacctccatgattaaaatttgataaggtaagtataacatggtgggagcagaagaggataattgataattgttatgtgaggtattgagatggtctattgcttaagagctcatgttttttcatctctattttatttcttgacatataatgcaccaggaattacaatatatttaacgattaggttaaatgttaaatgagagggcgggatgaatttttgggtatacaagatacattaaaagcattggctgatccaatacgacgcgagattttgaatttgttgaaaaatggtcggctttcagccggagagatatgcgaacatttttcagtaacgggagcatctatatcaagacatctggcagtattaaaggaggctgatttgattcgaaaccaaagagaaggaaagtttatttattatgaattaaacacttccgtgttggaagatgtcatgttgtggataacagacttgaaaggagcatcggacgatgaaggaaatgataaaaaattatagaggtacattaattagctctggactggtaattcttgcagggattctggtaggttttacgagtatacagggtaagtggttaaatgtattttttatagtgatgcaatgtgcgcttgtgacaatcatattttatgataacaggaacagacaacaaagtcgcaaggttatagggatgactatatggatcatacctgttattacattgatttataacggtattgccagattggtcaacatgggagcagatacagagaatttatttatggcattgatttattatggaacaggtttaatgtttatggttataggaaattatctgccaaaggtaaaacagaacaatacgataggaatcagggtcgtatggacattgcaggatgaagaaaactggaatgcaacgcatagattcagtggaaagatatgggtggcatcaagtattctgtgtatgctttgcggtctttttgcagaaagcatagcagcactcgttttgtatattgtaagtattatggcagccgcgatcatcagtgttctttattcctatctcttttataagaaaaagataggaaccggagaaaaattaaaaattcagtataacaaaaaagtaatagtggtgtacggaatcgtaacaattttaacgattatatttattatagtgactttgttttggggaagtattgatattcacttccaagataataattttactatcgaggcgcagggatggagcgattatacagtagcctatacgcagattgacagtatctcatacgaagagaatttattacagaactcgaatgattatagaaccaatggtttgggaaattttaaatatgctatgggaaattttagaaatgatgtttatggaaattatattcgttatacacattcgtcctgtcattcatatgtagtcatgagtgtagatggaaaaatattggttataaatggtgaaaatgattcggcgacagaagaaatatatcatactatcagtgagaagatgtcacgggaattagaatagagtcatctcattctcaaagctgatactatatttataggagaatttaaatgcttcaaatacaacatataaaaaaagaataccggacgggaagcttggtacagaaggctctggacgatgtgagtctgaatctgagagataatgaattcgtagcaatcttaggtcccagtggttccggcaaaaccacacttctgaatattatcggaggactggaccgctacgacagcggagatcttatcatcaatggcatttccacgaaaaaatataaggacagagactgggattcgtaccgtaatcatacgattggttttgtattccaaagctacaatctgatcccgcatcagacggtgcttgcaaatgttgagctggcactgacgatttcgggggtcgggaaggaagagcgaagaaagcgtgcagtggatgcactggagaaggtgggtcttgggcagcagcttcataagaagccgaaccagatgtcgggaggccagatgcagagagtcgcaattgcaagagcgctggtcaatgatccggaaatcctgcttgcagatgagccgaccggggcactggacagtgacaccagtgttcaggtcatggatcttctaagagaggtagcgaaagaccgtctggtcgttatggtcacacataacccggaacttgcagagcagtatgcgaccaggatcgtcaatctgaaagatggaaagatccgttcggacacagatgaatatattgtggaagaggaaaatctggcaccgccggagcataagaatatggggaaatcttccatgtcttttctgacggcattgtcactgagttttaataacttaaggacaaagaaagcaagaacccttctgacttcttttgcaggatctattggaattatcggaattgcactgattttggctctttcaaatggcgtcaacgcttatatccggtccattgaggaggagacattgtctgaatatccactgcagatacaaagtaccggatttgatcttacttccatgatggtgggtatgaatggggattccggaagcagtgatgataagaaaagtggaaaagataaagacaaggtaaaggtcatgcaggtggtcaccaatatgttttcaaagatgaattccaatgaccttggtgctttaaaaaaatatctggacagtggtgaatctaagattcatgactatacaaaagcgatagaatattcttacaatgtgatgccgcagttattccggcaggacggtgacaatgttcgtcaggtcaatccggatcagtcattttcctcattgggacttggtgcatcgtcaggttcgaacagcctaatgtcctccatgatgagtaccaatgtgttctttgagatgccggaagatacggatctctatgaagggcagtatgatgtaaaagccggaaggtggccgaaaaaatataatgaatgcgttcttgtgctgacgcctgatggttctatgagcgacttcttattatatacattgggacttagagatcaggttgaactcgatgatatgattaagcagttcatcaacgaagagacgataaaaacgcctgaaaatattggaacttatacttatgatgatattttgggaaagacatttaaactggtaaatgcttcagattattatgaatatgacgatcaatatcaggtgtggaaagacaaaactgacaatgcggattacatgaaaaaactggtcgaagacggtgagaatgtaaaaattgtgggaattgtacagtcagccgaagatgcgaaggcttcatcactgacaccgggaattaactataccgcagaccttgtaaatcatgtggcagaacaggcaaaaggcagcgagattgtaaaacagcagcttgcgaatccgaatgtaaatgtatttaccggggaagaatttggcaatacagatgggaacaatggatttgacatgaattctctgttcagtatagatgaggatgccctgaaaaacgcatttggttttgacagcagtgccatgaacaatcttggaagttccatggatctgtcgggacttgatctttccaaggcatttcagatggacggaaattctatggatttgtccggtatggtgaatctggatcaggtagaaatcaatatggacaatatgccgaagatgaatctgggggatattcttacgaatctggatgtacaggtcaatgcggatggcatgcagaaaatgttatccggcctttcggaaggttatcaggaatatgtaaagagccatccggaagcggattattccaatcttggaaatcagattgcagaatatctgacttccgatcaggcaaagaccattattcagaaatatttgaaagacattctgaaaaataacggcgaaattacgattacagcggagcagatcaaggaactgttgaccagtgtgatgagtgattttcaaagctggcttacagagcagaacgctaatccgggtgcagaggaatttggaacgtacttccagcagtatctacagaccgggcgtgccaatgcaattgtaaataaatgggccaatgaaatatttggagatatagatttcaacatttccggtgacacactgcaagctatggcaaaagaactggcagaaggttatactgcatatgcaaaagaaaagaattatgcagatccgacaaagatggcagagaattttgtgaattatataaagacggatgatggaaagaggcgcctgaatcagggactttctgaggcaatcaatatggatagtctccaaaagcaaatcagcacggccatgagtagctacatgggtcaggccatgagtgcatataccggtgccatttctcaggcaatcagtacacagatgacatctgctatgagtcaggtgaccacgcagcttgccggtggacttgaaacggttatgacatctgccatgagccggattggagaaaatctgcaaaaagcactgggaggctctatgaactttaatgccgatgcatttgcaaatgcattccggttcaatatgacggaagatgatctgacggaacttatgatgtccatgtctgggacacagagcgcttcctatgataataatctgcagcagttgggatatgcagatttcagtcagccgagttccatttccatttatccaaaagactttgataataaagaaaaagtggtagaggttttggatcattataatcagaaaatggaagatgagggaaaagaagaacaggtaatttcttatacggacattgtaggaacgatgatgtcatcagtgaccaccattatcaatacgatcagctatgtattgattgcatttgtagcaatttccctgctcgtatcatcgatcatgattggagttattacttatattagtgtactggaacgaaagaaagagattggtattttaagagccattggagcatccaaaggaaatatctcgcaggtatttaatgcagagacatttatcatcggattctgcgccggacttatcggtatcggactgacgcttttgatattgattccgggaaatatgctgatacatgcacttgcagacaataaccgggtcagtgcaatccttccaatcgcaccggcgatcgtactgattcttttaagtgtggtgcttaccttacttggcggattgattccttcaaggaaagctgccaagagtgatccggtgaccgcacttcgaacagaataatgaaaaataaaagtttacatggtaaaaaggtttgtgataaactaattattggattgtaaattcacggtgcaggggattccctgcaccgtatctgtatttttagaaagacgagggataactatgccaataggagttattatcaatgccctgtcggttgtcgccggcggtgtgatcggggcattactcgggcataaactgcctgagaagtttaattcggagcttaccaagatttttggagtctgctcaatgggaatgggagttagttccatcgggcttatgaaaaatatgcctgccgttatttttgcagtgattatcggaactgcatttggtttggctgttaatcttggaggaatgattaatcgtggagcggtttgtatggagaaaccggtgggaaaattattcccgaataagaataaatctatgtccagggaagaatatatgtccatgcttgtgacaattatcgtactgttctgcgccagtgggacaggaatctacggtgcgttggattcgggaatgagtggggatcatacgattctgatttccaagtcgattctggatttctttactgcgatgatttttggaggaacattggggatggtgatcgcagtggttgcaattccgcaatgcgtgattttccttattatattcgcagcagcaaaatttatctttccactgaccacaccggatatgattgcagactttaaagcatgcggtggtttcctgcttctggctaccggtttccggattgcaaagattcatgatttcccggttgcagatatgattccggctatggtgcttgtgatgccggtgagctggttctgggtaaatatgatagtaccggtactgtaaagtagtggataataaaatatgtttcatagtatgtttcagaattagaagaaaatggaaaggtatgcaatgaacggatatttttgtgtattaactacaattgattttttcgttttatgttttatgtgtattctcacatatttgagcgaaacgcttagcaaaaaacaaaagcgtggtttctttcttgcctttgttctgatcgcagggatttccgtactggaagtcattactcttgtagtggatggtctgcctccggggtaccgctggctgaatattactgctaactatcttggctttggtctgtcaccggctgtgtgcatctgtcttgtatatgtcctggacaggaaaacagccctgcggcgtgagatcagaacggcggtgcgtattgaaatcggatatttgatttttctttttgttacgattccatgtggaatggtattttccgtgagcgcggataatatttattcacgtggtccgcatttttatatatatgtcgtcatgtattttggggcgatcttatatctttctgcatctacggtcattaccgccagggagtttcagaatcgcagcagacttctgatctatccacttattcttttcgtgatggcggaaacaatcattcaggttgctcttcccgaacttcatgttacctggttatgtgttacgttgctatcggtattgtattttatctattgcagcgagatgtggaatcagttggatgcacttacagggcttttgaaccagaacagctatctgaagcagacaggtggggtgaggtgcaaaggaggagtgctggtcgtgtttgatgtggatgatttcaaacagatcaacgaccgatacggccatatacagggagatcgttgtcttgcaggaatcgcagaatgcatcaaaaaatcttatgcaaactttggatattgctatcgtataggtggtgatgagttttgtgttcttctgaaaaacggtggcaacgaaggaaggtgtaaacaagaatttttgcagagactgcaagaaaaacgaggggagattgcatttttacctacggtatcctatggatcagccccgttttccggagaggatattgttaaggttaaagacagagctgaccaggatatgtatcaatataaaaaagaacgtaagaatcggaaaagattatcctaaaaagagtttatattagaataattatagaagataaggtgaaataattgaaaaatgcaaatggttataatgagtcggacatcagaaaagactaccacaatctgacaaaattattaatagagaagaatatgacgatcacgacgatggaatctgccacatcagggcagattgcatctttgattaccgataccgaagggtcatcagctatattaaaaggcgcatttattacttattgcaatgaagccaagatcatgcagggggttccggcagaaatcctggataaatatacggtatattcaaaagaaactgcagaggccatggcgaaagcctgtgcgaaaacatacaatgccaatataggtattggtgtcaccggtacgatggggaatatagatccggctaatccggatgcatctgttccgggacgggtatattttgcaattgtgacagatggtaaagtggagtcgtattatgtggaattagaaccacagcctacacgtctggcttataagctggcagttgcaaaaaaagtctgcgatgcacttatgagacagctggaaaatttagacagagcatgactcatttcattatgagagagttatgctctgtttttgtgaaaatgtatataagagaatgaggaatagaagtagaattgtctgaattgtctaaattgaagaaaatataaaaacaatgttgacaattcaaacgcccttgtggtatattaatctggctgtcgcgttagacaaggccgtgaggtaacagagtcgaagcagaagacggcggaaactgattacggaaaagcagagaatgccggatcataatcagaaatcttcgggaattgttcctgaaaaaaagaataaaataacagttgacaaacacaactgcttgtgatattcttaataagctgtcgcttgagacaa

SEQ ID NO: 2883 - DNA, 7496 bp, Unknown
  gut microbiota DNA sequence
gccagtcatactgaaaatttttccagacaatctgataaaataatttcgtgtattttcccgggaacgatagtcttctccgttcttcctctttttctgctttttcttttctgaaactttcctttgcctgctccacggattctttccagatgtcaatcatgcggatcaccagaaattcaaccacattcactccggtaagtacgaggggataaagcatcgtcatcgtcgtattatcggcaatcgttgcgaggccggtcgtcaagtgtaacagcatggccgcatatcccaacaccataacgataatattcagtcttttatcttttcttaatattactgtcattatatacgcaaccgaacataattcatataacccaaatacaataagcgggatttttagcaacaggagattcccgttccatatggatgcacctgcctccgacaaaccgcttgttccatatctcttcacatgaaaatatgcactataaagattatatcttttcccttttaatacgaaccagggaagctgggcaagaacaagtgaaatgatataaagaatgatcgatacactcatttctattttttcttttttggatatatgtttcttctcatcaaccattttcattactccgttttctctacaactctttcatcttcccaagaatctcttgataaaacaattcctgatccccactattcttcaaatcttccagaatcaaaccatcttttaataaaatcagccggctgcaatagcttgccatctgtggatcatgtgtgaccatgatgattgtctttcccatatgttcgtttatatccttcaacgcatcaatcacgatcttcccggacttggaatcgaggtttccggtcggttcgtccgcgaggatcagatctggattattgatcagcgcacggcaaatcgcaactctctgtttttctccgccggatacttcatatggctgcttctcgagaaggtgtgataaaccaaagttttcggcatatgcttctacattcttataacacttatcaaccggtgccttgtccaacaccatcggcagcatgatgttctcctttacagacagactatttaacagataaaaatcctgaaacacaaatccaatctctcttcttcgtatatccgccagttcatcactccataattcggacgcatcctttcccgtaaagaaaatcttcccggaagtcggtttgtcgatcaagccaagcacttttaaaagtgttgtcttaccgcagcctgattttcccatgatcccgacaaattcctgttcttcaatggtaaaatccagcccttttaaaactttaatttcttcttcatcctgtctgtcagaatagaccattttataattccggacaaggttctccactttcataacttcccgtttattcatcttttccttccacctttcgaatgataaatcttcctaatatccatgcaaatccccactgtactgccagatacataagccatatccagacagcatgtttcagccatgcaattctgacggaatgcgtatacatccgagcatgaaacgttgctgctgtaaagatactggtcacgactatcgttatcagctccggcagccagtaaaagtaatacagttctcttttcaggagtgatactcgttctttctttcgcattcccatacatttcaaaaagtcagcccttgctttcttatcactcatttctgataacgatttaatatacatcaggaaaaggccggagatggtcattgtaagcaatacgaatgtatttataatcagtttcatcgtatattctgtcttcagatcattgactgccgtcttttttgaataccagcaatgtacttcggaatcatactgcgcttcatatgtatgattcttttccagctttttcattttcttttcaattgctttctggtattttgggtctgtctggatcagtacaagcttcgtcggaccctgcttaattgtgacaccatctattcgcaaggccttttcttctatcttgtctccggttaatatgttcgtgtatttccacattccctgtgctttcttgaaatatgcatccgagaatacaacgatattttccagttttccctgacggaaacatccaatcagacttccaatttcttccccttctattgttcttttcggatatgctttgctcggcgaatataaggtataatattcacacggaagaccgatatgcaaaaatggtttcttctttccaaatgtccaatccaccggctgtgccttcacggagcgatcctgttggtgcaccagatatatcttctttccatttcgatcaagatgcattgcttcttccttatacgatggatctacatattttttcaattgtttgtatgtcgattcagaaatcccgatctgttgtccctgcggtctttttccttgttgcacgccttcgttttgttctgtcttatctgcatttgccacgcgcaccatcggatattctatgatttttgcctgataaccgttttttatcctatcaaaaatcgcatcatctccatcatctgcaatacagacaaaatcatacggatacagactttccggctcctctgcaatcgttaccgaaactacctgaaacagaaagtaaaacactgcgcatacgttcaatattgtaagtgccagcacataccttgcagttgtctttgatttataatacaaatgattccggttcagcatctgtggcagatatgccggtgtcttttttgcacgtctcaaatatccggctcctacaaaacgaatcagtaaaaatatacccgcaaagaatgcaaagagcagatacatactttcatgatttctcaactgccggtattcgaatatagcgatcatacagattatgattccggctgttatgaataactttgtcctcctctgcggcataggttcttttgcaatgtttctgatcgatgccctgaccagattgaaatccgatacgatatccctggtcgccatcaatgcaattatatacaccgccaacaccaccaacgtacctttcacataagtaagccacgtcacctttgacagaacaattccttttgccagcattgagaaaatcactttccggaacagaaacatgatcatatttcccaatagaccgccggcaatcagcgaacacaaaaaagcgactacgatctctatcccaataatcgtatacaacgctttttttcgaattcccagcgtcacgaatacactgtaattctgcgtccattttttcatgtaaaatacgagaacaaacaccatcaaaaagatggcacataccgccatcggaagcattgcattcagcaatatccttccaagtccttcacccagcaggaaattctctgcccggtgagccttcgccatcatctgatatattccaagtcctgcaaaggagaatgcagaaacgattacaccacagaacagcaggaggccgtaatctttccagtcatatttaaaattgtgccagaccatctgataaaaaagtttggtataattccccggaaaatataatctcctgcgctcttcttctttttcttcccgttccttttccgcaaatatttctgctgattccttggcatctttccatacatcaagcatttttctaatcagcacttctgccataacaaatatcatgatgattgcagaaatcagaatcgtttttgttgaattatccgcaagcattccaaatccggattcattcaccacaatatatacacctagaacaactaacgcagcgatattcagataatattccttatgcagccactgtgtcactgtatgtaatacaatcacgatctgaaatacaataagcagtattaactgtatccggattatcgtaagattcccatcccagacagacgctgccatctccgaaagtgcttttattcctttttctttgattcggaaatatgctgcatatatactgtaatttttccctttcaaaaccacccacggaagctgaataaaaatcaaaatcataccgtacataattgtcgatacgatatatcttcttttctttgtttctttcatattcacctgcctcctatccgtaaatagtaatcacaacctcaaaccgatcctcctgacttttacactgaaacattccattgtattgttctacaatatcccggatatttttcattccataaccatgtaacactccatccttttttgatacaaaattttcatctgtctgtattcccgtatttttagccgcatttacaatctcgatgtataagagctgattcttctttttcatttttatatgtatccagcgttctccttctttgatctgctcacacgcttccgacgcattgtccaaaagatttccaaaaagtgaaatgatctctctgtcagaaaacggaagcgttgtgaatacttccgtgctgatctgcatctgcgtcttttgcttctctgcctccttctctttctggttaagaatcatatccagcatatggtttcctgtccagatctggtaattgtaatccaacatgtcctggctgagttcgttcagatattcttccaatcccttccagtcctgttcctgcgtatatttctttaatgcaagcaaatgattcttcatatcatgaacaatcttccggctctttaacatttccctatattgttcttccatcgcctttactttcatctggagcatcttcttatcctgctcttccagttcagctctgtgctgttctgtctcaacgtcccatgcttctgcctgaatatcaagaaatatccagattcctatgacagccagaaacagcatcatataacaaaacatcggcatagaataaaattctgcaaatccggtagatgctatagccataaagatgtaaaatgctgcaagataagtaatccaaacaaatacatgataatttgttgattgattcccgttttttatgcactggtataattcatacaattctatactctgaagcaaaatcaggaatattaacatcagtaaaaatataaacgcaactacctgtgaatgtttccatttccacatatgctgttttaaaaatgtatgattatacatcttgatgtaatcattttcctgaaaggtcttaattacatacatgtgaatcgtattccattttctatttatgcgcatccacgggaagaaacagtacacttgcaataaaatccccataaaagtatctacttttctcttttttgtccatccattcattttatcgttctccatcttattttcacgtgaaatctttatagttattgtaccatgccttttcttcttccgccttataacggccatgaatagcgggttttctgaccatgaaattttaaaaatctggatctaccgtggtaattacacacagaaaaaccgcatgttttctttcatcccctgctatacgaaaaacggtcagacatgtcttgataaacatatctgaccgttcttataatatgaccatgcattagtataaagctgctacccacagaacctgccactaacaatttcttacagatacttttcgttctgtatttctttcataatattctctacttctgaaacatcgacctctaacattgccgaaatttgctctgcagaatatttttttgccatcttctttttaattaaacttttcaaaagtgctttttcgccttctattcttccctcagcaattccttcctgttttatcataatccgttcttcccacgactgcatatacttcacctctgtcttttcacttgctttgatctgacaaactcgtctatgcatctcttgaatccgcttacttttacactcccctgatacttcatccgtactacgttccatatacttcaacaattctatcaattctggtgacaccagctcgggatgcttgcccctggtattcagaagtatgatatccaacatcgtctttacattttccggatcatccatcgcttcatcgaacagaaatttgtccagcaagtttaattcttttaataattttctttggttcataagcagttctcctctcttgtacagatataatacctgcaaagaagaactgtttagctttatgcatatgataacgcagaatttatatatataccagtatataccgttatcttcttttatcagacatgtattagctttttatgattttcatcttggattcttacccgattgtttgggcttgaaataaatgaattggtaaatataaatgcgttgcagatttttgtaaatcttctacaaattatccccgggcaattttactccacagacatatattatattgtagacacatatatgaaaggaaggttaaaaatatggctcaatttacgaaccaggcacaactccgttacggaaattctgttactaattcaaatattgccgtcggtgagattctcgaagtattgtcaatctcgaaaactgcagtaaaaaatacctatcatccgggaggtaccgtcacctatattataagtattattaactccggtaccgctccgattacaggacttacactcacagatgaccttggtgcgtatgcattttctactacttcactgacaccgttaacgtatctggataacacggtaaaatactatacaaacggaacgttacaggctgcacctgctgtaaccgcaggtcctccgcttgtcttctctggattaactgttcccgcaaatggcaatctgacactggtctatgaaacagctgtaaatcaatacgctcctctcaccaatgaatcattcattaccaacacggttactgcaagtggcgacggcattacttctatcaccgctaaggaaacggtaaatgcagaagccttgccgctcttaggtatcacaaaatctatcagtccggtacctgttactgaaaacggaagcctgacctacacgttcctgattcagaatgaaggaaacgttcctgcaaatgaagccacagccgtaatcgttaccgatacgtttaatccaatactttctaatctgactgtcacctttaacggaagcacatggacagaaggtgaagactacacttatgataaaactaccggtacttttgctaccggtgccggaaaagttactgttcctgcagcaacatttaccgtcaacgagactaccggtgaatggagttctaatccgggattcagcactctgacaattaccggaacagtataaccataaagaaatggcagaagagaccatccgaataatatcagatggtctctctcgttgcgattattttccgatttaatcctctgtatcatattgttcctcaatgatatctttcacctttgaaacatccatatccaatacatctgcaatttcctcaatggacatcttatgattcatttttctgagcaattctcttttttctttttgtctttccagcaatttttcttcccatgcctgcatatacttcacctctgttttttcacttgctttaatccgacaaactcgtctatgcatcttttgaatccgttcacttttgcactgttctgacacttcatctgtactgtgttccatatatttcaaaagttctatcagttcttggg

SEQ ID NO: 2884 - DNA, 49840 bp, Unknown
  gut microbiota DNA sequence
agaaggtcggagattccgttgtggtattgacaaaatgagcgaaaaatgaaacggagatgaagaaaatggaatatacagaatttggaaagacacaacttcgtgtatccaggatgtgtcttggtacatggggaatcggaggtgccggatgggattcttattccgacgaaagccggatggatgcgatcaaggcagcagtagattgtggaatcaattttattgatacggcacccgcctacaacggaggcagggcagaacagtatatcggagaagttgtgcacaaacttggcgtcaggaaagaagtggtcctggctaccaagtgtggaaatgaatttattaatggaaaatatgtacgctgcggggcggcagataagatcatgcgggaatgcgaagaatcactccgtaatctgaagacagattatatcgatgtatatctggtccactggccggatccgaatgttccgatggaagagacaatggatgcgcttaatacactgaaaaagcaaggaaagattctgcatatcggagtatcgaattttacaaaagaacagatggaagaagcagaaaaatattgtgctatagaagcatatcagccacagtattctatggtggatcgcaagggagagcaactgatccggtgggcctgcgctcaaaaaatgggaattatgacttatggaacactcggaggaggcattttaaccggaaaatacagagaactcaaagaatatggtgtggatgataaccgaaaccggttttacccatattttaaagaaccgttgttttcaaaagtaatgcttcttttaagaacaatggatcagatcagtgaggaacgaaatgttccattgtcgcagattgcattgaactggatcttgcagagaccttttatttcttcttgtattataggagcgcagagccgcgataaaattgaagagaactgcaaggtatttgagtggaaactaagtgatgatgagatgcagctgctggaacaggctttgaaaaagactattatataagactacaaaggaagacgaggaggaataaacattatggaagagaagcgtaccggcttatttgaaaacggtctgatctggttcggcgcaggggtttcgatcgcagagatcctgaccggaacatatctggccccgcttggcatgggaaaaggactggcggcaatcatagtaggacacatcattggctgtctgatgcttttcctggcaggagtgatcggcggtaaagtcagaaagagtgcaatggagactgtaaagatgagctttggacagaagggaagtatcctttttgcggtcttgaatgtgttgcagcttgtcggctggactgcgatcatgatctatgacggggcactggcagcagacggtgtgatgcataccggcagatggatatggtgcctggtgattggagcattgatcattctgtggattgtgatcggaattacgaatctgggcaagatcaataccgttgcgatggcagcattatttatcctgacactgattctgtgtaaggtgatatttacaggaagcggggtgggaacaccgtctgacgacagtatgacatttggagcagcagtagagcttgcggttgcaatgccattatcgtggctgccgctgatcagtgattacacaagagaggcgaaagagccggtgaaagcaactgcagtcagtgcggttacatatggaatcgtaagctgctggatgtatgtgatcggaatgggagctgctatcattaccggagagtatgacattgcacagatcatgttaaaggcaggtcttggcatcctgggacttctgatcattgtattttcaacagttacaaccactttcctggatgcatactctgctggaatctccagtgagacggttgtaagcagatggaacggaaagcatgttgctatcgttgtgacagtgattggaacggccgcagcaattgtatatccgatggataatataacggatttcctgtatctgatcggttctgtatttgcaccgatgatcgctattcagattgctgactttttcctgttaaaacaagacaagagcagtcgggcagtatatgtgccgaatatgatcatctgggtgattggattcgttgtgtacagaattcttatgaatgtagatatgccggtaggaaatacattgccggatatggtgatcacgatcatcttgtgtctgatcgccgggaaattaatacctgaaaaaaatcagaaagaataaaaaagttaagaaaaatggccgctgtaccggtagtgaataatctgctggcgcagcggccattttttatgattaaaattcatagacaaaatctatcaactttcataaaaatactaatttgtcttttatttaacaaaatcatataatcaaattataaagaaatgcaaacaaatacaatcatatttttatggaggttaataaactatgaaaaacaattttccacacgtattcagccctcttacgatcagaggtatgacactcaaaaaccgtgttgtaatgatgcctatgggaagtgatttcgccggacatgatggggaactgagcgacgaacatatcaaatattatgagctgcgtgcacgtggcggcacagggcttatcatggttgaaaatgtctgtgtaaaatatccggaaggatcaaacggaacgacacagctgcgtcttgacaaagactgttacattccacgcctttttacattaacggaagcctgtcacagacagggggcgctgatggggattcagatcaatcatgcaggtgcgtctgcgatgagttccagaatcggtatgcagccggtatctgcgtcacgttttccatcaaaagccggtggggagattccgcgtggactttcgaaagaggagatcacaagcattgcaaaagattatggaaccgctgcaaagagagcagtcaatgccggatttgatgttgtagagatccatgccggacactcttatctgatcagccagttcttatcgcctactacaaatgaccgtacagatgaatttggcggatctgctgagaaccgagcccgtttctgccgtatggtcattgatgaagtccgtaaggctgtcggacctagagttccgatctctctgcgtcttagtgtagacgagcttgtcgaaggtggtaatacggtagaagattgcctggaatatctggaatacctgaacgatgaagtagatatcttcgatacttcagccggattaaatgcttctatccagtatcagatcgatgcgaactatctggaagatggatggcgttcatacatggcgaaggcggttcgtgataaattcggaaagccgacgatcgcgatcggaaatatccgtgatcctaagatcgccgatgacatccttgccagaggtgatgctgatctgatcggtatgggacgtggactgatcgccgatcctgactggtgtaataaagcacaatacggggatgtatgtgatatccgtaaatgtatctcttgtaacgtcggctgtgtcggcaaccgtatcggcggtaacaaaccgcttcgctgtacagtcaacccggatctgataggcggagaagcttataaaaaacagaaagtaaataaaccatgtaatgtcgtagttgtaggtgccggaactgccggactggaagctgcatgtacagctgccgaagttggatgtaaagttacgttactggagaaagagaaagaagcaggcggtctgtcggtagaaatctcgaagattccagccaagaaaagacttgcggatttcccgacttatctgaaataccgtgcatcaaaacttccgaatctgacaatcaaaacaggagtagatgcaacggtcgcagagatcaaaaaatacaccccggatcttgttgtaaatgcgactggttcggtaccgctccttccaccgatcgaaggactgcatgacaatcttggcaagaaagatgccagcgtgtattctatcaaagatatgatcgcagatgttaagaactatccggaagacatgacaggcaagaaggttgttgttgtcggaggtggtgcggtaggacttgatgttgttgaattctttgccccacgcggtgcagagacaaccatcatcgaaatgatgccggttatcggaaacggactggatgcatcttctacatcaagcatgaaagaatgcatggaaaaacatcatgtaagacagatgacgaatacagccctgcagaaagtaaatgcacattccttcctcgtaaaatacgatggaaaagaagaagaacttccgtttgactatggtttcgtatgtctcggaatgagagcgaatgccccgatttggaatgacattcaggaagcttttacaggtgaagatgtggaagtcctcaacattggtgattctgtacgtgcgagacgtatcattgacggaacggatgccggacgccatatggtattgaatacccttgaaagattgaactatctttaaaatatgtccctaaaagggaacccctttccaatataaatataaatataaatacaaagaagcttcggagaatcctgctacctgtgattctccgaagctttttgtgaaaataactatctccgggtccacttctatgatatgatatagtataactgatcaataaaaaaacaattgggggaaatacgtaatgaaaagtttgctgattctcggtgcaggcggattcggccggatggtagcggagactgcgcaggcactggggtatgaaaaggttgtatttttggatgatgcggtgaaggatgaagcggttatcggaatgtgctgtgattatgagatcaggcatagggagtatccggtggcagtagcagcatttggaaataacaagatgcgtctgtactggacggataaattgctggaagaggggtatgaggtaccggcaatcgtgcatccgtctgcagttgtaagtccgagtgcggtgctggagccgggctgctttgtgatgcagagagcggtggtaaataccaatacccggatcggacgtgcggtgctggtgaacagcggggcgatcgtagatcacaattcggtagtatgtgccggagcgcatgtcggactgggaagtgttgtaaagtcagactgtacgatcgagagcggacgcaaagtggaggcaggagaagtaatcttctcaaccagaaggaagatcgagggtgtggatagccggagcctggaagatgccgtgtacgcatttggtttcgggcagcagtgcagttatgtgaagccgttcggagaaggccacatcaatgagacttatgcagtctatatgccgggcgtagatggaaaggatacgccgctctatgttttgcagcgcatcaatattaatgtattcaagaacccggatcaggtaatggcgaatatattcggcgttacggagtatctgcgcagtatgatccgtgaggaaggcggagatctggacagagaggcattgtcttatattaagacaaaatcaggagagagctattttgaagatgcggacggacagccatggcgctgcctgcattatgtaccggattctgtgtgctatcagatggtggagagaccggaacagttctatcagtcggcactcagctttggccattttctgaagcagctgggggattatccggccgagagtctctatgagacgattccgaagttccacgatacggtgaagcgtttccatgatttcaaagacgcactgcggaaagatgtgaagaacagggcaagactttgccgtgaagaaatagagtttgtactggcacgcgaggatgactgcggtgtccttatgaagcagcttgaggaaggaatacttccgctccgtgtgacgcacaacgatacaaagctgaataacattttgtttgataagaatacaggagcgggattgtgcatcatcgatctggacacgatcatgccgggacttgcggcaaatgactttggtgattccatccggttcggggcgtcgacagcggaagaagatgagaaggatctgaacaaggtgcactttgatatagatctttaccgcatctacgtgaaagggtatctggagatggcgaaggatgtactggcaccggcggagaacgccagtcttccgtggggagcgagacttatgacactggaatgcggcatgcgttttcttgctgacttcctccagggcgatgtatatttcaaaacaacttatccggaacacaatcttgttcgggcaagaacacagttcaggcttgtaaaagagatggaagaacagtttgatcagatgcaggaaatcgttgagacgttctgaaagtgagaaaaaattgttgtaactaaaatacaatttaatttctggtttaaagttgacagataataaaatacattttattataaatataagtttgatatataaagataacgaagagagttaaaacggaaggagaattcaacagatgttaaacgataattttgtaacatttgaaattggaaaagcaaagcatatcgcactcgttgcccatgatggtaagaaaaaagaactgatcgaatggtgcgacaagaataaggaaatcttaaaaggtcatttcttatgcggtacaggtacaaccgcacgtctgatcgcagagaagaccgggcttccggtaaagggatataacagcggcccgcttggaggagatcagcaggtcggagcgaagatcgtagaaggacagatcgactttatgatcttcctgtgggatccgttagaggcacagccgcacgatccggatgtaagagcattgtcccgtattgccgttctttacgatatccctacagctaacaatcttgcaacagcagattttatgctgaagtctgaatttatgaattctacatatgaaagaaaggtagagaactttaacaagaccattcaggacagagtggagaagatgaaatagaagctaaagagcagctgcgcattccgtaaaaaaaggaatcgcagctgttttttggctttttttatatttctgcaaaataagattgacatacggtatcatctgtgctattctaacactacaaactttaacgctttaaagcgcaacgctttaatgcagattagtaaagcaacaagtaaaaaagaaatgaggaaagtagaggagaaaggttatggcgatgaaattattgatgctggtgatattttttgcaattatggtatcggttggcatctatgcaagaaagcatgcgacaagtgtagacggttatgtgttaggggggagatcggtaggcccgtggcttacagcatttgcgtatggtacgtcatacttttcagcggttgtatttgtaggatatgcaggtcagttcggatggaaatacggtcttgcgtcgacatggatcggaatcggaaatgcgatcattggaagtctgctggcatgggtggtacttggaagacgtaccaaggtaatgacacagcatctgaattccaagacgatgccggatttcttcggtgagagatatggaagtaaggcgctgaagattacggcttcagcgatcgtattcatattcctggtgccgtatacagcttctgtatacaatggattgtcaagattgtttggaatggcatttaacattccttataaatattgtgtaatcggaatggcagtatttacaggaatctatgttatcctcggtggatacatggctacggcgatcaatgattttattcagggaatcattatgctgggcggcattgttgcagtcatcctggcagtattaaatggtcagggcggatttattcaggcaattaagaccatggcagagattccaagtgatgtgccggtgacaatgggacagccgggagcatttacttcattcttcgggccggatccgttgaatcttcttggagtggtcatcctgacttctcttggaacatggggacttccgcagatggttggaaagttctatgcgatcaaagatgagaaatccatcaatacgggaacggtgatctctacattatttgcgatcgtgatctccggaggatgctacttcctcggagggttcggaagactgtttgatgcaccggaactgcacgatgaggcgggcaatatgatctttgacggaatcatcccgcatatgttgtcaacacttccggatatcctgatcggtattgtagtagtattggtattatcggcttctatgtcaacactggcttcgctggtactgacatccagctcgacgctgacactggatttcttaaaagataatgtagtgaaagatatgagcgagaagaaacaggtacgtacgatgcaggtgatggttgtgttctttattgtattatcggtagtgatcgcaatggatccgcctacattcatcgcacagctgatgggaatttcctggggagcacttgccggagcgttcctggcaccattcatgtatggtctctactggaaaggcgtgacaagagctgctgtatgggctagctttgcggcaggtgtcgggattacggttctgaatctgttcttccactttattgcatcaccgatcaatgcaggagcagttgcaatggtagcaggactgatcgtagtgccggtagtgagtgtgcttacaccaaagcttaagaaggacagagtggatgagatctttgcctgctatgatgaaaaggttacgatcaccaagaaacgttcgttggaacagaattagtggaaataatctgaaaaatcaaatatattaaaaaacatcaagggaagtgattaaaattatcacttcctttttgcgaggggatatgttaggatataaaagtattaaaaatgaacaacaaagttgatgaatattattgctgatttggcagcgatgatttgatttgaaatatgaggcaaaaggagtggagcttgaattatgaagaattatcagaaatatgagaaaagttattttatgccgccggaggtcacatatgactgggcgaaaaaagatgcggtagaacagcctccgaagtggtgcagcgtagacttaagagatggtaaccaggcgttgatcgagccgatgagtctggatgaaaagctggagtttttccagatgttggtagatattggatttaaggagatcgaggttggattcccggctgcttccgagacagaatatcagttcatgagaaccctgatcgaaaaagacatgattccgaatgatgtaacggtccaggtattgacacaggcaagagagcatatcatcaagagaacatttgaagctgtaaagggagcacctcatgcagtgattcatttatacaattctacctctgttgcacagagagagcaggtgttccgaaaagataaagaacaggtaaaacagctggcgatcgacggggcaaaattacttctgaagcttgcaagtgagacagacggtaactttacattcgaatacagcccggagagtttccacggaacagaagtggactatgctgtagaagtgtgcaatgcggtgttggatgtatggcagccgacagctgataataaagcgatcatcaatattcctacaactgtagaaaacgcaatgccgcatacatttgcttgccagttagagtatgtacataagcatctgaaacacagagagaatgttgtactttccctgcatccgcacaatgacagaggatgcggtgtggcgacagcggagcttggtatccttgcaggtgccgatcgtatcgaaggtacactgttcggaaacggagaacgtaccggtaacgttgacattattacacttggcatgaatatgtattcccagggtgtagatccgggacttgatttctcgaatatgaaaaagatccgtgagacttatgaacgcttgacaagaatgcaggtatacgaccgtcagccatattccggagatctggtgtttacggcattttcgggatctcatcaggatgcgatcgcgaaaggtatggcatggagagatgagaagaaatgtgacaaatggacggttccatatctgccgatcgatccgaaggatgttggtagagaatacgattcagacgttatccgtatcaacagccagtccggtaagggcggcgtaaattacatcttaatgcacagccacggaatcaatcttccaaaggcaatgcgtgaagaagtaggatatatggtaaaagatgtatcggataaagcacacaaggagctgacaccggattgggtataccagatcttctcagatcattatattaatacaaaatccatcttccatatcgacgagtgccattttaaacaggtagatggaatcactgcggaagtgacgatcaatcatgcaggagagagcaaagtgatcacttcgaatggaaacggacgtctggatgcagtaagtaatgcaatcaagcagtattttaacatcagctatgaattatccttctatgaggagcattcgcttacaaagggatcttcttctaaggctgtggcttatgtgggaattatctgcaacggaaagacattctggggtgtaggaatcgatccggatattatcagagcttccattgaagccttgatcgttgcggtaaataagattgaagaacttgggagtgctaatgcatgtacggatgcaagaatgatcgagatcatgaattatgtacaggcgaattatattgacattacattagatgacctggcagaaaacttcttcctgtccaaaccttatctgtcaaaatacattaaggaaaaatccggaatgacatttggggatctggtgaagaagatccgcatgaagaaagcgaaagcactgctcaagagcagcaatatgacggttgagaatattgcaatgtcggtaggatatcagaatgtggaacattttaacagactgttcaagaaagcttatgatatgactccgatgcagtttagaaatcagaaatagaatatgtaatgaaaagtgacggggatgtgccggaaggtgcatcccttttaaaagtgcgtaaacggaaaaataaaaatatacatataaaaagataggaatcgagatggatttcatgtataataaataatagactttacagaaaacatgattgggaggaagagatagaaatgttaaagtacatattgatgatccttggcggtgtgatttttatcgcaggatactacttcatgcagcagaatgaaggcagggggaagacgatgatgttctattcgttgtttacttatgccggactgacactggtgatcctttccggggcaagagttctggatcctttctttgaaggactcggaaagaacggggagatgatccagctggcagtagaagttgcctgctttgtaattggtgcggaattacttctgaagcctgcgttcgaagaccagaaagagatcggaacaaagaagaatattacaccacgtggatccggagattcattcagtgcgaaggcaaataagaaagaaagcacgaagaagacgaagaaaaataataatcagattaaaagaagttacagtacagggaataaaaaatatcgtaaaaaataagacttgcataagcaagtcttattttttatgtacggtatttaattcacgaattatttaccttcaaccatcttgtcgaacttcttagtaaatgctaacatgataactccgcaggcaacgatgatgattgtaacaacaccatatgctttaacgaagtcgaagttttcgagccagttataaagtggtccataagctttaccagcgaagaagatgaccagtggccatacaccaagcatagttccaagaagtttctttggagcatatttgctgatgaatgagtttccaagtggtgagaagataacttctccgactgacatacatacagaagccaggatgattacccagataccaactggtttatctgcactctgtccgcaaagaactgctgcaagtaccatggaagctgtacaaagaccaagtatgataataccgatagctgtctttgtgaacattccccagtcaccctgtggacgctgtctcatcttagcccagattcctgcgaatacaggacaaaggatgatacaaagaagtccgttcattgagtcgaaccatgcagtaggcatctcgaaggaaccaatgttccagttagcccatccaagtcctgcttctgatactggaccgaattcatagtaaacaggcatgtaagccatgtaccagatcagccagaaaataccagagaagagtgttacgatgcagatagcaatcacacggtttctctcaagtttggtaagaggtgcattgtctttctctttgtcggctttgtcaacattttcagaacggttgtcaacaaggaatggtttctttccggcttcgccgaaggacttcattccaacgaaccaccatacgcagtcgatgaacaggaagattccacaaaccaggaacatagtacggtatccagcgctctttccaacaagtgaaaggaaagtagttccgcagaaagaaccgatgttaacgaacatgtactgtaagttgaatacagtgtcgagttcgtcctgatcagctaatgggaagagacgtccgttaataccagatacgtttcctttgaagaaaccagttccgatagaaacgagaatgatcattgcccataacattgcgatgccgttagcctctgttgctctccatgcacacagataaccaagacccataaggatctcaccaacaggaacaagaatacgaggactaatccaacggtcagcgatatatccaccgatgataggtgtgatataagtaaatgctaccaggttagaactcattgcagcaccaacggatttgtcaagtccaagaccaccgtttactgctttggctgcgatgaaaatcgcaagcccccatttagcagcgtagtatgcaagtctttcaaaagagaaagtcagacagcacacatagaaaccaaatggtaattttttcttagtgttctccatgagattcaccctccaatatgaaatttttctttggttttaacaatacgaggaaaaccccccttatgattaaaactctcaacgcagttaatcttatcacaaaccagactaaagtacaactaattgtttaagaaaaagttaaggttttttatgctttgttaggaatatgtatgttgaaatgtaataaaacgaacatatatagccggaaaatgtaagcaaaaatcactaaatgataatagaaatcaaaaataaacaggatcgcttatagagaaactacatagatagaacacatagaagagtttatagattatttacaaataatataaaggatgttcttgaataatcaactatataaggatataataagacacatattttgtaaaggggaaaatgatatggcaaattattaccgtgtggcttataaggagtcaaagaacacgctgaaacagatctgtgaacttttccgtgtggacagcagtgatattacgatcaagtttatagtgacggtgatgggaccgcttgtgttctattttatgtgtaaatatggaaacccgggaggcggtacgccgggaggaatgactttttttgtcataaagtttattgtagtctgggcactggcatttgttgcggcagtgatactgaacagaacaatctggagaaaggtgttatcgacaacggcggttggggatgcagaagatcagtttgacagacgatgcagattgaacggtggaccggtgagttccgaaatccacttttttgatgatcactttgacagtgtaactgcgaaaaagacaagatcattttcgtaccaagatgtcaccaagatcctggagacgaaagaggcattcggtgtagttgtgaaggcagatcccgagacggtcggatcggcgagagcgatgatcggatttccaaagactgcactggaaggaaacaatacggacgaactggcagaatttcttctggaaagatgcaagaatgtgaagagaaaaaaagtgaagaagttttagaaaggaatgctgcagatgaaaaggctatgtgcgtacggaagaagtacggggacacatggcttttttatatttatacaggatttatatgggtcgtcaagtatttaacaaaaaacaatgtaaaggtattgcgttaaagtgccaaaaacagtataatataattggaaaaaatttggttttacttttcaacatggaaaaaacagaaaacccaatttgaaataatgaaaatggagggctagactatgggcaacatggcagcagacaatgcagcaggtaagagaatcaacagtttacttgatgcaggcagttttgttgagatcggtggagcagtaacagcaagaacgactgattttaacatgcaggaaaaagaaactccggcagacggtgtgatcaccggatatggagtgatcgatggaaatctggtatacgtatacagccaggacgccactgttttaaatggcgcgatcggcgagatgcatgcaaagaagatttctaatatctatgatatggcaatgaagatgggagcaccggtcatcggactggttgactgtgccggattcagacttcaggaagcaacagatgcattagaagcatttggaaagctttatcagaagcagtcaatggcttccggagtgatccctcagatcacagcaatcttcggaacatgcggcggtggactttctatcgtaccggctctgacagattttacatttatggaagcaaagaacggtaaattatttaccaatactccgaatgcaattcctggaaatgacatttccaaatgtgatacatcttctgcggcattccagagcgagacaacaggtcttgtggacggaacagggtcagaagaagatatccttgcagacatccgttctcttgtatgtatgttaccgtgtaacaatgaagaggattcttcttatgaagaatgtaacgatgatctgaaccgtgtatgtgcagaccttgcgaatgcaaaagaagacacagcgatcgctcttacaatgatttctgatgacaacatcttctgcgaagtgaagaaagcatatgcaaaagatatggtgactggattcatcaaactgaatggtatgactgttggtgcagttgctaaccgttcgaaagtatataatgaagaagctgaagtggaggctgaatttgacggctcactttctgctgacggagctgaaaaggctgcagaattcgtacagttctgtgacgcattcaacatccctgtactgactcttacgaatgtaagcggatttacagcaagcaaatacgatgagaaacgtatcgcaaaatcagcagcaaaacttacttatgcatttgcagatgcaacagtaccgaaggtaaatgttgtgatcggtaaagcattcggaagcgcttatgtgacaatgaacagcaaagcagtcggagcagatatggtatatgcatggccggatgcagagatcggaatgatggatgcaaaccaggcagctaagatcatgtatgcggacgctgatgcagcaaccatcagagagaaagcagcagaatacaaaaatctgcagtcaagcccattatcagcagcgaaaagaggatatgtggatacgatcatcgaagcagcagatacaagaaaatatgtgatcggcgcatttgagatgttattcacaaaaagagaggatcgtccggcaaagaaacacggtacggtttagagaggtgaggcaaagtgaagaaaaaaataagcgtattactttgtgtgcttgtcgcaatgctctgctttaccgcttgcggaagtaagaaagaaaatcttcagtatgataaatcaacgatcacacaggcaacagattttctgatcgagtattgcaacagtgcagatgcagatactatcgaacagtggaacaagatgacagatttccagatcgagtctcagctgaaccaggcaggtgttccatttacaaaagatagtttccttgcagctctggatgcatggcagcagggaacaaaagagtgtggggaatatgtaagccacggtgattacaaattcgaaccatcctctgatgaactgaaagtaacgaccagtgcaaaattcaaagaccgtgatgcagacattacatttgtttttgatgaggacctttatctggacagtacaacgatcgatgcacattacagcatcggtgagatcatggaaaaagcaggactgaatacaatccttggaatgggtaccgtattcgtaatcctgatctttatctcaattctgatctccctgttcaaatacattcctgcacttgaagaaaaattcaagaacaaaggaaaagcagaaagcacacaggaagcagctccggctccggcagcagttgcagcacctgtagtagaagaagcatcgaatgatgatgaactggcagcagttatttccgcagcgatcgctgcttatgaagcagaagtcggtggaagcacagacggctttgtagtaagaagcatcaagcgtcgtccatcaaataagtggcacgcataattaattaggaggatgaattcaatgaaaaattatacaatcacagtgaatggcaatgtatatgatgtaacagtagaagaaaacggagcaggtgcagcaccggttgcaagacctgcagcagcaccgaaggcagctcctgcggcagcaccagcagcaccaaaggcagcacctgcaggtggagcaggatccatcgaagtaaaagccggagcagccggaaaagtattcaagatcgaagcaaatgtaggtcaggctgtaaagaaaggtgatgcagttgtcatcatcgaggctatgaagatggagattccagttgtagcaccggaagacggaaccgttgcaagcattgatgtagcagtaggcgatgcaattgattcaggcgctgttcttgctacattgaactaacatcatttatatggtgtttatctaacacgactggaggttaaaaaatggaatatataacgacaacattaggaaacctcgtgcatcagacggcgtttttcagtcttacatggggcaatgtagtcatgatcgcggttgcatgtgttttcctttatcttgcaatcagacacggattcgagcctctgcttcttgttccaatcgcattcggtatgttactggttaacatttatccggacatcatgcttcatgcagaagatgcggcaaatggaacaggcggactgctttactacttctataaactggatgagtggtcaatcctcccttccctgatcttcatgggtgtaggagcgatgacagacttcggaccactgattgctaaccctaagagcttccttcttggtgcctctgctcagttcggtatctttgcagcataccttggagcgatggctatgggattctctgacaaagcggcagcagcgatctcaatcattggtggagctgatggacctacctctatcttccttgcaggtaagttacagcagacagctttacttggaccaatcgcagtagcggcatattcttatatgtcactggtgccgatcatccagccaccgatcatgaagcttctgacaacagaaaaagaacgtaagattaagatggaacagttaagacctgtttctaagcttgagaagatcttattcccggtcattgttacgatcgttgtgtgtgtaattcttcctacaacagcaccactggttggtatgttaatgcttggtaacctgttccgtgagtctggagttgtaagacagttaacagagacagcttccaatgcaatgatgtacatcgtagttatcctgcttggaacatccgtaggagcaacaacaagtgctgaggcattccttaatatggatacgatcaagatcgtaattcttggtctgatcgcattcgcattcggtacagcagcaggtgtactgttcggtaaactgatgtgtgttgcaacacatggtaaggttaatccgctgattggttctgccggtgtatctgcagttccaatggcagccagagtatcacagaaggtcggagctgaagcagacccgacaaacttccttctgatgcatgctatgggaccaaacgttgcgggtgttatcggtacagccgtagctgccggaacattcatggcaatctttggcgtaggaatttaagcgatatataattaggaggaaagaaaatggcagatatagtaaaaaaacctgtagagattacagaaacgatcctgcgtgatgcgcatcagtctctgatcgcaactcgtatgacaacagagcagatgctcccgatcgttgataaaatggacaaggttgggtatcattccgtagagtgctgggggggagctacattcgatgcatctcttcgtttcttaaaagaagatccatgggaaagacttcgtaaattccgtgatggattcaagaatacaaaacttcagatgttgttccgtggacagaacatcttaggatatcgtccatatgcagatgatgtggtagaatatttcgtacagaaatctgctgccaacggaattgacatcatccgtatctttgactgcttaaatgatcttcgtaatctgaagacagcagttaaggctgcaaacaaagaaaaagtagaagctcagatcgcattatcttacactttaggtgatgcttatacactggattactgggtagacattgccaagaagattgaagagatgggtgcaaactctatctgtatcaaagatatggctggtcttctgacaccgtataaggcaacagagctgatcggagcaatgaaagaagctgtagatcttccaatccagcttcatacacactacacatcaggtgttgcttctatgacttacatgaaagcagtagaggccggtgtagatgtcattgataccgcaatctcaccattcgcgcttggaacatctcagcctgcaacagaagttatggttgagacattcaagggaacaccttatgatacaggattagaccagaaacttctggcagagatcgctgactatttccgtccaatccgtgacgaggctcttgacagcggactcttaaatccaaagaaccttggtgttaacatcaagactcttctgtatcaggtaccaggcggaatgctttcgaacctgacatctcagttaaaagagcagggtgctgaagacaagttctacgatgtacttgaagaagttccaagagtacgtaaagatcttggagaaccaccgcttgtaacaccttcctcacagatcgttggtacgcaggctgtattcaatgtattgatgggcgaacgttacaaagtagcaacaaaagagacaaaagacctcttaagcggaaaatacggacagacagtaaaacctatgaatccggacgtgatcaagaaagtacttggcgatgatcctgagatcatcacatgccgtccggcagatctgattccggatgaattagacacactccgcaaagaatgcgaacagtggatccagcaggatgaagatgtactgtcttacgcactgttcccacaggttgctgtagacttcttcaagtatagagaagcacagcagacaaaggtggatgcgacagtagcggatacggaaaacggtagttatcctgtataggttttcggggacgtcaagtgtagaagttcctggtccaatgcgacttcgggtgcttgcaaggcgtaagcgaaaaaaagacgataagataagaaccgaatacattcggacggaaaatcctgatgattttccgcctcaggtattcttttgggatgtgcttgtagcacatcccaaatcttattttatcgtctttttttcaccaacaccttgcaaagcaccctgcgaatgcattgaaccaggaacttctacgcttgactgttcgcgaaaatatacgaggatagcggggagtgtggcttctcaggaagtagtggaaaaagcgagatgaaagacgttttccggcggagccccaatagcttggtggtaacagtaaattcacttccggttgtcggagtgtatggctgagggagatgtggaggtttgggtggatgggcatccgttggcgggagtagaagatgttaaaagaaagtttgggcaaaataaggattcgctctgtgctacaggcacagagcgaaagaatacctgaggtgagaaatcatcagatttctcgccgaatgtattcggtgcctggttttacccaagctttctttgttacatcttcttcccgtccataagcgcccatccacccaaacctccacatctcccgtccccacacaccctgacaccgacatccgattgactattcccccacaaagctatataataaaaccattgtttgaaaaagaggtacatcgcatgagcgtaaaaaatgaactgctgaagatgatcgatgaaagatatcagaaattcagcaaaggacagaaaaaactggcggattttatccgtgaggattatgataaagcggcttttttgacggctgcgaagatgggggaagaggttggtgtcagtgaatcgacagttgtgagatttgcaactgcccttggatatgacgggtatccggagttccagaaggctctgggagaactggtgcggatgaagctgaattccatccagcgtatggaagtgacgtatgggcggatcagccagggggagatccttgcttcggttctgcattcggatattgagaagatcaagcttacgatggaagcaattgaccatgaggcgtttgaaatggcggtagatacgatcttaaaagcaaaacggatctatgtgatcggaatcagaagctgctcgccgctcgcaagcttcctaagcttttatctgaatctgatctgcgagaatgtaacggctgtcaatacgaacagttccagcgagatttttgaacaactgatccgtgtcagtgaagatgatgtggtgatagggatcagttttccgagatattccatgcgtactttgaaagcactggaatttgcaagcaatcggaaagctacggtgatcacactgacagacagtgtacattctcctatgacgttgtattcttcctgcaacctgatcgcaagaagcgatatggcatccattgtagattcactggtggcacctttgagtgtgatcaatgcactggtcgtagcgctctgcatgaagaagcagaaagaggttattacaacgcttgagacactggaacagatctgggatgaatatcaggtgtacagtaaggatgaactgaatatggtgggggatagagttgaactttccggaaatgaaaatggaaaaccagagaaggataatggaagatgagtaaagtagttatcgttggaggaggagcggcaggaatgttcgcttctatcgcagcagccgaatgcggacatcaggttgtagtatatgagaagaatgaaaagcttgggaaaaaattgtatattacaggaaaaggaagatgcaatataaccaatgcctgcgatatggaaggattatttgaggcagtcagaacaaatgcaaagttcttatacagcagtttttacggatacacgaatcagcaggtgatcgatttctttgagcggatcaatgtgccggtgaagattgaacgtggagaccgtgtgtttccggtgtcggatcgttcttcggatgtcatccgtggtctggaacgggagatggaccgtctgggcgtggaagtgcatctgcgcacggcagtaaaaaaaatagtggaaaaagacggacattttgaaaaagtaatactgggagaccagacgcaggtttgtgcagatgcatgtatcgtggcaacgggcggattgtcttatcagtcaaccggatccaccggtgatggcttccgctttgcagaaagcctcggtcataccgtgacggaatgtatgccggcgctggtaccgatggaatgcaaagaggactgggtgcccgaactgcagggactttctcttcggaatgttaatgtgacgatctgtgacggaaagaaaaagctgtacgacgatttcggagaaatgttatttacgcattatggtgtgagcggaccgctgatcttaagtgcgagcagttatgtcggaaagaaactgaaagcaaaagaactgactcttaagatcgatctgaaaccggcgctttcagaggagcagctggatcacagggtgctccgtgaatttgaggagaatcagaatcgtcagtttaagaatgcggtacacaagctgttcccgtcaaaactgattccggttatgatcgaattgagcgggatcgatccggaaaagaaagtcaatgtgattacaaaagaagaacgtctgggattcgtcagactgatcaagaatcttgagtgtacgcttacaggtctgagagattacaatgaagcgatcatcacaaaaggtggaatcaagatcaaagaagtcgatccgggaacgatggaatcaagacttgtgaaaggattgcattttgccggagaggttctggatctggatgcagtgacgggtggatttaaccttcagatcgcctggtctacagcgtatgcggcgggaaccggaatagaaagcgcagatgaataaaatagaaaataaaaacagaggagagataccatgggatataatgtggcgatagacggaccggcaggtgccggaaaaagcacgattgcgaagcttgtagcaaaggaaaaaggatacatttacgtagatacaggagccatgtacagaggtcttgcgattcattttctggataaagggatccagccgcaagagacagagaaagtgatcgaagcatgcaaggatgcggaagtgacgatcgcatatgaagatgccgtacagcatgtatacctgaacggaaaggatatttcatcacgtctgagaaatgaagaggtgggaaatatggcatctgtaacctccgcaattccggaagtgcgtaagaaactgctggaattgcagcagaatcttgcaaagacacagaatgtgatcatggacggaagagacatcggaacctgtgttcttccgcatgcggatgtgaaagtatatctgacggcaagcgttgagacgcgagctaagagacgttaccaggaactgcaggaaaaaggggaagactgtaatctggaagagattgcacatgacattgaagagcgtgaccgcagagatatgacgcgtgagatcgcaccgctgaagcaggcggaggatgcggttcttgtagacagttcggacatgacgatcgccgaagtggtgaaaacgatcgtagatctgtgcagatagatgaagttggcagagaaaggaattgcatgatatgaatgtcgaacttgcaaagacagcaggattctgcttcggagtgaagcgtgcggtagataccgtataccaacagatagaacaataccggggagagaagatatttacctacggaccgatcatccataatgaagaagtgatcaaggatctgagaagccacggtgtagaagtcctgaatgatgaagaagaactgaaaacggcagatgcggatgtggtagtgatacggtctcatggtgtggcgaaatatatctacgatatcatggaagaacgtggaatcacctgtgtggatgcaacgtgtcctttcgtgaagaagattcataagattgttgcagaaaaaagcgcagaggggtcatacattgtgattgtcggaaacggtgagcatccggaggtgcagggaatccgcggctgggcaggagaacaggtgacggtggtgcagacacaggaagatgcagaacgatttgaattgccggataaagatcagaaagtatgtatcgtggcccagacgacatttaactacaataaattcaaagaattagttgaaattatttcgaaaaagaggtatgatatagttgttttaaatacgatttgcaatgcgacgaaagaaaggcagactgaagcccgtcaaattgcagcgagagtagatgctatggttgtgataggtgataaacgtagttcgaatactcagaagctatttgaaatctgcaaagaggaatgtttgaatacgtactatatacagacacttgacgatttggatattaatcaattaaggtccgtggaatcagtaggtattacagcaggggcatccacgcccaataaaataattgaggaggttcaaaataatgtcagaattaacttttgaacaaatgttagaagagtcttttaagacaataagaaatggagaggttgtagatggtacagtcatcgacgttaaacctgatgaaatcatcttgaatataggctacaaagcagacggtatcattacaagaaacgaatatactaacgaggcaaatgttgatcttacaacagttgtatctgttggtgatcagatgagcgcaaaagtcctgaaggtaaatgacggagaaggacaggttctgctgacatacaagagacttgcagcagaaaaaggaaatgaaagattaaaagaagcattcgagaatcatgaagtattaaaagctcctgtaactcagattcttggcggtggattaagcgtagtagttgacgaagcaagagtattcattcctgcaagccttgtttctgacacatatgaaaaagacctgagcaaatatcagggacaggagatcgagttcgtgatcagcgagttcaatcctagaagaaaccgcgtgatcggtgacagaagacagcttcttgttgctgaacgtgctgaaaaacagaaagaactgtttgcaaagatcagtgtaggagacagaatggaaggaactgtaaagaacgttacagatttcggagcattcatcgatcttggaggagtagatggtcttcttcatatctccgaaatgtcttggggacgtgttgagaatcctaagaaagtattccaggtaggagataaagtggaagtgatgatcaaagatatccatgatacaaagatcgcactcagcctgaaattcccggagacaaatccatgggcaaatgcagcagaggattatgcagtaggaacagtgatcacaggaaaagttgcaagaatgacagacttcggagcattcgttgaattagctcctggagtagatgcattacttcatgtttcacagatttcaagagctcatgttgacaaaccgtcagatgtactttcagtaggacaggagatcacagctcaggtcgtagacctgaacgaagctgagaagaagatcagcctgagcatgaaagcattagagcagccggaagaagcttctgaagagacagacgctgaataatattgtgacagatatacaaggatagaggtgatttcctctatcctttctgaagctaaagataacaatgagccgggataagtaaaaaggctcaatgatgtactatcttgggaaacctgcctatggcaggttttctgtgtgtatatgcatttgttaaaaatgcgacaagatgttcatgaaaatatacaatggaattagtcactttctatagaaaattgtctatttttcctgtatattatataaagagtaaataggaaggaaggaaaaaaggatggcattgttaacatttaagggtggaatccacccggatgacggcaagagcctggctaaagataaggcaattgtcgaagtaaaacctaagggcgatctggtgtatcctgtatcacagcatatcggtgctccggcaaatcctgtggtagctgttggcgatcatgttttaaaaggccagatgatagcagaagcaggaggatttgtgtctgctccgatctatgcatctgtatccggaacagtaaaggctattgcaccgcatctgaacccgacaggtggaagagtgaacagtatcgtgatcgagaatgatggcgagtacaaagaagtggaatatccggaagtgactccgttagaagatatgagcaaagaagacattctgaatgcgattggaacagcgggagttgtaggtatgggtggtgcaggtttccctaccagagtaaagctttcaccgaaggaaccggaaaagattgattatatcattgcaaactgtgcagagtgtgagccatatatcaccgctgactacagaacaatgatcgagactccggaaaagctggtcggaggaatgaagatcattctccgtctgttcgacaacgcaaaaggaatctttggcgtagaggacaacaaaccggattgtatcgaaaaattaaaagaactgacgaaagatgaaccacgtatcgaggtgatggctctgaagaccaagtatcctcagggtggtgagcgtcagcttatctatgcaacaacaggacgtgcgatcaattctgcaatgcttccggcagatgcaggatgcgtcgtagacaacgtggctacaatggtaagtgtttaccaggcagtggtagaaggaaagccttctatggagcgtgtagtgacagtcagcggtgacgcagttgcagaaccaggtaacttcagagttccgtttggtatgaatcagcaggaactggtagaagcagcaggaggatttaagacagagcctgagaaactcatctccggtggtccgatgatgggattctccatgttctcattagatgtacctgtaacaaagacatcttcatcaattcttggatttaccaaagatgaagtggctaagatggagccgtctgcatgtatcaactgcggacgctgtgtagaagcctgtccaagccgcctgattccatcgagactggcggattatgcagaacatcatgacgaagagaagtttacaaaacatgaaggactcgaatgtatggaatgtggttcgtgcagtttcgtatgtccggcaaaacggccgctgaaacaggcgatcggatctatgagaaagattgctttagcgaaccgtagaaagaaaaaataaaacaagaaagaagaagaggtgaacaaaagtgagtgagaacaatttgaaaatgtcatcttcaccacatattcgttccaaagcgactaccagtaatattatgatgctggtggccatcgcacttttgccggcatctgcatttggtgtatggaactttggactgccggcattcggaatgctggttacaacaacagttgtagcagtattgacggaatacatatacgaaaaattaatgcacaagaagattacgatcaatgactggagtgcagcagtaacaggactgttactcggactgaatatgcctcctacagctccgtggtggatgggagcaatcggtagtgtatttgctattctgatcgtaaaacagttattcggaggtctgggacagaactttatgaacccggctctcggcgcaagatgcttccttctgctttcatttacaagccagatgacaagctttgtatatgatggtgtgacaggggctacaccacttgcacagttaaaagcaggtaatacagtgaatacgatggatatgctgatcggtagaattcctggaacaatcggtgagacatccgtgatcgcaatcgtgatcggagcaatcttcctgattcttatgggagtaattgatctcagaattcctggaacatacattgttacatttgtgatctttgtcggaatcttcggacatattgcaaatccggatgtcggattctttgatccacagtacatcacagcacatctctgcggaggcggactgatgcttggtgcatggttcatggcaaccgattatgtaacatctccgatcacaccgaaaggacagtttgtatacggtattatccttggtgtgttaacaggtctgttccgtctgtttggcggttccgcagaaggagtttcttatgcgatcatcatcagtaaccttctggtgccattgatcgagagagttactcttccaaaaccatttggtaaaggaggagaaaaataatgaataagattgttaagaatacactgatccttacactgattactgtaattgcaggattccttcttggtgcggtatatgaagttaccaagactccgatcgcacagtcacaggagacagccaaaaaagaagcatggcaggcagtattttcagatgtaaaactggatgatttcaaagcagaagatgtagatcagaaggctgcagacaaagctgtaaaagatatgggtgtcaatgcaacgatcgacgaagtctgtacagcaggtgatgcaggatatgtcatcacaacaacagacaaagacggattcggcggcaatatccagattacagttggtattaagaaagacggtacgatcaacggtgtatctattctttctatcagcgagacagcaggtcttggtatgaaagctacagagccttcattctataaccagtatgtgaataaacaggctgataaattcgtggtttccaaagacggtggagacggagaacagatcgatgccttaagtggtgcaaccattacttcaagagcagtaacaggagctgtcaatgcagcactcggatattatcagaatgcatttaaataaacaggaggtagttagtcatgaataaatgtactgaaagagtatataacggtctgatcaaagaaaatcctaccttcgttctgatgttaggaatgtgtccgaccctggcggtaacaacatccgctattaacggtttaggtatgggactgtccacaacagtcgtacttgtactgtcgaatatgttgatctctatgttacgtaaggtgattccggattcagtcagaatgccggcattcatcgtagtcgtagcatctttcgtaacaattgtacagttccttttagagggattcgttccaagtctgtatgattcacttggactttacatcccgctgatcgttgttaactgtattatccttggacgtgcagaaagttatgcatccaagaacccggtacttccatctatctttgatggtattggcatgggacttggatttacatttggtctgacctgtatcgcgatcgtgcgtgagtttatcggaaccggagcaatcttcggtgttcagattcttccgcttgcagatgcagcagcaggaaaaggcggatatgtaccagtaacaatcttcatcctgccggcaggagcattccttgttcttgcattcctggttgcaggtatgaacagactgaagagacacgcagcacagaaaggcaagaagattgccgagccacagggatgcggcacagactgtgcatcatgcggcggatgcggaagcaaagtattcccgacagggaatgaagagtaggaggagtacatagtatgaaagagttattgattattgcaattggttcagctatcgtaaataacgttgtactcagccagttccttggaatctgtccgttccttggtgtttcgaagaaggttgagactgcaaccggtatgggtggagcagttgtattcgttatcacattatcatcattctttacgggactgatctataaattcatcctggttccgctgggatttgaatatctgcagacaatcgtattcattctgtttatcgcagctctggtacagtttgtagaaatgttcctgaagaagagtatgccatccctttacaatgcacttggtgtgtatcttccactgatcacaacaaactgtgcggttcttggtgtggcacttacaaatgttcagaaagaatattctatcttagaaggtgttgtcaatggtattggtacatctgtcggattcctgatcgcgatcgtgatcatggccggtatccgtgagaagatggaatacaatgatatttcagagtccttccagggaactccgatcgtactgatcacagcttgtctgatggcgatcgcgttctgtggattctcaggattaatttaggaggaggcagacaatgagtgttacaggtattattcttgcggcagttatcgtaggaggcaccggattattcattggtgtattcctcggcgttgccggtaagaaatttgcggtagaggtagatgaaagagaagaagccatcctgggcgttcttcctggaaataactgcggtggctgtggttatgctggatgttccggacttgcagcagcaatcgtaaaaggagaagctgaagtcggcggatgtccggtcggaggcgctccggtagcagcaaaagtcggagagatcatgggcgttgctgcaggtgcacaggtacacgaagttgcatttgtaaaatgtggcggagactgtgagaaagcaaaacaggaatatgaatatcacggactgagcgactgtactatggtcaacatgatgcaggacggcggaccgaaagcctgttcttatggatgtcttggagacggaagctgtgttcaggcatgtccgttcgatgcgatccacattgtaaacggtgtggcagttgtagataaagaagcatgtaaagcatgcggaaaatgtgtagctgtatgtccaaaacacctgatcgagatcgtgccatatgatcagaagcatctggtaaaatgtaattcacaggacaaaggtaaagcagttatgcaggcatgtacagccggatgtatcggatgtaagatgtgtgagaaagcatgtaagtttgaagctgttaaagtggaaaataacattgcacacatcgactacgagaaatgtaaagactgtggtgcctgtgcagtaaaatgtccgaagaaagttatctcataacaggatgaaaaagatattgaaagacggatttgtattattaaaaaatgatataaagaaggcaaaatgggcggttatatttataatcgcctattttgtatttggaagtcaatttctgccgggtatctgccctatggtctggatcacgggatttccctgtccggcatgcggacttacaagagcaggaatccggcttttgcatctggacttcaaaggagcatggaagatgcatccgtttatctatgcatttgcagcaggtgtggtgatatttgcatggaagcgctatatctgtaagaagccgattggaaaatggtttaagacaggctgtgtcgtgtgtgcggttcttatggtgatttactacgtgtggcgtatgtatcggtattttccggaccagccgccaatgagttattaccactataatctgcttcgactgctcatggatgttgcgttcggagccctgaaatgataagatagacgcaaaaataaataaggcaaaggagaaatgacagatggatgaagaaaataagcaggtaaccgctgacgaggtctacagttacggtgaatcaacagaagaaccggcaggagagccggaagagaaggcagaaccagagccagagccgggaaaaagtgaatcagcagattcacaggataataaatttgtatatcaggacaatcaatacgactacagccagcagtacagccggaacagaaatgaacagtcagacaactctccaatggatttaaaagactggatactgacattgatcgtattactgatcccgtgtgttggaatagtcatgtatttcgtatgggcattcgaaagtaacggtaatattaaccggagaaacttctgcagagcacagctgatcatattcgcagtattactgggaatttatctggtgttgtttatgctgttcggcgtggttgcatttagccgggtggtgggctattaaatttgtttgggatttaatttattaacgtagttggcctctcgatccttgaagaaaacagtataaagtggttctggttcaggttccacgctctaagaaaaactaagagagccagaatctcctaaaagcaaaggaactacgctcaaactcggcattcgcctcaaacacgttcgcttcgttcctttaacggtgattctgactctctaactttttctaagagcatttcacattcaccagaaccactttatactgttttcttcaagtcgtgactggctgcggatgttaagaaatgaaatacccggaactataacctggtgtagtccactacggtacacaatcttgttaaaagccttgaaaatccgctaatgacagctgattactgtaacctttcgctgtcacaaccgttacgcaattgccatttaatttgtaaggcattcgacacccacggaataaaaagtagaaagccgttccagtgaatgtgaagaaggtgttggaaatagttaagcgtcaaaattatgcgttgggtttttgaaatttgcctgtttgagccgaatggcgagttgcaaatttcggaagcacgtttttagcataattttgacgctttagtatttcccaccgacggaacctgaacaggaacggcttcctactttttatgcaggtccgggtcgtcgtgccttcctgaattaaatcccaattttatgcaccttctcatcatccgtaataaatatcgcctccactccatccatactctggatcagctccattcctttctcgtatcccagtagaaagcaggttgtgctgagtgcatctgcttttgtagaagagtctgtgatgatcgatacactgtaaagattgttctcacacggatatccggttcgtggatccaggatgtgatgatatagttttccgtttttcttaaaataccgttcatagattccggaagttacaactgtctggtcttttaactgtacagaggtgatagcttcaccggattcatcgaaaggtttctggattccgatgttgtatttgcttccgtcgggtttggtgccgatgacatcaacatttcctccaagattgatgatcgcatgttttatcccttgctttttgagatatgttttcacctggtcggcaatgtatcctttggcgatggctcccagatcgatgccggcttcgggatcttccagtgtaatggtgttatcctgaatgtcgacctttgtgtaatcaacgtggcttacggcctgggcaatggcatcggaagatggaaccgttggtttatctgccttgaaatcccagagagccgataccggttcaatggtgagatcaaaggcaccgccggaaagttcgctgtaatggataccctcctgaataagattggccgtttcggaagagacagtgaagggctgaccgtttgcgtggtttaatttataaagttcactgtctgtattggtggtggagaacattgtgtcatattttttgcaaagtttcttcagaccatccagaatactttcatctgcaggatcaaggatctggatcttgatgacagtgtcaaagagcatatcggtataagtaagatcctgatcggtctgtgtactgctttttgcgccggagcatccggtcaagagaagagcagaggcagtgagaaccgcactgagtttttttatgatattattttttttacatttcataatactaataacctcgtagttgatgattttctatcatgtatttacataacttgtagtataacatgaaaaaaaacagatgcaaaccaaacatattttcttttttgttgaatgggacaatttcttgtgatagaatagtaccgttagtggacaaggagagaacgtatgaattggaagaaaaaagatgcggttcttatattgacagttcttttgattgccggtgcagctttcggtgtacatgaatttgccggcggggatggagctgataccgtgactgtgaaggtggatggtaaggtgacaggaacctatccgctcgcaaagaatcagaagattaggatcaatggcggtacgaatatacttacgataaagaacggaaaagcgaagatgacagatgcagactgtccggatcagttgtgtgtacatcagaaagcagcttcaaagaatcatgagagcattatctgtctgccgaataaagtagtggttgaggtagacggaagtgaagaaagtgaatttgatgcagtggcaaattaggaggaacattgtgaagaacagagtggcatattttggagtgtttacggcactggcgctgatattcagctatgtggagacgctgatccctatcaatttcggaatcccgggagtgaagctcgggcttgcgaatctggtgatcgtgatcgcgttatataagatgaagctgacggaggtatatctgttgtctgtggtcagagtactactgtcaggattcatatttggaaattatttcagtatcatttacagcctggccggtggattgttaagtctgacggtaatggcgctcttgaagaagagcaaaggattcagtgtgatgggaatcagtgtggcgggcggagtgttccacaatgtgggacagctgatcgttgcaatgcttgtggtggagacattcagtgtcggttattatttcccggtgcttctggtcgcaggactgatcaccggactggtgatcgggatcgtgtcggcggaaatgttgaagagaattaagaatatacagttttgatggaggaactatgattacatatatacgtggaattctggaaggaatggaagaagacaaggtcattgtagatgtcggcggtgtcggatatggaatctacatggcaggaaccgcaatgggcaggcttccggctcttggaaaagaagtaaagatccacacctatctgcatgtaaaggaagatctgatgcagttatatggctttcttaccagggatgaactccgtgtattccggcttctgatcggtgtcagcgggatcggaccgaaaggcggtcttgggattctttcggcactcggacccgatgatctgagatttgcggttgcgtcgaatgatgtaaaggcaatccaggcggcaccgggaatcggtaaaaagacggcggagaagctgattctggaattaaaagacaagttgaagctggaggatgcgcttgagaataccgtgaatgcagtgcagaacacggcagatacatctgcaggcatggcaaatgagatgacaggagaagcggtacaggcactggttgcactcgggtatggcaataccgaggcattaaaagcagtcagacaggtagagattacggaagaaatgagtgtggaagaagttctccgtcagtctctgaaatatatgttgtagaaggtaaggcagacagatgagcagaagaattatgacgactgagaatctggaagaggatgtcaggatcgagaatcatttaagacctcagcttctggaagattacattggtcaggcaaaagcaaaagaaatgctgaagatttatattgaagcggcaaaggcgaggggcgaggcactggatcatctcttgttctatggacctccgggacttggaaagacgacacttgcgggaatcattgccaatgagatgaatgtaaatatgaagatcacatcaggaccggcgatcgaaaagccgggagagatggcggcaatcctgaataacctgcaggaaggggatgtcctttttgtagatgagatccaccgcctgaaccgtcaggtggaggaagtgctgtatccggcgatggaagactatgcgatcgatattatgatcggaaagggcgcttcggcaagatcgatccgtctggatcttccaaaattcactctggtaggggcaacgacaagggcaggtatgctgacagcgcctttgcgggaccgcttcggtgtggtgaccaggatggaatattatacggtcgaagaactgaagatgatcattttacgttcggcaaaggttctagaagtcgggattgatgaaaatggtgcatatgcgatggcgagacgttcgcgggggactccgagacttgccaatcgtctgttaaagcgtgtccgggattttgctcaggtgaaatatgacggctacatcacagaagaagtggctgattatgcactggatcttctggatgtggataaggaaggtctggatcagacggacagagggatccttctggctatgatcgggaaattcggcggcggcccggtcggattggagacgcttgcggcatcgatcggagaagatccgggtacgattgaggatgtatatgagccatatctgttgaagaatgggtttattcagagaactccaagaggaagagtcgtgacggatgcggcatatgcccatctgggaatttgtaaggaaaatgaataaaatagttggtttttcttacagattagtttataatagttatcagaaattatgaaagttcgaggaggcttcttatggcatcatcaaaaaactatacagaagtattaataggaggaaaggtttttactttaagtggatttgaaagtgaagactatttacagaaagtttctacatatctgaaccataagctggacgaatgcagcaatagtgagggatatcgcaagcagagcgcagagaccagaagtattctgctggcgctgaacattgcggatgattactttaaggcgaagaagcagggcggtacactggaaagtgatatcgaggcaaaagataaagagatgtatgacttaaagcatgaactgatatccgttcagatcaagctggagaatgcagagaaagcgatggacaagctgaaggaagagaataaggaacttcagatgaagatcgtacagctggaaacagagattaagaataataagtaagaattaggctgtcacacgacagccttttttacaagaaagaaaagacaggataagagactatgaacagagtggtagagatattggcaccggcaggttcgatggaatgcctgcaggcagcaatagccgcaggtgcggatgcagtataccttggcggtaccagatttggagcaagggcatatgcacagaatctttcggaagaagatatggtgcaggcaattgaatacgtacatattcacagaagaaagatatatatgacggtgaatacacttctgaaagacagggagatggaggaattgtatgcatatctgcttccgtattacagagcgggactggatggagtgatcgtacaggatatcggtgcggtaaagtatatcagagagcattttcccaagatgccggtacatgcaagtacacagatgaccattaccaatacgctcggagcagatcatttaaaacaatacggaatcacgagagtcgtgccggcgagagaactttcactcggggaaatccgtgatatgaagagacagacgggactggagatggaatgttttgtacatggagcactgtgctattgttattccggacagtgccttctgagcagtatgatcggcgggcggagcggtaacagaggacagtgcgcgcagccgtgccgtcttccttatcagatagatggaaagaaaccggcagatctgatgagtctgaaggatctgtgtacaatagacattttgccggaactgatcgatgcgggggttgattcatttaagatagaaggaagaatgaagcagccggaatatgtctatacggttgtaaagatgtatcggaaatatgcggatcattatcttaagcttcagaaagaaggaaaagacagatcggcataccgggtgtcagaggctgataaacgggaactgcttgctgcttacaagaggcgtggttattgtgagggctactatcatcagcataacggcagagatatgatatcattgaagcgtccgaagaatgccaaagatggcaacactgaggaaaaaccgtggcaggatgtaaaagtacaagaaaaaattaatggtattttaacattttctgtcggaaagcgtgctaaactaacagtatcgtatggcaatattaccgtggaatgtaccggtcaggaagttcaagaagcgcaaaagcagccgctggatccggaaagaatcgaaaaacagatgagaaagacaggcaatacagagtttgtgtttgaacgtctgaagatccatacagagggaaatgtattcctgccgatgcaggcgctgaatgaactgcgaagagaaggaatcaaagaactgacagagaagatacagatgcaataccggagagaagcggagaactgtgagacagaaaccaaaaaaactgtggaaaagagcagtgccggaaaggaatgcagtatatctgcgtctgtgcagacaaaagcacagcttgaggcagcggtaaacagcggggtacggtgtgtgtatctggatgaggagatagaatttgagcgtgaaaacggcgtacagtatttccttgcgatgccatacattttcagggaacgtacaatccgcagatatgaaagtttgtatgcgaagatcgaggaaaaatatgatggtatactgatccgcaactgggagagctatgcatggctcagacaacatgcataccaaaaagaaattcgcagtgattataatctctatatttttaatcagaaagcaaaagaagagttgaagaatctgggggtcagtcagggaacggcaccggtggaattgaatgaccgcgagctggcgggacttgggatagaagaacagacatttatcgcatatggatatcagccggtgatggtcagtgcgggctgtatacagaagaccactgcttcctgtgacggaaaaggcggtgtacttatgattgctgaccgttatcagaaggagtttgcagtcagacgctattgcagggactgttataatgtaatgtacaattcggcaccgctgttcctggcggataagtcagaagagatcaggaagctgatgccagcacagataagattggattttacaatcgagaataaagaacaggtaagagaaatctgtaagatatatgtggatgcatttacagaaggaaaaaagatggaacctcagatacgggagtatacgagggggcattttaaaagaggagtaaagtaggtggaaagttggtaaacataattgtacagttatcaaaatatctgatgatcctgatgatcacagtgtatacgtatctgtgtttcagtatcttcggatattatgatccggataaaaagaaacgctgtctcaggaagcagaatgtgctgatgtttgtgatgcatctgacggcatttcttgtgatgtatctggaaaaaaaagatacaaagattctggcattgtatctgatgcaggtgacgcttcttggaggaacgatcctgctgtatagctttatttatccgaaagtatcacgtctggttgtaaataatatgtgtatgctgctcagcatcggttttatcatgatcaccagactgaattatgataaggctgcgaaacagtatctgatcgcggcagcaggaattgtgctctgccttgtgataccgatcattatccgaaaagcacgtttcctgtcggaatggagaattctttacggaattgtcggtatcgtgtcgctggcggtagtagtggttgtaggtaaggtgtcttatggtgcgatgcttggctttacagtcgccggaatcaacattcagccatcagaacttgtgaagattgtctttgtgttcttcgtggcatcgagttttaagcgttctacagagttcaaagagcttgtggtgacgacggcagttgcagcatttcatgtgttgatccttgtggcatctaaggaccttggtgcggcgcttattatcttcgtcgtatatctggtcatgttatatgtggcgacacatcagccgctttatattctcgcaggacttggtgcgggaagtgccggagcagttgtggcgtatcatctgtttacgcacgttaagacgcgtgtaaatgtatggagagacccgtttggaacatatgataaaggcggttatcaggtagcacagtcattatttgccatcgggaccggcggatggttcggagcgggactttatcagggacagccggacacgattccggtatcggcagaggacttcatcttttctgcaatttcagaagagatggggttgatctatgcgatgtgtctgacactgatctgtgtgagctgttatgtgatgtttttaaatatcgcaatgcagctgcataatctgttttataagatggtagcgctgggacttggtacctgttatatattccaggtgtttttaacgatcggaggagcgacaaagttcattccgtcaacaggtgtaacacttccgctggtaagctatggcggaagttctctgatcagtacgctgatcatgtttgcaattatccagggactgtatattttaagagaagacgaggaagaggatattgagagaaggaagaaagaacggttacgagcaaagagaagccgacaggagagtgcggcgggatatcgagaggcagaatatgacccgcaaagagcgaaaagaagccaaaaagcgcgaaaagaagcggctcaaggcaaagcgcgcaagaaacaaagagttcgctagagttacgtatgtattcgtagcgctttttctggtactgctgggatatatcggatattttcaggtaaaaaaaagccaggagatcatcagaagtccttataatgccagacagaattcgaatgcaaagagggtgacccggggaacaattgtggataggaacgggaacgtgcttgcgaagaccgatacggcagcagacggaagcgagacaagagagtatccttatggcgatgtatttgcacatgtggtcggttacagcgtacagggcaaatccgggatcgaatctctggagaattatgacctgctgacttcggatgagaatttcctgatcaagttgaagaatgaattccaggataaaaaaaatatgggagacacagttgtgacaacactggatgcagaccttcaggaagcggcatatcaggcactgggagagaaaaaaggtgcggtagtggtgatggagccgaagacaggaaagatccttgccatggtatctaagccggactttgatccgaatacggtagaatccagctggaacgctctgagtacagatgaaaacagtgtactgttgaatcgtgcgacacaggggcagtatgcaccgggttctacgttcaaagttgtgacacttctggaattcatgagggagaatccggattacagctcttattcttataattgtaccggttcgatcgagaacagtggaattaagattcactgctataacggacatgtccacgggcaggtcagtctggaggaaagtctggcatattcgtgcaacacatcattttcgaatataggactttcactggatccggtgaaatttaagaagacggcagaggaagttttgtttgattcaaaactgccttcggatcttccgtatagtaagagcagctttacgatggatagctctgcaggaaacggtacaaagatgatgacggcgatgggacagggggagacgcaggtaagcccgtatcatatggcactgatcacatctgctatcgccaatggcggaaagttgatgaaaccgtatctggttgacaaggtgacaaatgcatcgggagcggtcatgaaagagactgatcagaaagaatataagcagcttatgacagcggaagaagctgcccggatcaaagaatacatgaagagcgtagtagattacggtaccgcatctgtattgagcggacagagctacacagcagcgggaaagaccggtacggcagaatatagttccgataaagaaaaagaccactcctggttcatcggtatgtcgaatgtggaagatccggaactggttgtaagcgtgatcattgaagcttcggacggaactgcaaaggcggtaaatgttgcaaaagagatttttgactcgtattattagaagtatagaaggacgggaaatatgcgatactataagcatctgtacctgacagaaggactggaaaagaaaaaagagaaaattatccgcaagctggaatccggaaaactgcagccgagtgtgcatgtgatcacgttggcaatcagtgaaaagaatcaactggaaatctatccgacactccagtttaagcagcctgcatttccggaacaggatctgttcgtggtaggaattacaaaaggatatgaggaagcggtagaactggtagaacagatcgtacaggaagtatatgaacagacgggcggatgtgatatacggtcttatatattagaaaaagagcagggaagataagatggtgttacatattcttttgatcattttaaaaataatagggatcataattgcagtgattatcgggctgctgcttctgcttctggtgacctttttgtgtgttccggtgagataccggctcgatgcgtcaatgcccggagagataaaggaaagcagcgcatacggccgcgtgacgtggttcttgcgcctgatacggatcgatgtgtcatttgaagagcaggagttaaaatggcgggtaaggattgcgtggaaatctttcggaagtgaaccgcagaaaagcggacatacagatactgagaagaaaaaatcggaagatcgtccggtgaaaacagacgttgagaaaacagaaactgcgaagatagaatctgagaaggaggaagctcatgaaaaagagaatacagcttcgaaagaaaaccggaaagaacagagagtggaaagcagtagcagactatcggaaatggaagaagagcctgaagaagaaaaaagaactgtggagagcagtaaaacgcttccggagaatgtggaagaaatcccggaaaatactcctgaaaaagctgggagatttgcgaagataaaatgtacaatcttaaagttctgtgataagataaagcatacggttggacatgcagaagaaaagctggacagcatattggataagaaagaaagaattatgaaggaattggaagatccggtgcacaggaaagctttttcgaaggtgaaaaaagagtcgggcaagctgttaaagcgttggaagccgaaagtaataaaaggtgaagttcaatttggattcgaagatccgtaccatacaggacaggcactggcggggttaagtatgatctatccgtttatcggagagcatctgttagtggaacctgattttgaaagaaggatactgaaagggaaagtcagagtccgcggtggattccgcatgatgccgctggtctgcttcctgtggaacctggtgtggtgcagcgagatcagaaagacatatcatgatatccgcaagtttcaattatagatatagagaatgcaaggaggaaagaagatggctgagaataatttcaaagggactgtagaagcgctgttccatggtatggacggagtggtatcatccaagacggtagtaggagaagcaatccatatcggcgatacgattattttaccactggtagatgtatcctttgcggtaggagcaggtgcgttcaacgcagataagaaagaaaaaggtgccggaggtatcggtgggaagatgacaccaagtgcggtgctggtcattcagaatggtcacaccaagcttgtgaacattaagaatcaggatacgatcacgaagctgttggatatggtaccggatgtgatggatcgttttacatcccgaaaagaagataacgttacggaagaggatgtgaataagatcctcgacgaagcagaaaaatagcagacattttttgtggcagtgtacatataatgtacaaaaagcaggtgtgtgtctgtgaaaagaatcgtaggatttgcattgttctggatagcggcaggaatgcttctggcactggtcataccaggtttgttctgccagattttgtgtatgatcctgtgcgttgcagtgggatattgcctgttttgttgctgaaaatcaaaaagtaaacaaaaaaatatcaaataactcttgcaattcttgcaacagtctgctagaataactattgttgcgagttcggacaaagaacttattatgagcgttaggaggtgcagtcatggcaaaatgtgctatttgtgaaaagggtgctcactttggaaacaatgtcagccactctcatagaaaatcaccaaagatgtggaaatcaaatgtaaaatctgttcgcgtgaaaaccgaaaacggagctacaaagaagatgtatgtttgtacttcttgtttgaaatcaggaaaagttgagcgtgcataagatgtattgaaactcagatttcgatgtgtggaatctgagtttttttgcgcaataagaactattgtaattagcggaaaaacagagtataataaaatatattatgttttgatttagatagaagataataaaagaagtggaggttttgctatgaaagggtgtatgagtacagatttgggaattattaccattgatcctgaagtaattgcaaaatatgcaggaacagtggcggttgaatgttttggtattgttggaatggcagctgtaaatatgaaagatggcctggttcatctgctgaaaaaggagagcctgacaagaggaatccatgtaaatataagtgatgataatcatatcagtattgacttccacattattgtggcatacggtgtaagcatttccgctgtaacagataatctgatcagtgatgtgaagtacagagtggaagaattttccggtatgcaggtagataagatcaacgtctatattgaaggcgtaagagtcattgattagtttgtggattttaaggaggaacgtaagaagtggctacgaaaacgattaatgtggacgtgcttgcaaagatgtttcttgcaggtgctcagaacattgaagcaaagaaagactatatcaacgaattgaatgtattcccggtaccagatggagatacaggtacaaatatgtctatgacgatcatgtcagcggcaaaagaagtaacagcattaaataacccggagatgaaggatcttgcaaaggcaatctcttccggatccctgcgcggggcgagaggtaactcaggagttatcttatctcagcttttaagaggatttacaaaggcgatcaaagaagagaaagagattgatgtgcttgcacttgctgcggcatgccagagagcaagagatactgcttacaaggctgttatgaagccgaaggaaggaaccatccttactgttgccagcggaattgcgacaaaggcagcagagatggctgaagagacagatgatctggaagtattcatcccggctgtgatcgaatatgcagaggaagtgctgaataagacaccggagatgcttccggtattaaaagaagcaggtgtggtagattccggcggacagggacttctggaagtgattaaaggcggatatgatgcattccttggtaaagagattgattacagttcgatcaaaccaagtacaagtgttaccgtgaataaggtgaatgcagaagatacggcagatatcaaatttggatattgtacagaatttatcattctgacagaaaaagaatttaccgaagaagatgaacatgaattcaagaaattcttaagctcgatcggagattctatcgtatgtgttgcggatgatgatgtcgtgaagatccacgtacacaccaatgatccgggacttgcgatccagaaagcgctgacttatggacagctttctaagatgaagatcgataatatgcgtgaagaacatcaggaaaaactgatccgtgatgcggagaagcttgcagaagaacaggcaaaagaagaagctgcatacgaagaaaagaagacagcagagccgagaaaggcaatgggattcattaccgtttccatcggagccggtatgaatgagatattcaaagaactgggtgcagattatatcatcgaaggcggacagaccatgaatccaagtacagaggacatgctgaatgctatcgatcaggtaaatgcagatacggtatttatccttccgaacaacaagaacattattctggcagcaaaccaggcaaaatcattggtagaagataaagagatcatcgtaatccctaccaaaactgtaccacagggaattacagcgatcattaactttatgccggacgcagatgccaagacaaatgaagaggctatgctggaagagatcaagaatgtaaagaccggtcagatgacgtatgcggtaagagatacacatattgatgacaaagagatccatgaaggagatatcatgggtatcggtgacagtggaatccttgcggtaggaaaagatctggaagagactacaaaagaactgatcgcgaatctggtagatgaagattccgaactgatcagtatctattacggagaggaagtatcagaagaagaggcggagaaattcgcaggagagatcgaagaactgtatccggatgtagatgtggatattcagtttggcggacagccgatctattactatgtgcttgctgtagagtaagagataaagtatagaattatatacagaaccggatctgtatatccagagtgagagaaacttctggtatatagatccggttctttgtatccggatgagttttgtgatgaagagattggatttacaggatggagggaaggaagcatcgtatgatagaaaagacagatatcggagatttgaaaggaatcggagagaagacgaaaaagctcttcgaaaagatcaatatacatacggtaggtgatctgatccgttattatccgcatggatatgatgtgtacgaggaagcggtgcctgtcagtgaactggaagaagacaagatccagaccgttacaggcgcaatctacggtcgtgtgcaggtatccggaagcagccggatgcaggtgacaacgctgtatgtaaaagatattaccggaacattaaaggtaatctggtttcgtatgccattcttgcggaatacgttatccggcggaggtgtgatcactctgcgtggaagagtcgttcgcaagaaaacgggtgatctggttatggagcatccggagatcttctacccatctgcaaaatacgaagagaaactgcatacattacagccggtctatggtctgacctccggactatccaacaacatggtcatgaaggctatgaaacaggctctggacggcctggatcttaccagagagatcctgccggattccctgcgtttgaactatggtctggcggaatataactatgctgtgagaggaatccattttcccgaagataaagaagtcttttatcatgcgagagaacgtctggtattcgaggaattcttagagtttattctgtcgatcaggagattaaaggagaaaaatgaacgtctggaaaacaattatccgatgcagccacgcccggaggtagagacatttctgaagagtctgccgtttgaactgaccggcgcacagacaaaggtctggaaagagattgaaaaagatctcggttcggataagacgatgtcaaggctggtgcagggagatgtgggctccggtaagacgatcgttgcagtgcttgcactgatgaatgcggcattcaatggctgtcagggagcaatgatggcaccgacagaagtgctcgcaagacagcattatgagaatattacgaagatgttcgaagagtatgatattccaatcaaggtagaacttctgacgggatctatgacagcaaaagaaaaacggcgggcatatgaccgtatcgagtgcggactggcgaaaatcatcatcggaacacatgcgctgatccagggagccgtaagttatgataatctgggacttgtcataaccgatgagcagcacaggtttggtgtaaagcagagagagacatttgcgttaaaaggcggggagccgcacgtgttagtcatgagtgcgacaccgattccgcgaacacttgccatcattttatacggagatctggacatctcggtgatcgatgaacttcctgcaaatcgtctgccgatcaaaaactgcgtggtggataccggataccgcaacacagcttacaacttcatgaaaaagcagatcgcagaaggacggcagtgctatgtaatctgccctatggtagaagaaagtgagacgatggaagcggaaaatgttacggattatacggtggcacttcaggaagagatgggagaacagatccgggtagcctgtctgcatggcaagatgaagcaggcacagaaagacgatatcatggatcgtttcggaagaaatgagatccagatactggtatcgacaactgtgatcgaagtcggaatcgatgtgccgaatgcaacggttatgatgattgaaaatgcagagcgtttcggtcttgctcagcttcaccagttgagaggacgtgtgggacgtggaaaacaccagtcttactgtatcttcatgagtgcgtcaaaatcgaaagaaacaaaaaagcggctggatatcctgaatcattcgaatgatggattcaagatcgcaagtgaagacttaagactccgcggaccgggagatctttttggaatccgtcagagtggtcttatgaactttaaactgggagatgtctatcaggatgcgaagatccttcagatgacaaacgaggtggcagaccagctcacagaagatgatgatgaatggatccggaaactgccgaattatgagaatgcggcggaagttgtgctgtaatcggattgtttatctggtacattccgcagatatggatggatatagcggcaaaaaaataatcaacacatgacaacttcgtatgatagaagtcatgtgttgattttttgatcttttagtttttcattctgtgtttccagcctgttacagatactgtgcggttatttacctgccatctgtttttcctgctgttcgatcattttcttgaccatataaccgccgacagatccattctgtctggatgtcaggtctccgttgtagccatctgataacggaactccaagttcacttgctacctcgtacttgaatttgtctaatgcaccctttgcttcaggtacggctgttttgtttgatgaacgatttgccattttttatactcctccttttggtaactttgtaactttttccttgtcgttacatccatagtatgtggagaaatacaattaatacactagaagtgttttcataatctggaaatattttcagattaaaaaatgactattcgtcccagccttcgtagaagcggatgttcatagaaatattgcggacgatctcgccttcttttacttcaatatcttcaatgtcagatacatatgggatcaatggatcatcttcggaaagttccagtgtgatccagtcacgtgccgcttcgttggcactttcaatggcatcatctaaagtctcgccttcaccataacaacattccagatccgggaaatatcctttatagtgtccttcttcggttttgtgaaatactgcagggtatatgaatttcataatttgtcatcctttcaaaatgtgttcctgtctattatatgattttcggagtgggaaaacaataggtggatggaataatgtacaatttctccgagtaagataataataatcgaaaagatgtcagcgaggaatcagatgcgatgcggcatagacgatgtatcagtgcaatactaatgtcttttgtactatttttacaaccggtatatgcagttccgccggaagagaatcaaccggaaaattcacaagaaaataatacagaaaatgagaaaagacaacaggagcagatcagtgcaccgtcggcaattctgatggaagcgtcaacaggacagatcatatatgagaaaaatccggatgagaaattaccaccggcaagtgtaacaaaagttatgacattgctgttgatattcgatgcactggaaagcggccagatcaagctggcggatgaagtgacaacatctgaatatgcggcgtccatgggcggttcacaggtgtttctggagcctgaggagacacagacggtagatacgctgatcaaatgtatctctgtagccagcgcaaacgatgcctgtgtatcaatggctgaatatatctgtggaaacgaagaagaatttgttgcaaagatgaacaaacgggcaaagaatcttggcatgaaaaatacacattttgtaaattgcaacggattggatgcagacggtcatctgacaacggcaagggatattgcactgatgtcaaaagaactgatcactacatatccgcagatcttcgattactgcaacatctggatggagaatatcacacataaaacccaaaagggcgaatcagaattcggacttacgaatacaaacaaactgatccgtcagtatgaatatgcaaccgggttaaagaccggctctaccggtaaagccaaattctgtgtatccgcaaccggaaggaaagacgacatcgatctgatcgctgtgatcatggcagcagacgacagcaaagccagagtcagagatgcgatcaccttattaaattacggtttcggaaaatgtcagaaatatacagaaaaagaacaaaagaagatatcaccggtcgaagtcagaggcgggacggaaaaagaggtgaaggtacgtcagaaagatacattcacctacgtggataccacaggcgctgacctgtccaaaataaagagcaaaacaagaaaagacaagaatgtaaaagcaccattaaaaaaaggcgaaaaagtaggtgaaacagtctattatctggatagaaaaaagataggagcaagagatattgttacgacagaaaaagttgagaaacaaaattacggcagtgcgttggaaaatgtgctggaagagtattttgggatttaattaaattgggatttaatttattaacgtagttggcctctcgatccttgaagaaaacagtataaagtggttctggttcagg

SEQ ID NO: 2885 - DNA, 656 bp, Unknown
  gut microbiota DNA sequence
ccgacggaacctgaacaggaacggcttcctactttttatgcaggtccgggtagtcatgcctttctgaattaaatcccaatatccttatacccttccagctttgacgtacaatgtgggcatctggttgccatatatcttcttttttcatcttaccatctttgcaattcaatggtcaatgctttcttctatatcattttatttgtccagaatccgctggatctcttccagattctccgcaaaatatattccctcctgcttttcctcagaagaaagatccatctcgatcatatgctccagaagctgtttcagactgtcataatatccgttcagattataaagaatacatggcgcatccaaatgttttaacgatactttagacatcacctccgtgatctcttccagtgttcccgttcctcccggaaatgcaatgaacacatctccaagttctatcatctttgcctttctttccgacatatctttcgtcgtgatcagttccgtaatctcatcatacacaaatcctgcatcaataaaaaactgtggctctaccccgatcactttaccaccggcctgcaatacactttctgcaagttctcccattaggccggattttgaaccgccgtatacgagagtatttccatttgttccgatccacaatc

SEQ ID NO: 2886 - DNA, 10127 bp, Unknown
  gut microbiota DNA sequence
gtgggaagtaaggtactggaacagtattcgaatcctcatgtgatgcgcatattggaacttcggcggaaagttggtaatgaaagccatcattttaatgaatttgcacgattccagtcgctgggcagaaaggtctatgtcagtcatctggaacccaaaagtgatgtgatcatgctggttggcagacattttgcggaccggatgccgtcagaacattggatgatcatagatgataaccggaaaactgcatgcgtacatccaaaagacggaacaaactatctgcgttatctgacggatgacgaatttgagtcacttcgtaaaacagaacagtatgaagatgaatatacagagatgtggaagacgttttttcaggcagttgcgatcaaagagagggagaattatgtgtgtcagcggaatttgttcccaatctggaagaggaagcatgcggtggaattcagaacgccaaggatatgagcataaaaacttgcgaatcctgaaagaaatatctgtcaggaagagaatcattgaaaggggaacaaatcaatgcagcaaaatttaaaagtgttaatgttaaatggaagtccacgggctaatggcaatacatctgttgcattaaaagaaatggaacaggtatttaaagataacggaatcaagacagagatcatactggtcggcaataaagatattcgtggctgtatcgcctgtggttcctgctatgagaaaggcaaatgtgtattcaacgatatggtaaatgaactggcactaaagtttgaagaagccgatggacttgtcgttgcaagcccggtatattatgcgtcagcaaatgcgacactgattgcttgtcttgatcgtttgttctacagcagtcattttgacaagacgatgaaagtcggagcaagtgttgtatgtgcgagacgcggtggttgttcagcaacatttgatgaattgaacaagtattttacaatctccggaatgccggttgcatcaagccagtattggaacagcattcatggacgtatgccgggtgagtcagagcaggacggagaaggaaaacagacgatgcgtacacttgcaagaaatatgacattcttgatgaagagtattgcgcttggaaaagaacagttcggattaccggaaaaggaagaacgaattgcgacacattttatacggtaatgggattggagaaaagcaaatgacagatacacatatttcagaaagatatgaatttagaaacataaaacagaacgaagcagaagaagcagcagagatcgaaaggatctgttttccgccgaatgaagcctgttctaagaagcatatgaaagaccgtgttgccggaattgcggatttatttctggtagcgattgataaagaaaatggaaagatggcaggttttttaaatggactagcaacggatgatgagatattaaaggacgagttctttacagatgccagtctgcataacccggaaggcaagaatgtcatgcttctgggactggatgtactgccggaataccgcagtcaggggcttgcaagagaactggtacgccggtatctcgaaagagaatgtgggaggggaagaaaagagattatccttacctgcctggaatcgaaggtagcgatgtatgagaaattcggatttaaagataaaggaatcgcgcagtcaacctggggcggggaagaatggcatgagatgagtgtaagcatttaaaaaggagtgggacattgacgtcccactccttttgatataaactattatctatatgtctatagtaaaatatagacgttatattatagttaaaagagtaaggagagtacatacgaatgaagagtttttatgagtggtacagaaaacacatcaccggtgcgattttcgtcggactgatcctcggaatcctgaccggactgtttttggcgggacggtttaaagtggttctgactgcaacaagtgtgctgggaagcatctatatgagcgcattgaatatgatgatcttcccgctggtattctgttcgattgtgatgggtattgcaagcatcggaagtgccaggacgacaggtaagatcacaggagcggcaatgctgttcttcctgtgcaccacagcattggcaagttttgtcgggctgatcattccgagactgatccgtcttggaaaaggcgtcagctttaagatggctacatctgatattcaggcaacaaagatggacagtattttagatacagtgaaaggactgatcccatccaatccggtgtctgcatttgcagagggtaatatgctgcaggtgctggtatttgcactgatcatgggcttcacattgatcgcgatcggagaaaagggaaagccgttattaaaggtaattgattcatgcaacgaagcatgcctgaagattatcagtacggttatgtatttcacaccgatcggagtattctgtacgatcgttcccgtcgtagaggcaaatggaacaaagacgatcatatcactggctacacagctgattatcttatatgttgcgttctttggatttgcatttgttgtatatggcggtgcagtaagcattctcggaaagacaagttcggtgaagttcttcaaagcgatcatgccggcagcactgaatgcatttggtacatgctcaagttcagcaactattccgctgagtaaaagatgtgttgaagacgaactgggtgtaccgaatcagatatccagtatcacgattccgcttggtgcaacggttaatatggatgccgtatcaatcctgatgtcgtttatgatcatgttttttgcaaatgcatgtggcgtacatgtcagtattccgatgatgatcatcatccttctggcgaatgttcttctgtcagttggaacaccgggaatcccgggaggagcaatcgcatcgtttgcggcacttgcaacaatggcaggacttccggccggagtcatgggtgtgtatatcagcatcaatacattatgtgacatgggtgcaacctgtgtgaatgtaatcggtgatatggccggatgtgtcgtactgaaagagaagattgagattgaaaaataaaatgaaaacctcagaaaaacaaaatagattaacaagaacctgggtggttgcggctctggcgtgtgtctgctgcatcttatggggcagcgcaattcccgtgatcaagacaggctatcgcatcttatctgtagattctgcagataccgcaagccagatcgtctttgcaggtatccggtttgcattggctggaattctggtattagtatttgcatccatccgtgaaaaacatatggttcttccggatggaaaagtattccgctatgcaattcctgtctgttttgcacagacctttgtccagtactttttcttctacatcggagtagcacatacctccggtgtaaaaggcggaattatcacaggtcttggaaattttatcgcaattttaatggcatgtctgttagtaagaaatgaaaagatgacaggcagaaaacttgccggctgtattctcggatttgcaggagtcgtgatcatcaacatggcaggtggttctatggatatgggcttcagactgacaggagaaggctttgtgctgatcgcacagttgtcctatggagcatccaccgtactgatcaatattttctccccaaaagtatcaccggttatattaagcggatgtcaattcttcatgggtggcgtcttgctgtttgtagtaggaatcctcatgggtggacatctggatcacatgtctgttgcaggagcggtattgagcctgtacctggcgatggtatcggctgtagcatatacactctggtcagttctgctggcacataatgaagtgtcaaaagtagcaatctttggatttgtcaatccgctttgcagtgtggtgttatcggcactggttcttggagaagtaagccaggcatttaatgcgagaagtctgatcgcactgattctggtatgtgtgggaatttatattgtgaattataaaaataaaaagtagattgcagaggacatcttaaaaaaaccgtaatgaaatgtgaataaagcaagaggctgaaaagttctttctaaaaagaattttttcagcctcttttgcatgtcagcgatatagagtttacaatttcccttccggaatcttactgataatcgttttataaattctgatcaaaaatgtcatagacacaataaatgatattacttccgcaatcgggaaagaccaccatacaacgtgcagtccgccgatcttagacaggatataagcagcagggatcagtacaaccagctgacgcatgatagatacgatcatgctgaatactgctttaccgagtgcctggaatacggtaccggcaatgatacagaaccatgcgatcaggtagtgtataccgatgatacgaagtgccggaacaccaatcttcagcatgtcagcagatgcgttgaacattccaagtaatacctgtggaataccttcaaaacagaggaatccgacaaaagtaaggcagaatgcagttgtcagactgatccggatcgtccggatcatacgttttctctgctgtgcaccgtagttgtaggcaatgatcggtgtgataccattattcagtccgaataccggcatgaagaagaagctttgaagcttaaagtatacaccgaatacggcagttgcggtagaagagaattcgatcaggatgcggttcatcgaataggtcatgatcgatccgatagactgcataataatagacggaataccaacggcataaatgtgtccgatcaggcttatgtccggacggaatccattaaagcttaaggatacttcatggttatatttgtgattgcaggttccggctacgatgccggctacgcactgtccgatgacggtggcaacggcagctccggttacccccatcttcgggaatccgagaagtccgaagatcataatcgggtcaaggatgatattggtgatggcaccgcataactgagaagtcatactgaagattgttcttccggtagaagtcagtaatcgttcaaagaaaatctgtgtaaacaaaccaaaagaaaagatcataactgtactcaggtaatcaattccaagattcatgatctcgacatctgcatttccaatctggcttgcatagaacggttttacaatcgtaaagccaaggattaaaaatataatgtaactgatggcatagataaatgctgcattatcagcaatcttattcgcttttttaaagttgcgctctcccagggacttggaaaggagtgcgttcatgccgacgccggtaccggtagctaccgcgatcagaagtgtctgaagcggaaaagccaatgaaacggcagtcagcgcattttccgataattttgctacgaagatactgtcaacgatgttataaagtgcctgtaccaacatggaaatcatcattggcagggacatgttaaatactaattttccgacgggcatggttcccatcttgttctctgctatgggagcagatgattgattttcactcataaatctctttcctccacagtgacgccggtaaaccagagcgcctgttcatacaatttcattctgtctgttatcagacccaaaaatatatattaacatgaatgcagaaaggattcaattatttgaatgctggattggacgatattcgtagctcggtttgaaatccttcttatcatataacgtatcataatattgaaagatacgatccattacttttgaaatctgtgtctcatctggttcatacagaatgagcagatactgcatggaactgtagcgggtacagatgtctaccttgcggattttttcatgaatggctgttccatacataattcccgataatcaaggttcaggtcaccattgtaacggccgctttcactcagagcatgggcaattaactccagatctttgccggtcacctcattttcggaaaaatccagttccatctgctgatagaagaagaatccttgttttccgttttgttttacatgatagagtgctttatcggctttggagtagcaatcttcaaaaggttcgccctttgtactcagatataatcccgcggagatagaagcatattgaatctcaggaatgaagagcaggaactcatcgccaccgagacggcatacaacagaattctgcgaggcttccgtaagaagcgtaccgagaactttcagtcctcctggaagtacgctgtgattacagttcaaaaaagtctttgatctgattcagaataatgtccatcagccgtatgcgcgcctcaatgccggcccatgcgatatgtggtgtaattaacaatttgcgactgtctttgatctgaaaaagtggattctgttcactcatcggctcctggcataagacatccagaccggcggcagcaatctcatccgttatcaaagcatcatataagtcctgctctacaacgatcggtccacgtccgagattcaaaaagatgcaggattttttcatctttgcaaatgcatctttatctagaagattttcagtatattcattcaggggagcatggacagagatgatatctgaagtagtaagcagtgtatcaaaatcaacctgagtgtatccgttctgggtaggttgtccggaagcagaataatagattacatgagcgccaaacgcctctgcaatctgggcaacacggcgtccgatagcaccaagcccgatgatgccccatgtcttgccgttaagttctgaaaaatgttcggaaaaatgagtaaaacaggtgtcattgatataatttccattttttacataatcgtcataataacgcagcttttcaagaagatagaagagcatggcaaatgtatgctgggttactgtttcggtggaatatccggcaacattgcgccaggcaatgccgcgggaagccagatagtctttatccagattattggttccggtagcagtaacacagacaagcttcagatgcgctgcggtatggattgtctgttcgttaacaggaactttattgataatcagaacgtctgcgtccttgacccgttcaggtgcttcttccggtgtggtaaagtcgtatctggtgacctccccaagtgcgtcgaatccggaaaggtcaatatcatcaccgattgtttttgcgtctaaaaatacaattttcataataagttcatcctttcataatgaaatcactgctttaccggatacagatatataccatataggcagcatataagataagcatgatgattccttccttgcggttgagttcttttgaagtccatgcaaagatcagagttatcacactgatcacgatcaggacagcaatgtcgatcatgttatcccaggcgaaagccaccggactgattgctgcagcaacaccgagtacaagaagaatgttaaagatattggaaccaatgacatttccgagcgccatatcgacttcatcttttctggcggcaacaatggaagtgacaagttccggaaggcttgtacccatggcaataatggtaagtccgatcaatgtctggctgagtccaaggcggactgcgatcgcagaagctccgtcgacgacaaaatcgccgccgtacttgatcgcgatcatacctccaagaatgaaaatgagacatttccatgccggaaggagattgatatgtgaggtaacctgttcaatctcttcttcggaaagagagattctttcttcttgtatagaagaaatagcatcaggtgttgatttacggcgagctcttttgactgagcggatcatccagagcagatatccggtaaatattataagaaagagaattccatcgattcgtccgagtgtcatacccagatatccaagcaacagtaaaagtcctgcacagaagatagataatgggaattctttctgtaaagtacttttctgaacggcaagcggaacaaataaagtacagacaccgcatactaccagcagattaaaaatattagagccaaccgcattgctgatggcaagggaattattgccggtcagggaagcagttacactgactgcacattccggaaggctggtacccatggctacgatggtcatgccgatgatcatggaagggatccggagccgctttgctacggcagaactgccttctacaaagaagtcggcacctttgatcaacaggacaaatccgacgattaatataatgagtgattttaataattgcatgtgattctccttttttccgtttttaaacagatattaacagccgacaaaggctgtctccttgtaattgtaccataaaatcaaacaaagaggaaacaagtgccagtgttaatgtatataaattattctttccaaacgcacggatttactgtatatttatatggaaaataaaacaagaaggagaaatacaagtatgttaagtatggtcattgacagcattagttcattcatgtacagtaaattgctggtcattatgttaatcggaactggtgtgtattttacgatccggacgaaatttccgcaggtgcggctgtttcgcagcgcctgcaaagcggtaatggagaaaccggatgatgaagatgcagtctcttcttttcaggcactgatggtctccactgcatcgagagttggaacaggaaatatcgtaggagtatcgtctgcaatctgtatcgggggatttggagccgtattctggatgtgggtgatcgcaattattggaagcgcatctgcgttcgtggagagtacattggcgcagatttataagaaaaagggtgaggacggaacatgttacggaggaccggcgtattacatagaggctgcacttcggtgcagaccgctggcaattgcattctgtattgccatgatcgcgacatatgcatttggatttaatatgctggcatcttataacctgcagtctacatttgctggattttctttttatcatgcagatgtgacaccgtggatcatcggagggattctggcagttctgacaggatggtgtctgctgggcggcggttcacgtattgtaaaagtaacttcgacgctggtaccggttatgggtgtggcatatattgtggtggctttgatcgtggttgtgatcaatatcagatatattccagatgtgtttgcaaggattttcagggaagcatttgactttcaggcaatctttggtgcatttgccggatctgccatgatgcagggaatccgccggggattatattcaaatgaagcggggattggttctgcaccaaatgcggctgcatcggcaaatgtcacgcacccggtcaagcagggactggttcagatgttatcggtgttcattgataccttattattatgtacggcaactgctatgatgtgtatgtcatccggggtagccccgtcggaagcattgcaaggagcgccatgggtacaggctgcattgcaggaatcactcggaacgtttggtcctgtatttattacggtgtctatggtattatttgcatttacaacactgctcggcaattgcttttactgcgataatctgctgacatatattcataagagtcagcctgggcggcattttatgatggcattccgtgtgatatgtgcgcttgttgtattcatgggagccggaatggagatgtccatgctctggaatatctcagatgtgttaatgggagtgatggcgatcattaatattccggtgatcatcctcttatcaaatacggcactgaaagcactcggtgattatgaaaaacagctgaaaaagggtatgaatccggtatttaagagtacggatatcggaatgaaagagaaaatggattactgggagtagaggaggtgacagctatgtattatgtagcggacggaacaaaggaatgcggatattacgaatgtaagaaatgcgggaatcgttttctgtccctgcagacgatgaaacggatcccgtgtccggactgcgagcaggagatcgattacgagatcggaccggatgaatctttggaagatgtgctggatacggcagaacttctgcagaagatcgaaggcacagaagaagttgcgaagatggatgcgcttctgagcctggcgattaccggcggggattgtaattggatttaattgggatttaatttatgaactgggaagcggcctctcggtccttgaaggaaacaatagataaggcttcttgttcaggttccataccataagaaa

SEQ ID NO: 2887 - DNA, 3600 bp, Unknown
  gut microbiota DNA sequence
atatatttggacagaaattctcacgcccaaccaaatctacgaatccggattttttcataacattcagaggctgtttatttacatgcgagaataccagcgtaattcctttattttcacatacctttgtaagattgaataatgcgttcatagcagtactgtcaattgcaggaacacttcgcatacgaagaaccagacagcgtgtaaagtctttgacaacaatgtgttcgattgcatctgcagcgccgaagaataatggtccggtgatttcgtagacacggatctgcaatggcagttccttcagttgttcatcaacatccggggtgtcatcatctacatagacccagctgtctacatgagtttcttcgctcatacgtttgataaagaggagacatgcaagtaccataccgatctcaatcgcaaccaccagatcaaacaggatggtcagaaggaatgtggtgaacaatacaatgatgtcgctcttcggagcggtgcgcaccagatgggtgaatgtacgccactggcacatattataggcaacgatgaacaggatcgctgcaatagtcggcatcgggatcattccggcaaatggcatcaggacaacaagtacgatgaccagtgtgacggagtggactattccggcaacgggtgtacgtccgccgtttttgatattggcagccgttcttgcaattgcacctgtggcagggattcctccaaataaagcagaagcaatattacctgcaccctgtgcaaccagttccatgtcggaacggtgcttcccgttgatcattccgtctgcaacaacgcaggaaagaagtgattcgatggcagcaagtacagcaatggtaaatgcatttggaatcgcattctggacaatctgtacattaacctccggcagatggaatgaaggaagggaattgctgatcgtgtaaagattcccaatcgtggagaccttaagcggcaggaattgtaccatcaggcttccggcaataacggcgatcagcgatcccggaattctctttaagagcatcggtgagatgatcaggatcgcgagacttacgattccgacgattaaggcatctgtgtttatcgtagagatattttctgcaaatgctttgaatttttcggtcgtttcgattggctttacgccgtcgggataagttatgccgaagaaatctttcaattgcccgatcacgatcgtaactgcaattcccgaagtgaagcccgttgtgatcgtatatggaatgaatttgatcaggcttccaaaatggcagaatcccatcaggatcagaaagatacctgcaaggatggttgaaatcacaagtccgtctaacccgtcttttgcaacgatacctgcaacgatagttgcaaatgcagcagtaggtccggcaatctggacactgcttccgccaagtgcagagatgacaaatcctgcaacaatcgcagtgaagattccggcttccggtccgacaccagatgcaagtgcaagtgctatggacagcggaagtgcaatgattgcgacaatgattcctgcggtcacatcttttacaaactgggaacggtcgtaagatttcagtgaagtcagtaacattggttttaatgagttcatgtgttgattttaccctctctctcttttttattcctctaatttataaaaacaacaattcagtataacataggaagcaatttgcaaaaaccgggaactgagatgtttatatttatgtacaattccggaaaagcaaaatctccggaaacattatgttagattaaggaaaagtatcggggaaaagcttgaaattcatattctgagcgtttataatatgttgcgggcagttatatgccgcacaaaatagttagaaaataaataataaaattcaaagaaaaaggcaggtgaacagaatggacggttgcgatagtcatgggcgaagtagcagcataggatgggaacaaaaaagtttattaagcaacagtcggttctgttggatgtaagtatcgctgcgatatacattatagatttcttttatttcttatcctatttcccaatgagtatgacaagtgaatagtagcagtcgttgatggaggatatgatcgttacatatcctgcagtgtatttgtggtgaagaaaaccgggcaatctgtgccatggttatatttcacgtgaggaaaaaagggtaggaggtaaaggtatggaaaataaagattacacagttgaaatactggaaatcatcagaagcaatacatcaccggggattatgagaagcagactggaagattatcatgcgaatgaccttgctgaagtatttccgcagctgaagatcaccgaaagaagaaaaatctgtagaattctggatctggacatgctttcagacatctttgagcatattgatgaacaggcagcagccgaatatctggatgagatggatatcaagaaagcagcagcaatcctgtctgcgatggagacagatgctgtagtagatgttctgcagatgatgccaaaggagaagaagaatcttctgatagaattaatggatgacgatgccagaaaggatatggcaatcatcgcttcctttgatgaggaggagatcggaagcagaatgacaacaaactgcatcatgatccgtgagaatctgacggtgaagcaggcaatgagcagtctggtagaccaggcggcaaagaatgataacatttctacgttatttatggtaacggaagataatacattttacggagcaatggatctgaaagatctgatcattgcgagaagagaatccctgctggaggatctgatcgcaacatcgtatccatatgtatatggtaatgagctgatcgatgactgtattgagagactgaaagattattccgaggattcgatcccggtactggataatgacaacaagctcctaggagtcatcacatcccagagcatggtagacctggtcgatgatgagatgggtgaagactatgcgaagttcgccggtctgaccgcagaggaagatctgaaggagccgttaaaggagagtatcaagaagagacttccatggctgctggtattattaggtcttggaatgattgtttcatctgtagtcggtctgtttgaagaagtggtaagtcagcttacgattatcatgtgcttccagtcactgatcctggatatggcaggtaacgtaggtacccagtcgcttgctgtaacaatccgtgtgctgatggatgagtcgctgaccggaaagcagaaggcagagctggtatttaaggaaatgaagattgcattctcgaacggttcgatcctgggaattctgtcgtttgcactgatcgggctatacattgcattatttaaaggaaagacgtttgtattcgcatatgcggtatccggatgcatcggagtctcactgttgctggcaatggtgatctcgggagcggtcggaacgctgatcccattgttctttaagaagatccatgtagatccggcggtagcgtcgggaccacttatcacaacggtcaatgaccttgtagcggttatatcatattatggactgagctggatcttcctgatcaatatgatgcatctggttggatagaagacacatagcaagagcgaagagaaac

SEQ ID NO: 2888 - DNA, 544 bp, Unknown
  gut microbiota DNA sequence
taggactgattgcaagtgatgcaagccttccattctttacagatacgacatgggccagagtgactgtgattatcataaatatctgggtaggcgtgccgtatactctgcttcagctgaccggagtgcttcagaacattccagaagaactttatgaagctgcaaaagtagatggtgcaaatgcatttcagacatttaccaagattacactgccgtacatgctgtatgtgacaacaccatatttgattgtaacctttacaggaaatgtcaataacttcaatgtcatttatcttctttcaagaggagatccggtaacaaacctttcttcaactgcaggtaagacagaccttctggttacatggctctataaactgacaatcgacaaacagtactataacattggtgcggtaataggaatcatgacctttatcattctggcaattggtgcacttttcacataccgtaacagtaaatcctataaagaagaaggaggattttaatcatggcaggaaagaaattacaatctgcaaaaaagaagaaaatgatc

SEQ ID NO: 2889 - DNA, 1077 bp, Unknown
  gut microbiota DNA sequence
agtgcaatcgcgattccaaaatcgcctgtttctcctatcatatacgaaatactttcttttaatcccgagttggccctcacaaaaaatccaattatataacaacttgcaaaaacaattaaaactgcaattggcagtgcaaatcgtcctttctctcctacaaaccttaaccgaattgcaatcacaatccccgcaatcgcctgaaacacaaaaattgtgatcagctccattgccaacatttccaaatcaaaaacttctcccggctttatgaatacagcaattcctgcacagattactccaatcccccatccaaacactgtcataataaaggaaaacatgtatttttctctgacatatatttttttgtttacaggtaaagaaaataaatacgtgtagccatgttcattttcatcataactgatcgtattccctgaatatactgccataacggatggaatatacattgcaatgaaggtagctcctgtttttcccgttagtataaagaataatgccataaacgccaacatcagaaaaagattgctgccttgccggaaaaacaaccgaaaatccttttccagcagtcctctgattcctttcattatctctcgcctcctgtcaacataagaatcacctgatcaagtgagccgctctccactacgacctccggataattttctatataatactgcttctcgttcgtcaggcaggaaattccaaagttctcttttttctctttcaaaatgtaacttttatccactgcctgatattgcgcctcactgactttcaacaccgcatatttttcaagaatcgtatccatctcttcatgaagtacaatctttcctttatgaatcacgtagatgtcatcacacagatgctccagatccgaagaaatatgtgaactgatcaggatgcttctctccggctcttcttccatatattctcttaaaatgtccagcatcgcttcccttgctccgacatcaagtcctgctgtcggctcatccataaaattgggtagccttctcttatcccttgtaaacactggctctaacgggaaacacatcagtgtattgtgttcatttt

SEQ ID NO: 2890 - DNA, 17502 bp, Unknown
  gut microbiota DNA sequence
tattataacaaataacacctcaaaaaacaatagaaaattccttttttgtcttcatctgcattatatcatattgttataagcattgccatttcttttctgcttttgaaaagttacttatcagcctatgttttgtaaagggtgatattcagcatttctcacgcaacaagcccttgacaaaccatagactaataagttttaaggtaatcaagcagaaatgaaatagtctgctgtttcacggcaacaaaaaagagataccaacacacttatgtagtatctcttagtctagtagcaatattcttttgtttgcaagcaggtaaacatgggctgtttcttaatatctttttgtttgggaaacaccacgttcccatttgctgaccgttttatctgatacatataatttttcagccaaatccttttgagttaaattctttttctttcttaattcggttacaaataaaccgaattttttattactaatttgatacatacatccacctcctgcacacatattataatgggagtacgcataaatcaatcgactagcggtagaattgcagaatattagcacaaatatatcaaaccattataattatttctgtgaagttatattcggatattttttaagccatactatggaataattaaatctgtgtaacttataaccatggcagaaaaaaacaaccttccagaacttagaaatggtcacctgatatggaattgtaatttgattcttctttgaacccttacaaatgcagaagctgaacaaataggagttttcttcctacctgttcagctctttatttacctgtaaatcaattcttttaacacaatctcttctgccatattacgaataccatttaccgccctaacccattccatctggtcatgagctttcatttcttccgtaatgccctgcctctccatcatctgacacaccagaatcttcattctctcctgtgcttcatcgtccacagcattcagatgttctgtcagtctgtcttccaacatatacagtgaatacattgccggacgatgctctttcagatatgttttccgcatcattccatatttcccataatgcggttcttcatctgtactgacaagattcggatagtaaattccgtctgcgccaagtatgtaggttccacccatttttcaaatgtacttttcatgtgttattcctccttgaaatcagcgatgtccttagatcatcgcaaaatatttcagggcagccttgatagcttcttctttttctttcggacattgtggaactcttgcattttctgattttggaagattatagttttctcccacttcaattccacatttgcgttttacctgagaaatatataaatttgaaaccttcaagccaaattctttcagcacataatccttgatttcctgataggtcgctttcgtctctgcactagttgcatccagctcatctaagtctaagtcgatctctatcgtgtcatccggtttttgttgggacaaaagaactaccgtctccacatgataagtccccgggaacaaatctaccccgctgatcttctccactttatatccacgtccctgtatcatctccagatcccgtgccaaactggtcggtttgcatgcgatatacaccagacgctccactccgaaattcaggatcttcataagtgccttcggattcacaccgtctctcggcggatcgagcatgatcagatccggaacttcccccagttcatcaatgactttcaatacatccccggcccagaatgtacaattgtccagattatttaacttcgcattttcttttgctgcttctaccgcttcttctacaatctccacaccaaccactttcttcgcaaccggcgcaaggatctgtgcgatcgttcctgttccgctgtacagatcgaagacaactttttcattcgtatctccgatgtattctctggctgtctcatacaggacttccgctcccagcgaattagtctggaagaatgagaatggtgtgatcttgaattttaatccaagtaattcctcgtagaaatagtcctgtccgaacaggacttctgttccttcgtcttttacgacatctgcaaggctgtcattctttgtatgcaggattccgaccaatgttccatcaaagttcattgatgtcatcttttccagccatgaagccttgaatgtctggatttttttcattgcctctgcagggtcaactccaagttctgccgtatcggatgctgtgaccagatccaccaggatctctcctgtctttactgcttttcttaccagcaggtggcggaaatatccgacatggcgcatacggtgataatatggaagtcccgattctcccgcacattccagtgtacatgcaagaacctttctgtaatcttcatctacaatctgacaatctgtcacatttacaatatcatgaaaacttccgcgtttatgcattccaagtgccagtggtccgtctttgtattcatctccgaatgaaaattccatcttgttgcggtattcggttctgacaggacttggtttgatgccttcccagatatactccccgtctaccgcttcatccatcatttttttcacctgctcattcttcatggcaagctgctcttcatacggaagattctgataagtacagcctccgcactgtccgaaatgtggacaggctgacggaatctcgctggctgacggttccagtacttccagaagacgcccttctgcctttccttttctgatcttattgacagaaaaccttaccttctgtcccggcacgccattctttacgactacccatctgtcttcttccggcagataaatgcgccctttatttggaaattctacggattctatagttccttcgtatacctgtccttttttcatatctatcctttctgtcatagcttttgtctattgcaatttatttcattatctttactatttctggttctgtctcttgttccgcttttctatcctttatatactgctttcaggattgtcccttcctgttccactttcacatgtttcagacttttcacatactgattgaactgggaatatccataatcgcggatcttaaagtctttgtatttttcatacattttatttcccagtgtactgagttctactccggatcttcccgactttttcacaatctgtacgacgtagctgtcgatattttccttcagatcctgatcctctcttaaagtaaccgacacaatatttccatgttttaccatctggattcttgtgaattcctccaaaaacttggacagcatattatacccgtagctccgcacatcaaagtccgggtaaagactgaccagacggcttcctacttcaccgagtccggttggcttattgatatcctgattctcaatgatcatcttaatgatcgcatcttcaatcttctctttacttcgtctgtcatgtgttgtctcgctcttcgatgttcccggattctgctcgctcatcagattttccagaatcgtaaacttatcacacgctttcctgaatggctccggagtcttattttctcccatgccaataaccatctttccgctctctctaagacggctgacgagtcttgtaaagtcgctgtcactggatacaatgcaaaatccatccacatcattcgtatacaggatatccatcgcatcaatgatcatagctgaatcggtagaattctttccttgtgtataactaaactgctggatcggcgtgatcgagtttgtcagaagttcatctttccagcttgaatgctgcgtgctcgtccagtctccgtatattcttttatatgtaatgatcccatattttgacaattctgtcaggatcggcttgatgtattttgctgatacattatctgcatcaatcagtagtgcataacactgttcctgcataccttctctctcttctttctataaatattactgaattttccatgcggacgcacttgagattgcaaaagaaaagcaggccagtcgcctttcttttaccagatcggtttctaacctgcttctttcttcacttattcatccgcccggttcttatacctgatcgtcatcatcgaaaaagtcatcgtcgaaatcatcatcatcaaaatcatcctcgaagtcttccaggtaatccggggtaaagaagcaatatactgcataagcgattcctgcaactgcagctacagctccgactactgccagaatccagagtacggtcttaccgtgtttgtcctcttcttttttattcatcagttcgctaagcttggatgctgcaataatatcttctactttactcatgctcccacgtcctttcctctgctctttcggcaaatcattctttacttattataacactttacgtagtgtatgactacttatttttcagatttttctcctgtatcccggatagattccggattgttatactttctgaagtcttgcaaatgtggcaaacatcttcttcgttccgggtccgtcgaagtgaactgttacttcataatcacgtccgccttcaatgattgcagttaccgttccttctccgaatttgatatgtctgacacggtctcccactccgtaaggaagcttcccgccttttggtgtcccgaactgctgtaccggctttggtgcggtaaatgccttcgtcttaaatgtttctttcgcctgcatgaaagaggtcttcacccttacctgctcactttcttctttcttctctttttttgctgatggtcctgtctccagaagttccaatgggatttcttttaagaaacgggacatcttcttatactgtgtctccccatgtaccatacgttttcttgcacaggtcagtgtcagatctttctctgctcttgtgattcctacataacataatcgtctttcttcttccagttctgccgggtcgtctgctgtgatcgtcatatagctcggaaacagcccgtcttccattcctgccagatatacatgtgggaattccagaccttttgcactatgtaatgtcatcaatacgacataatccgtactttcatccagactgtcgatatctgctaccaaagctacatcctcaagaaatcctccaagtgtcggtgcttcattctgtagcgcacagctttcttcataagcagcgatcttattgcggagttcgtctatattttcaattcttgatgttgcctcttcactctcacattcgtggatcagcgcatcgatataaccagtttctttgataacttcctccaacagttccaatacactcatgtcttctgtatcattcttaaaatgctcgatcattgcaacgaacgattccagttttgcctgtcctcttccgatgttcgggatcaggtctacggcacgaagtgcatcatagaagctgcattctctggttgatgcatattcctgcacacggttgatactggtcagtccgatacctcgttttggaacatttacaatacgtctgacagccagatcatctcttccgttatcaatcgtcttcagatacgcaagaagatccttgatctcgcgtctcgcatagaagttcacaccaccgatgactttatatggaatactgtcacggacaaaacgttcctcgaacatacgggactgtgcattggtacggtaaagaactgcattatctttgtagctgcagagttctttattgacatgacgtctgatgtcaccgactacatattctgcctcttcataagcagaatcaaactgacgtaactggatcatatctccatcttcattctctgtccagagcgtcttgtcttttcttccctgattgttccggatcacggcattggctgcattcaggatattgccggtagaacggtaattctgctccagcttgatcactttagtatcatcaaacacatgttcaaaatccaggatgttcttaatattcgcgccgcggaacttatatatggactggtcatcgtctccaaccacacacagattacggtacttggatgccagcagacggatcagttcgaactgtactgtatttgtatcctgatactcatctaccatgatataacggaaacgctcctgataatattccagtacatctttctgtgtctggaaaagctgtacagtcttaaacaacagatcatcaaaatccaatgcattatttgatcggagctgtttttcatattcttcatatacttctgcaatttttttccggctgtaatctccttccgcacgcatacggtattcctgtggtgtcaccagttcatcctttgctttggaaatctctgacaacagtgccctttcccggaacatcttcgtatctacctgcagaagcttacagacctcacgcatcagtgtcttttgatcgtcactgtcgtagattgtaaagttggtatcatatccgagcagatcgatatggcgtcttaagatacgcacgcacatggaatggaaggtgcttacccatatactctctgatccgtatccaaccaatttgtcgacacgttccctcatctctccggctgctttattcgtaaatgtaattgcaaggatattccatggattcacctgctgctcttcaattaagtaagcaattctgtgtgtcagaacccttgtctttccggatcctgctcctgcaaggatcagaagtggtccttctgtatggaacactgcttctctttgttgttcatttaatgtatcgtatatactcaatcttatggtttcctttctttccggttttttattcttcttttttctttccggcctgttctgctttcgtcatggattcatgctctctttttatttcgctataaagagccgttgatgtccagttctgattctttgcagtaacgattgccttcagcggaacctgtactttttcttttttcatctggaataatagcttatccaatatccgattgtctgccagcagcatgacaagcatctcttcttcaaagtctgtgatttcttcatttttctcattatctgtcccggcagtttcctcccttgatgcctcttccgccacttcttctttcagtccggtcagtactccgattgtctttgaatactcttctttttctacatatttcacacgaaagccaagaaaacttcccagcatgccgatctttcttccctttttcgtgcctttcagattataacatagcatgattgatttcatatgcattctaccccttttcgaatgtctgtttccattatagttgctttgtccgggttctgcaagaaacaatttgggacggaggattttaaaaaatcctccgtcccaaattaaaaaaatgtcctgtccctttttcattttcattcatcatccgattcatttacgcactgatcgcatttcccgtatacagctgataatatctgcctttctcttcgatcagttcatcatgtgtaccacgctcaatgattcttccctgttccagtaccataatgcagtcagaattgcggactgtcgataatctgtgggcaataacaaatgttgtccttccacgcatcagcttatccattccatcctgtacgatccgttccgttctggtatcgatggaactggttgcttcatcaaggatcaataccggaggatcagcaatagcggctcttgcaattgccagaagctggcgctgtccctggcttaaatttgctccgtctccggtcagcatcgtatcatagcctttcgggagtcttcggataaagctgtcggcatttgcaagctttgctgctgccacaatctcttcatcggtcgcatccagtttgccaaagcggatattgtcacgcaccgttccggtgaataaatgtgtatcctgcagaacaatcccaagtgaatgtctgagatccgctttcttaatcttgttaatgttgattccatcataacggatcttgccgtcctggatatcatagaaacggttgatcagattggtgatcgtcgtcttacctgctccggtcgatccgacgaatgcaatcttctgtcccggtttggcatataatttgatatcatgcaatacaatcttctcatcattataaccgaaatccacaccattgaatacgacttcacctttcacctccacataatccacactgccatcattctgatgtgtatgtttccatgcccagcgttcggttctttcttcacactctgtaagctttccgtcttcttctttcgcattgaccagtgttacatatccttcatccagttcttctttttcatccatcagcttaaaaatacggtcggccccggccattgccataacaattgcattcatctgcatactgatctggttgatcggcatactgaagctcttattaaatgtcaggaagcttgccagacctccgagggtaaaacctccgacctttccaagtgccagcacacccccgatgatcgcacagatcacataactgatatttccgatctgtgcattgatcggtcctaaaaagttggcaaatgtattggctttgtctgcactgacatatagttcatcattcagcttcttgaagttctgcatgttctcctcttcatggcagaatacctttaccaccttttgtccgttcatcatctcttcgatataaccgttcacagttcccaggtctttctgctgttttgcaaaatatgccccgctctgtccggcagatttctttgaacagaataccatgattccgaccatgatcatcgttacgaccgtaagtgggatacttaagatcaacatactgacaaatacactgatgatcgtaatcccactgttcagaagctgcggcatactctggctgatcatctgtcttaatgtatcaatatcattcgtatataccgacatgatatctccatgtgcatgcgtatcaaaatacttgaccggtagtttctccatatgagagaacagatcatttcttaagttgcgtagtgtcccttgcgtcacattgaccatcagacggttataaccgaatgttgccagtacacccagtgcataaaatgctgctactctggcgatcgcatgtgcaagcggtgtaaaattggggttatctgataataaaaatggtgtgatatattcgtcgatcaggttcttcatgaacatcgttccctgcacattgcaaagaacactgacaacaatcaatactactacactgatgcagtgaaacttataatcttttaatacatatttcataaggcggaggaataattcacccggattttttacctgtgctttcattcctctcggctgtcttcccggtcccggcatcttattcaccctccttctcgtcaaaatcgccgccaccactggtctgtgattcatagacttcacggtagatatcattctgttccagtaattcttcatgtgtaccgaatccattgaccttaccgtcttccataacgatgatacggtcagcatcctgtacgcttgagattctctgtgcgatgatcagtttcgttgtatccggaatttcttcacgaaacgctcttcggatcttcgcatctgttgcggtatctaccgcactggtactgtcatccagaatcagtacttttggcttcttaagtagtgctcttgcaatacatagtctctgcttctgacctccggatacgttacttccgccctgctcgatgtatgtctcatatcctttcggaaaacggtcgatgaactcatccgcacatgcaagttcacacgcgtgtctgcattcttccaaagttgcttccttgtctccccagcggagattatcaaggattgttccggagaacagcacattattctgcaagactactgatacctgatcacgaagcacttccatatcataatctttgacatttctgccaccgaccagtacttcacctttcgtcacatcgtacagacgactgatcaggttaaccagactcgtcttggcacttcctgttcctccgatgattccgatcgtctcaccggaacggatcttcagatcaatatcttccagtaccggttcgtcactgtcctttttatacgcaaagtccacatgacggaattcaatacttccatcttctactttcatggccggatgttccggattcttaagatcactcgtctcatttaacacttcggagatacgtctcgcacttgccatactcatagcgaccatgacaaataccatcgacaacatcatcagactcatcagaatattcatgcaatatgtaagaagactcatcagttctcctgtcgtcagggaatcacttgcgatcatctttgctccgaaccagctcactaacaggatacaggtgtataccgccgtctgcatcatcggtgcattgaataccagatttgtctctgcttttacaaaaatgttatagatattctcacttgctcttcgtaacttagatgtctcctgttcctctcttacatatgccttcacgacacggatcgcagatacattctcctgcacggattcattcagatcatcgtactttggaaatgcctgctggaaatattttgtcgcatggctcatgatcaggaacaataaaattccaagaataattaccgctacaagatagatacatgccagtctcgcattgattgtaaatgccatgaccatcgcacagatcatactggccggtgctctggtgaacatacgcaggatcatctgatatgcattctgtatattggttacatccgttgtcattcgggttacaagtcctgctgtgctgaatttatcaatatttgaaaatgaaaatgtctgaatattgttaaacatagcctctcgtaagttccttgcaaatcccgccgatgcttttgcaccgaatcttccgcccatcattccggcgaataatccgatgaccgccgcaacaaccatgattccgccgactttgtagatgtggtggatatccccggtattgacccctttatcaataattgatgccatcagatatgggatgatcatctccatcaatacctcaaggatcataaagagcggagttgcaatggatgctgctttaaattctttaatctgttttgctaatgtcttaatcattccatttacgccctttctatttcgtttcttgttttatagttacatttataactccgattttccggattacctgacttcatatttcttcacattctgattaatctggtctaataccttataaaaaatatgaagttcttcttctgatatgccttcggaaagctcttcttcgatatgctccacaatatcctcaaaagattcctgacttgcaattcctttttctgtcaggattactttttttaacctggcatcctgttttaccgattctcttcttacgaatcccttcttttccatcaattgaagcagattcgtaactgtagatctacctactgcaaatctttgttcaatatccttctgaaaaatatcctgctcccggttctcatacagataccgtatgatccagccatgcatcatcgtcacttcatccactccggactttctcacatgtgcagacagattccttgacaatttcagatccgcacagtgtatctccggtccgatctttcttccttttctttccacattaccatcctttccgttcaattgttcacgctcaaattgtttgttatcaaattgtttgttagcaaattgtttgttagcgaacttattttatcatatccaattaaaatgtcaataacttctccgatattcagccgtattttccagacattttctgcaacgtgtataaaaaaaacgcttgccatctagttttcaaaactatataataattacattgaggtgataaaaaatgacaatagacacaaaagatatgctgaacagcattttatcaagcatctcacggattgattacgtgagacctgatgatattccgaatatagatttatacatggatcaggttactacctttatggaaaaagaactggcatccagtaaacgtcatgaagatgataagatccttaccaagaccatgatcaacaactatgccaagaacaatcttctccctccacctgtgaagaagaagtactccaaagaacatctgctgataatgatctttatctattattttaaaaattttctttctattaaagatattgaaactatgttagaaccgattacggataagtattttgacacagatcaggattttgatatcacttctatctataaagaagtatgcgaactggaaaagtccagaattccggaatttgaaaaagaaattatccgctcttataattcttctaaaaaatgttttgatgaagcaccggaagatgacagggattctctgcagttgtttgcatttatctgtaacctgagttttgacatctatgttaaaaagcagattgtagaaaagcttttggataatttccccgatctgcttcactctgaaaataccggtgtcaaaaaggattcggccaaaaaaaagaaataagaccgcacgtcttatttctttttttgcttctgcattcttgccaaatgcatctgcactgttttttcgcactttattctgctttttcgtctttgacttccccaagtccaattctctcgaataccatgtcatatccgtcattaccgtaattcagcgaacggttcacacgactgatcgttgctgttgaagcgcctgtcttttctgcaatctcaagataagtcttgtgttctcttaacatctttgcaacttcaaaacgctgtgataatgaaagcaattcattaatcgtacagatatcttcaaaaaatgtataacactcctctttatctttgaggcttaaaattccctgaaacagatagtcaaccgcctctgttctgattttcttactcatagcattatctccttcgtagcagattcattacttttacattttaacacactaaaattgcaaagtctatagttttttcccatgttttatacatgcttttaatttttccattgaaacattggcaaccaattcttccggaaaatctgtttctctcaatatttcttccgcatatggatactctgcaatatctgcatccacatgtgaatcactgccaagcacgatcatcactccctgtgctttacattcctttaccatctccagacagttctcttttgtattctctcgaaatccttccggacgcagtgatgaattatttacttccagtaatgttccggtttcttttgctttttttaccagacgcttcatatctacaggaaatctcccgtcatccggatgtccaatgatgtccacatacggatgttccattactttctcatatgctgcggttacattgtctattgtccgttcatctttaaaacacggcatatgaatactggcgattgcaatatcaagtctttcaagaaccgaatctgggagatcgatctccccccgcgcattcatgatattcagttctgttcctaataacagctcaatcccgtatttttttcttggaacaattcttaaattttgaaaatagaacaaatgacaagttccgggcatctctggtgcatgttccgtaattgcaagtcccttcagtcctttatccgctgctgcttgcgccatctcattcagcgtattatatgcatgtccacttgcgagcgtatgcgtatgtgtgtcaatttctactctcatttcctgcttctccttcctgttgtatttcatcagatcttctttatctgttatttttatatgttattttaaattgtaacttttcttcttttcagctttaacgccctaatatttcacaacatgaagtattataccgtataattttctttttttctacccattctatactggaaagcaggttttcctctttttttagtgaactactcggcaactaagttaccagagcatctgaattttggcgggataccgcctttttcagggtgcgtccatgacaccaatactgcttacctttcggctatgcagctacttttattatttctggattttttagtccggttacggacagttgcttctgttttccgaatgcggaaagatatttcctcaagatattaaatgcacctactgtatctgcgttaaatcttactccgccagttacatacatacctcgcttttttcgatttaatacttctgcatatctttttgatacttctggtgataacggactgcactgactggtatagctttcttcctgttttatcaattgtattccatacagttttaatttatattccagcatgatgtacagcctgttatatggcagtccgtgaaacttctggttggtcttatgccccatatcttttccgttacggatattacagatatctcccacaaccacacagcggatatcttcttttctgcaatattcggcaatccatctggtcactttgtgaaggtagtcctttactgcattctgctttttcctatatagtctctggatatgttttgatgattttggatattttattccttttttcgattgctgcgcataccatacagactgtactctggctatctctttatgaaagtatctttccagagaaagatattttcttcctagaataaaagtccttccatttccagaatcataacaggtcatcaaattgtgaagaccaagatcaatagataaataatgtccattctgggaaagatgctctggttcttcaatctcatagataacgataagatcacatttttcattttccggtggataaatccgcagctgttttatatgatccatgtccttgaaaatcttattttcaagatatagaaatttttcatagatcccgtatgtttcttccatatagcgtttcagatcctttggcagagacaaccgcagctggtctgaacctttctcatgccggattcccatctgcatgtatgtaacaggtatattgtcctgtttaaaacggggcggatttggttctttaatccctccagtctttttcaggacataaaaagatttccatgctttatccaactgtttgcaggtctcctgcgctgtctgtgacggaagttgtctgtaccacagatttcctttatgtgcttttttctgatagtaccagtcaggatacttttccagtcccaattctttataatgatgacgttcatagttacagatattccaaagtttggaagctgcatagcacatatgccctatgatattggaatattctgaccggatttttacagatgttctatgcgacagtagcattcttcttcccccctagtatgttcttgcggatggaaatttacattccgccttgaatcaatatgacttgctctgatgttccatataacggcggatattttcctcagatacagatccgattgtttccacataataggaatgattccacagctctcctttccatagctggtttcttatttccggaaaacgttcgaacagttttcttccagtaatccctttcagatacttaacgattgctgttattgataacttcggtggagctgatacaaggcagtggacatgatcacattcaccacattcgaatagatgaacggtaaaccccttatccgctgcaatctgctgcaccagtttctgaagatattcctcgatttctggttttaatatctttcgcctgtatttcaccgaccataccatatggtagttgatattacacacgcaagttctgtaatgtataagtttttcttccatacacataatataacatgagaagtagaaacgcgcagcaaaacaatcgaacatattttcgatcatttatataccggttacggcattaatatcacaggtagggagattattatattatttttaatgtgcagacatgcacaatcttgcgctttcatctcggtcattgaattgccgaggattctcgcttattgtcctaaataaccactatttattcacccctctaatatatctgaattataaaggagtttttatttatgaagaaacatgaaaaaaagactgtaaatgtaaacccattgtccaaccaggaactcattgattcttacgattatcttgcaactgctgcctcttcccatgactgtaccggtttgattccttctgcgcctcttaatcctgcggaactggattcgtacgaggaactttatccatttcttcctccggtctcatgcgcagatgatgctccggagcaggctccgccttccggtaagaatccatctgatattaagggttaatgttcatctgaaaatactctgcaaaatacctgtttttccttgacatgccttccaatcacagctaatcttataggagtgtaaaacatatattatatatattgagaggtaactgatcatgaaaaacatactaatgatagcaaccggtggtacgattgcatccaaagagggggatcttggactgacaccggctgtgacaggggaagaacttgcagccagcgtaccgggaatcaaagacatctgtcatctggaagtacttcagcttatgaacatcgacagcaccaatatgcgcccacgtcagtggctgatgatccgtgatgcgatcatggaaaattataacaactacgatgggtttgtcgttcttcacggaacagacaccatggcatatactgctgccgccctgtcttatctgatccaggacagtgtaaaaccgatcgtactgaccggttcccagaaaccaatggccaatccttataccgatgcaaagatcaatctgttccagagtattctgtatgctgccgacgatctttcctgcaatgtctgcattgtatttaacggaaaagttgttgccggaacccgcggacgtaagcagcgcaccagaagttttgatgcatttgacagtatgaacttccctgaacttgccattatccgtgacagccgcatcatccgttactatactgaagaacgtcccgctcctcagaatctgaaatcttacgcaagtcttaatgaccgtgtctttgtgctgaaactgactccggaagtcaaagctgagattttcgatctgttaagtgggcactatgatgctatcatcctggaaacctttggtatcggcggtatcccggaatatgatgattcctttgaaaaagcgatcttctcctgggtagattccggcaagacaatcgctgtcaccacacaggtgccggaagaaggctgtgatcttggcgtatatcaggttggaaaaaaattcagtaatcataaaggaatccttaagtccgatgatatgacaacagaatccattgttgcaaaactgatgtggattcttggtcagacggataaacaggatgagattgcgcggttattttatcgcgagatcaatcacgacagagtctgagttgatttgggatttaattcagaaaggctgtggatacccgaaccggaataaagcttggaaaggcgttcctgctcaggttccatcggcgggtcaattctaaaggggcaaaattctgctaaaagcaggctttcaaaatttgaaactcggcatacgcctcagacagtcaaattttgaaaacctaacgcagaattttgccccttaagaattaccaacgcctctttcacattcactggaacgccttttcaagctttattccgtgtgtatcaaatgccttacgaattaatggcaattgtgtaacggttgtggcctccaccgggttacacttccgggcattttatttattaacattcgctgccagtcacgacttgaaggaaac

SEQ ID NO: 2891 - DNA, 268 bp, Unknown
  gut microbiota DNA sequence
acgcttccccgttcataaattaaatcccgaataaatctatgcatcgaagtctacttcaaatgtaccttccggtgtcttcatcgtcagaactcccagattaaaatcctcatcccgaatcgtaatatgatactcaaataccacatcttcttcaaattttgacaataataaatacgtcccgttttcttttccatcgatctgatcacagatatcatcatatacatctgcccccgagattggtctcggatatccggatgcctttatttttttt

SEQ ID NO: 2892 - DNA, 21267 bp, Unknown
  gut microbiota DNA sequence
gatctcatactctattgattcataataatggttaaatcactttatatcttaaccatcttctgctatggaatctccatgtaaatattactgcacgtaccgtccagtcggcaaacattccgatccagacacccatcgttccaaattccagaaaccggatcagtatcacgcacagacagaacctgcacagccacattgtaatacaggatgcagccattgaaaatttcacatctcctgccgcacgaagtccatatgccggaataaatgccagcgtccatacaatcggcttcacaatcgtaatccagattaccatatggaaacacatctttgcacttgcaggctccatgccgccaagaactgttacaggtccggtcaatgcaaataccagcaagcagcttacaatgattgccacttctgcgatcacgcttaatttttttatgtaatagaccgcctcatcttttctgtccgctcccatacactgacctacaattgtcatcaaccctacaccaattccgattgccgccattccattcagattctccagaatatttgtcattgcctgtgccgcgattgctgttgtacctaatgttgatacggtagactgtatcgccagtttcccaagctggaacatactgttttccacaccggacggaattccgattccgagtattctccggatcattgcccagtccggacggattttcaggtaagctcttaccacgattggctgccggtcttttcttaattgaatcaatactaccactgcacagaatatacgggaaaccagtgtagagattgccgcacccgcaactcccatatggaaaatccagatcataattgcatttccaacaatattcatcgcattcgatatcatggaaatgagcattggacccttcgtattctcctgcgcacgaaaaatggatgccgccgaatcatatgccgctatgaacggaaatgaaatagctgtataaaagaaatatgtctctgaggctctcataacgtcagcttctactgaaccaaaaatcaggcgcaaaagcggtttcttaaatccaagacataacacactgactgcgatcgagatggccgtgatgatgaataacacctgtcttgcagattcattcgccatctttttattctgttgtccgatatactgtgaacagacaattgctcctcctgctgccagtgccgaaaatgcctgtatcacaagaatattgatagagtccaccagcgatactgccgagatagctgcagatccaatattacttaccatcatcgtatctgccgttcccataattgaattcaataactgttccagaacgaccggtatcagaataccggcgatcattttatttgaaaacatatgctgttgtttcactttttctgctccataatatgaatgatttctttatccgtctgcgccatcccctgattaccgatctgtgccatatgacggatacagtcttccggtgtctctgcacagataccgtcactcacacgaagcggcgcatcatgaacggccgtcagcgcacaaagcagggctgctgatgatcctgttgcaaccttcattgcacagccgacctttccgccgtcacagatcattcccgttaccgtcccggacatatttcgcaccgcatacccaagctgttcgtcactgcctcccagcaggtaagcaattcctacggatgcagccgttgatgatgccatgacacaggagcacatcggtgacagctttcctatataagcattgatataacggttcaccaggtgagcaattgcaagcgcacgcacctttttctccattgacacttccaatgcgtctgctgcttcactgaccggcaggatcactaccagaccttttgttcccgcaccggaactgctcatcgtcggcagcggacagccgtccagacggcctctcggctgccgaacttactttcagcataattctggtcagcagatcattcttcaacacctctgaacctttttcactccgaagcgtatctgcaattcctactccgactttcttatcttcggaataagctgccagtctttcattcatttccactccatccatcaggaaatgtaattcttcctctgaagctgtatctgcaacctggcggatctgtgcaattgtcatctgtttcaacgcctcaatcagagcattatctgatgcctgtccgttttcctgatttttttcatatataatctttccatttttctccagatatacaagattcgtatgtgttcctctgatgaccgatgtgatcatatctgcttctgtcttgatcttacatttcacatacaatccctgcccatgctctttaatcttcacggatacagcagccataccgcacagttctttcatctgttccagaatttccggtgtgatatcttccagaagttccagccctttttccggattcttaagatatgctcccagtgctgctgcatatggaagtcctacataatcacagcctgggattcctgccgacattccatttttatagattcctgcatttacttccacttctatcgagcagatcttattttccgtcattttccctgcatttgctgcgcacagtgctacacataccggttccgtgcagccaagtgccggaactacgtcattctttaaaagtgtaatcatttcttctttttttaacatatctcttccccaaactttttatttcgaccaggttggttcttcctctcctgtataggcaaatctgccgtcattcttttcttccagtgctttgatcatatgataggtatattcattatatggtgttggaatccccagttcttttcccatacgcatcagcgctccggaaaacatatcgatctccgtatgacgtcctgcatccagatcctgtaatgtggaataacgggcctttggcggaaccgcacttccccgtccggacattctgtccgctttactgatgtcaattcctttcgcttctgcaattgcttccagttcttttttttaaccattctgaattgctttcatatgttcactgtcccggtaacagccaacacctgctcccaggattgcctgtggcagattattgcagacattcagacgaaatttacaccacacttcttctattgcatattccgttgagcggtaatggattcccgtaccggcaaacagttctttcaccgcctttaccctttcactttcgtatggggcttcatattcaccgaagatgatcccaagtgttgtctctggatcgaaatgatatccgtccgcttctctgtgtgacgctactttaatcacagccggaagaatgtgtgactttccaatctgttctgcgatgatctcttcgctgtccacgccattcatcaggctcattacactggtatcttttccaactatttttcggatgctttccaatgctcccggtaatgcaccgtattttaacgaaacgatcaggaaatccacattttctgcttcctctggtgtccacacctccggatgatagacctttccgttgatcgcacagccctgacggctcagtctttcctttctctctccttcggcgatcacgccaagctttatatcttcacggtccgcaagtccccagatcacataggaacctaccgcacctgcacctaatactgcaactgatgttatcttcatgattcttgtcctttcatgttctgtctctgttaatcctcagaatcgaccgccaacaacttctcttgcatacttttgtatctacatgacctgccactggcagctccttacgaacacatggcgataccccaaaaatggctgcaatcagctccctgactgcaaccattttatcacattttttatacttcggtaggattatttcaattttccgtattcttcatcggatactgcctcgcaccattcattggaagtctcttctctcgatcagtaactgtgtatcgtaacgatatgcgaactgatcatcttctgcatcaattgattgaactcccatctttcttatcctccgttatcattccaaaattctttacatcggtgttcctacttcgatcagattgccatctggatcatagaaacggaccaccttctgcccccagctgtgtgtcatcagccggttgacatacctaacattaggatacaacttttcaagctttctggcaaatgcttcgatatccggttcttcgaaatataactcactggcatgattttccggaataatatccttattcagaacttctttccatatcttttcgtcctgaagtaccaggccttccgttaatatcacattgccgtcattgtcaagaattgtattcagtccgaacagatcatgatagaattgtttggaatgttcgatatcttttacaacaattaatatattttttaatcgcatttcttttctccattatgcattgacttttcccggatttcattttccctgagctttattttatccagactttattttccctgctctgccagatattcttctgtcaaagctacggcatctgcgatacactgtggacaactgcagagaacttttcctgtctccacaccttttaactcccggcagatgcaggaaccatttttctctttgaatttttctactttgcttcggatcttcttatatgtatcccctttggttctggatccttcttctgtgcctccctgactgttatcaaggccgatgatcattgccattccagacaatgcaccacacatctccatcacgcccatacccagaccaaaaccttctgcgatacgaaacatatcgtcttcactgattccgaattctttgcaaaatgtacaggctactgcctgggcgcagttgcatcctctctggtgtaattctgctgcatgttctgcttttgtactcatatttctctgatctcctttttgcttcatttacttccaatattattatttcataatcagattcaacacacctgttgactgcaggaacagaatcaccataataaccggcataatataacgcatcatcacattatataactttttacgtttgaatttctcgccattcagttccatttcctctgcaatccatgacggcttcatgatccagccgatcaagattgctgataacagcgaaataaacggcatcataaagctgttactgatatagtccatgatatccagaagctgtcctgtacttccgtttggaagtgcaacttctacatagaagatgctgtatccaagtgcgatcactgctgttgcgataaggtagatcaccgataacactctggtcgtcttcttacgctctgtgtgaaataattccatacagtttgcagtgattgattccagtaccgaaatgcaggatgtcaatgcggcaaatcctgccagtacaaagaacagaattccgatcacacgtccgaccgttcccatactgtagaatacctttggcaatgatacaaacatcagtcccggtcccgctgacattccgtccaaaccggagaatacgaatactgctgggatgatcataacaccggcaaggaatgcaactccggtatccataatctcaatctgtgatactgccttattcagatctacatctttcttaacatatgagccatatgtaatcataattcccattgatacactcagagagaagaacagctggctcattgcgtccagtgtaatctgcaggaagcggccaaccgtaattcctgtcagatccggtttcatatacaccttaagcccctgcaatccggtacgtaccgttccatcatccagcgtagtcttcaatgtaagtgagaaaattgcaattccgattaccataatcagcagaaccggcatgataaatttcgaaacccgttcgattccctcttctacaccgttatatacgatcaatgctgtcagcagcataaagatcaatccataccacaccgacgatggtgaagaaatgaatgcggtaaagcagtcatctgctactgcctgctttcctgaacttgtaagatagatcacgatatatcttaagatccatccaccaatcaccgcataataagtcatgatcaatactggaaccaggaatgtgatcactccaagaaatttccatttttttctcattgattcataggcatagattgcgctttttcccgtcttgcggccaattgctatatctgtagtcagtaacacaaaaccaaccgtcaataccagcgcaagatagatgatcaggaaaagtcctcccccgtcttttgctgccagatatgggaaacgccagaggtttcccacgccgactgcgcttccggcagctgcaaatacaaatccaatctgcccgctaaagctatttttttgtttcatactcttttttcctctcgtttttgttaatacttcaatattttaccattaattcatttaaaataaaacaagaaattttataatcaatccgcctccctgtcactgatctttcgcatctgaatatactataaagcatagaatatatttccccgggaggatcttatgaaaaagcgtatcaccgctcttcttctactttttacactatccgtcacttcacttttggcatgcacatccgctgataaaccggaatctgcgacaggcaaaacatcaaaaacttcaaaatctatcaatgataaaaagacggatctgactcctgtcacactgaatgaagtcgctcattctatcttttatgcaccgatgtatgttgcaatggaaaagaattattttgagaaggaaggaatcgacctttcgctcgtgaccggttttggtgccgacaagaccatgactgctgtcctttccggaacagccgacatcggatttatgggatcagaggcttccatttatacttataatgaaggggctcatgattatgtcgtaaactttgcacagctcactcagcgtgccggaaactttctggttgccagagatgatatcaaaaattttaaatgggaagatctgaaaggcaagaaagtcattggcgggcgaaaaggtggcatgcctgaaatggtatttgaatatatcttaaagcagaaccatattgacccagcctctgatcttacgattgaccagaacattgatttcggttctacagctgcagccttttctgaagaaaaggctgactatgactttacagtagaatttgaaccaggcgcaaccaaccttgaaaagcaaggaaaaggatatgtggtagcttctctcggaactgacagcggatatgtcccatacactgcattctctgcaaagaaaagttacatctcccaacatccggaaatcattcagggatttaccaatgctctgcaaaaaggtatgaattatgtggcatctcacactccggaagaaattgctcaggtaattgcgcctcagttcaaagagacaacaccggataccattacaaccatcgtatcccgttactataaacaggacacatggaagaaggatctgatcttccgtcaggaaagttttgatcttcttcaggatattttagaagatgccggagaactaaaaaaacgtgctccgtataagaatcttgtaacgacaatttatgccgaaaaatccgcaaaagcagtcaaagatacaacgctttcacattaacaataaaaaataatgttgcaaacatttctttggtttgcaacattattttttgactctgtcttctcctataccatcgctgtatccaaatgctctttcacataaccactgactttatctctcggcatctccatcaccaccgccagttccccatacaggaacttttcagcactggacatatatctctcatcgatattaatcgtctttttccctgcctggattctttctttatttctcccataagatgtcttgatcaatgaaacccattctctgcactgattgtgtaataacgcatttttgtacattgcttcccgctgcttttcattcgtcacaccgattgtatcaatctccgacatctctttgatcagattctctgcttcttcttttgtaattaactgtctgatctgctccctcttgttgtcaaccggtgtatataccgttccggctgcatcatataccggttttaacgtataatactctttatccgaactgcccatatcaatctttccaatatttaccacttcacagacgccctccttataatgcgccacataatctcctattctgaacatttctgcctcctgttcttaacacttctctcatggtaacttctgcagacgtatgacaacgctaaaagggcgcacaatccgaagttatatcgaactgcacgccaacttttctggtatcgtattatgaaatttgtaaacgcgctgacataaactcttgatatagctattataacataactcttgatatcagtgtcaaccaacgtgaaattttttatgcatttcttctttaaattcttttcttttgaacatgataagtccaatcatcagcagaaaactacagccgatacagatgacagacggagttctgtagcggatcacccctgtcatgagcagtacaaacggcagtatcatcgaatataccgacgccattacataatatatcatatactctcttggtgataatgaccgtattcgggatatgatcagcattacaatctggatcaataggcagatattcgggattccgatatttaccgaccatcccctccatccggttcccagatcccataacacgcaaatacctgacatgatcagaagctgccacgccgcattcttcaacaaattgaaacgcttcacatacccaactgccatcgtaaaccacatcgttgcacagccggccgccacaaataccgaccagtgtaccccgggggatatgatgatatctgtcatcatactgatcacaattgctgcaatacagcagaatgtaaatatctgcaacactttcttcccttcgtaatttgcttttgcatccttcggaaaatctgcttctgtaaccgtgacctgtacgccgagttctttcaatatccggtaaaaattccgctggatattcgtactgtcatatcttgatgtaaaactgagtgaaagtgtatccttaaaagaacagatgcataattccgtccggttcgtgctggtatacactccgaatttttcaatatagtccgcataatcttccggcatctttactacactcatattagaaagcacagccgtcacttcctgctctgccatcttagctcctgcacggatacaccggttcttaagttccagaggtgcccactttaaaattttatgcttttctattgcgatcaattcattcatccgacctgccatatgttccttagacagattctcccgaaaatatatcttaactgcttccagtacatcttcaaacgaatctttttctgctccaaactgatatcccggttctatataaccaaagaaattcagcatcgaatcggatggaaatatctttcttaaattcaccggaaccatcagtatgaccggctttttttcctgtatccggctcatttcctcatgaattgcacatatgaatgccgtcgttaaaagcaccgacatagatactcccttttccctgctgatacccagaagttcttttaccggcacagtcgcctcattgacttgcagttcttcgtatccctttccgttctttttaatctgaaatgccttgatcttcttctttttctttctcggaaaattcggatcgtaataacggctgaagctgtcatcctcctgatcctttaccgtcagatactgatctgataattcaaccggttcaagttcatccttatgaaccagatgcagataattcttcactagttcccgcaagaattccgtcgcgccggttccatcagtcagtgcatgaaatacttcaaaattaatccgttttttataataggtcacttcgaatagaagcgtctttttatcccgtacatacagactgctgcatggttctttatattcttttcttactatcggtcttaattcgcttttctccaaatagtgccagaacaagccttttctcatgaccgacaggaataccggatatttctcaattgtctgatccagtgcctcctgcagggcattttcttccacttcttccttcagttcacaatagaaccggaatactctggtatctttcggactgctggcggcagaaaataactttgctgcattatccagacttctccagtaagcacgtttttgttcaaacactgcttttcccccttctctctcccgctgctattcaccatccgccggattgacattcttttcgctttctttctgtccatagctgtcaagaaagcggttaataatcgcgaaactctcctgcacatggtaatattttaccccaagtgcaaaaaatccgtgaagtgcatcctgaatccggtgaatctccacctgatttccggcttctttcagacgccttccatactcttccccttcatctctgagcggatcacattctgctgttaagatcaatgtatccggctggttactgtaatccgtttccatcagaggtgcaagatatttactcctcttatcttcttctgccgaagcataaaaattaatataatccctcatctttccagctgtcagaagatactctgttccatagcgtctgactgacagatacggggaattctcactgtaatcattattcactgccggatagatcagaatctgtctctttggcagaaattctccctgatctcttgccatcagtgaaacagctgctgccagattcccgcctgcgctgtccccgatcaaagtaatcttgtccggatctgtattcaaaatgaaccggttcgtaaacatagcctttgccgccatataacagtcatagaaacctgtcggaaatggatattccggtgccagcctgtactctaccgatacaacaatatgatttgttgccgatgccagacgggcacagattctctcataattgtcaatactttccgttacccatccgcctccgtgaaagaacaacaatgccgggagatcatcttccatcttctctcccggaaggaatatcctcaccggaatctgatgatcaccattataaatcttataatcaatcgtcttataaaagattttcattggatcgattgcctttaaattggccagatgcctcgaggcttctacttcaatgccgtcaaaagacagagctttcaatactcttctcatggatttattaatcgccatactacttcctttacctgtaacttttctttctgattttccttatctgatatatccttcttcatacgcttttgccttattaaatgcatataattctgcaaatgtcgcctccctgtacggatttacatagaatatcccaacgattccacaggtaattgcagacagtaatatccatccgataaatgacagatccagaataaatgtctccatcttctgcccgtccatcatacgcttactgatctgaaatgcttcttttctgtccattcccggattctctgcaagaatgtaagggatcatcagatattcataatgttttacaattcccggaataacgaaaagcagcgtccacaaagatgtaaacagatttttcaggaacatcgccaacacaacattcacataatttccggaacggaatgcatcaaatatggttccgactgttggattctctgtcttattgagaacaaagaacctttttccgcctacttccagaagacttcccacaaatatctccagtgccagaattatgagagtcactataattgctgtcattgtaatcgccaatccggcaaacggatatccaaatccatctgttccatacaaactgttctgcgaagcactgcctccggctcttcctccattcacaccacttaatcctgtgataattcccatgatcacggctacagcgacacatgaccagtaattctttttaaatgcaatcctgccatttgttttcagtctgtctcttgtccaactcatatcatatcctccttgtctattcttttgttatgtctgcattctgaatcttttcattcagatcattcagatatacccaacgttccatcttttcatccagttcattccctgcctcttcttttttgtccatgagttcccgtaatttcactgaattagtcgcattagctgcaatctgtgcatccagcgtctcgagcttttcttcaagctttgcaatatcatcgtcgatggtctcaaactcccgctgctctttgtatgtgaacttaagtttcgattttctctgtttccatgtatctttggaagagttttcccctttctttgattgtccttctgttgcggcagcatgtcctttcagtgacatctccgtatccagaccttccagttctttccggatcagataatcagaatatcctccctcaaactggcgaattttcccatctccttcaaaagaaaaggtacggttcacgatacgatcaaggaaataccggtcatgagatactgttatgataattccgtcaaagtgatccagataatcctccagaatggtcagtgtctggatatccagatcattcgtcggctcatccaggatcagcacattcggcgcactcatcagcacacgcatcagatacaatctccgcttttctcctccggaaagcttctcgattttcgaccactgcatggctccgtcaaataaaaaacgctccagcatctgtgatgccgtgatctttccgtcagatgtagtgacatattcccccacttctttcacatagtcgatcactttcatggacgcatccatatattcgttctcctgcgagaaatatccaatccggatggtctgcccgatttctattgttccactgtctggcctcacgatcccattgatgatcttaagaagtgttgtcttgccacagccgttcggaccgataattccaatgcggtcatttttcaggaatatatagctgtaatcactgatcagctttctgttaccataagatttgctgatattctccagctcgatcgtcttatttcccatacgggatgctacggaatccagtaccactctcttttcttcctgaatatccttgatctcctgcatcgctttgatccggtcaatatgtgctttctgcttcgtgcttctggctcttgcacctcttcccagccattcaagttcggtgcggagaaggctcttcctcttccgttctgtagccagtgccatatcctgacgctctgctttcaatttaacaaattcggaataatttcccggataactgtatagcttcccctgatccacttccacgattcttgttgccacacgatccaggaagtaacggtcatgcgtaaccatcagtattgcccctctaaagccgatcaaatattcctccagccactctgacattgcattgtccaggtggttcgtcggctcatctaagatcagtatgtcagccggtgtcaacagtgcattgaccagtgcaatcctcttcttctgtccgccggacatatgctctactttttcatcataatcatagaaccccagctgattcagcatagatcttgcatctgcctcgatcgtccactggttcagttcatttacattatctgcaattgctgcgcgaagaactgttgttccctcttcgaattccggtgtctgcggaagatagcagatcttcacctgctttcccatactgatcttcccttcatcatatggttcgattcctgcagtcacttttaacaacgtagactttcccatcccattgattccgatcacaccgatcttctcattttcattgatactgaatgcaacatcattcagaagaacacggtctgtataagcctttgtaatatgttccatcgtaagtaaattcatacgtttgttctccttcatgtatctttcggatacttttataagtcagaaaaaagaccggaaacaccgatctcttttcgttctccactttctattatattttacagaaagatatatttcaatatgaataataccgcaagtacatacattaatgcgctgatcttcttttcttttacctttccagtcatcagattcaggatcacgtaagaaatcactcccatagagataccttctgagatgctgtagaaaaatggcatagccaggatacagatgtagcatggcagtgcttctgaaaaatcatcaaactcaatgtgtgtcacatttgtcaacatgtagaatcccactacgatcaaagccggtgctgttgcaaacgatggaattgcaaggaagattggtgacaggaacaacgacaacccgaataaaatggctgttgttgcggaagtcagcccggttcttcctccttcagatacgcctgatgcactttccacaaacgtggtagtcgttgttgttccaagaactgctccgacggttgttgcaaccgcatcagccatcagtgcccctttgatattcggaagatgtccttcttcatctaacatacctgccttggtagatacaccgatcaatgttccgatcgtatcaaacatatcaacaaataaaaatgcaaagataacgacgatgaaattcagggaaaatactccgctaaaatcaagtttaccaaataccggcatgatactagggattgaaaatccactgctaaagtccggaagcagactgtagaatccaatcttcggatccggcacatagatacctgccatctggcagataattcctaaaatccatgtgagcaggattccccataaaatatttccctttacattcttaattaccagaattcctgtaattcccacaccgatcaatgcaagaagaaccgtgattcccacgttattcatggatgcttccacaccttttgcactgttgtacccatcaattgagaataactccaaaagcgtagaacctcccactacgatatttgcattctgaagtccgataaatgcgatgaacaatccgatgccgacactgactgcagacttcagatttttcgggattgcattgaagattgcctcacggatatttgtaagcgaaagtacgataaatacgataccttctacaaagacggctgtcagtgcaacttcccacttataccccattccgagaacaacggtatatgcaaagtacgcattcaatcccattcccggcgccagtgcaaacggataattggcaaagaatgccatcagaaacgtaccgatcattgccgccagtgctgtggatgtaaagatcgcaccggaatccatccctgtcgcagacaggatactcggattgaccgcaaggatgtacgccatggtcatgaacgtggtgatacctgccataacctcggtcctgacatccgtcccgttctcacggagcttaaataatttttccaccatgttactcttttcctccttatactctcaacaacaagatattaactataacttactgtatttcccttattttttttctcaaagcaagtacctggttcggtgctacagacaactcatcgatccccatctggataaacttctcagtcagactaagatcagccgccagatcaccgcataatgcgattttctttccttccaggtggatattattggcaataatacggatcatcttaagaagcgccggatgatgtgtattataaaagcgctccagtctgctgtttgttctgtccattccgagtgtcagctgtgtcaggtcattcgttccgatactgaagaaatctgcttctcttgccagctctccactgatcataaccgctgcaggcgtctcgatcataacaccgatcttaatctcttcattgaacggaatcttctcgtctttcagttcattctttatcttttccagaatcagtttcgcctgttttacttcttccacatccgtgatcatcggaaacatgaccgacatatttccatatgcagatgcacgtaaaattgcacggagctgtgtcttaaatatctcatctttatccagcgatacacggattcccctatagccgatctccggatttctatcttctccgagctctagacattctgcctgcttttcccctcccagatctgcggtacggattacgacctttttggtgcccattgcctctgctgccagacggtatacctggaactgctgttcttctgtcggcagctttgtcccattttcgatatacaggaattcgctgcggaataatccgattcctccggcatcacttctcagtacattttctatatcttccctggttccgatatttgcacagacgtcaatcttctgtccactctgtgtaatattctcttttcccttcagacgttccagattctgtacctgggtatgattctcatcctgcttctgcttcatcttggaaatcgtcgtataatccggctcaatatatacttttccctcaaaaccgtcgatgatgatcgtcttgccttcgtattcttttttcagggattctcccagtccgatcaccgatggtattcctttggttcttgcaagcacagccgtatgggaattgatagttccatatctggtcacaaatccaagaattttgctcttatcaaactttacagtctcacttggataaagttctcccgcagcaagaataaacggctcatccgtcagcatcttatctttccatgtccttgcaagaatccggagtactcttgtcgatacatcctttacatctgcctcatgcccctgcacataattcttattactctttgaagcgcttgccaaaatattttcaaccgcattttttaccgcatattctgcattcagcttatgctcaacaataatacttgtaatctgacggatgatctcctggtcttccaggatcatctgctgcatctcaaagattgccgcattcgcttctccgacatccttcgctgccagatcatacagatcgcgtaattcctgcaatgccttctgtctggctttttgaaaacgcatcacttctttttctacatctttgacatagatcctgcggatttcttttgtatcacgcttataaaaggaaagtcttccgatcgcaatcccttccgatatcttttttcctgtcaatgtaatcatagtttttccaaccttttaatcctttgttagtttgaacaatattactttacacgtttgccgttcattcgtcaagtagattgattttttgtacaaaaacacaaaaacatttcatatatccattgacgtatttatcaatatatgctaatctgacaatagtgtattttatagttttcctatataaatatgcgatttaataatattttatggaggtatgatcatgaaaggtactgtaaaatggtttaacaaccaaaaaggttacggtttcatttctgacgctgaaggtcatgatgtattcgttcattattcaggactgaacatggatggattcaagacgcttgaagaaggtcaggaagtggaatacgaagttacagacggcgccaaaggaccacaggctgttaatgtaacaccgctctaatcataacgaatctaagtttttgatgtactttttatatattaaaatatagctatttcagatttgaatatttaaaagaaatacatgacttaatgcgagagattacgaaaaaaagccggataacaaatgttatccggctttttcgtacctgtaagactaattctgattctgtggtcttgcaatattcagttgcagatccacaccaaatggattcaccactacacctgtcatttcatcacccattgcttccggaacttttaccgcttccagcactcccatagaatatcttgtatccgaatggttgttctggaacttcaggaactcctgaacatcggtaaataccggcaataatacctgtccgtcattcttattcaacaccggcattttcttctcttccgtgaccgcggtaatgaaggttgcatcctgatagtgcgccatcaattcttcctgaagatccttcatatcttctgtaatcttcatttctttctgcttacgtgcttcctgcatgaagtacatagctgtaatctggaaactcggattctcgatcggttcctctcccggtttctgctccggtcttctgaccagttctgtaagttgaagcttgatctcttcttctgtatcttttcctacccacatcccattcactccggccgggaataaactgctgtaaaatggaagcatgtatttattttcaatattaaatatcttcagaggatttccctctttcaggaattcctgtccgcccttcatggcttcttcttcggagaagaaaatcagcacctgatcatcataagtctccggatcacacactacgaaaggcattctggtacaatcagacatcaatacatagatgtcttctgcttccctcattttctttaaaatatcactcttatctacacccatactgttcctctttcatgtctattggtttgcacgatacgcttcatctgcactgtacacatcaaaaccgcttcctttcagaatatcgattactcttgccggatcatcactctttaatactgctgccgcatcatctccatttgcaaaagcgtacatatattcaatgtttacttcaccgtccacgatctgatgcattgctttgctcaatgaaccggttgcatgtggtacacgaagtgctactacatctgtcagcatcgaagtaatccctacttcctttaatgccatgcgtcccttatgcggatctgacacgatcatacgcagcattccataatcagatgtatccgcaagactcagtgctacgatattcacattgctttttgcgagtacatctaatacttcttccagacgtccttctctgttttccaaaaaaaccgataactgttgtacggtattacttacgcccatgttatttcctcctgtttataaacttctgttatcaatgacacgttttgccttaccctcacttctttcgatggtctttggctctacgagtttcactcttactgcaacaccgagtgcctgttttaagactgccgcaactttattctttaactcatccagtttacgaatctcatctgagaaatatttttcatccacttctaccataacggtcagcacatccagattattctcacggtcaacgatcatcagataatgcggtgcaactcctccaccgacagaaagcagtgcagtctcaacctgtgtcgggaatacattgactccgcggataaccttcatatcatcggtacgtcctttgaattttgagattctcgggagtgttcgtccacattcacaggtagaatgatcaatacttgtaaggtctttggttctgtaacgaagtaacggcataccttctttggcaagtgttgtaaataccagttctccgatctctccgtctgcgcaatggctgttatcagccgggttcaatacttccggatagaaatagtcttcatatacatgcataccattatgatggatacactctaaagctacacctggtcctgtaacctcgcacaggccatagatatcaaagcagtttacatccaggagttcttcgatcttcagacgcatctcttctgtccatggctctgccccgttgattccaaccttcaactggagtttgtctacgattccggcctcattggcagcctctgcaagatacagcgcataagatggtgtacatgcaaatgcagttgcgccaaagtcttccatacacatcagctgtctcttcgtattacctgctgacatcgggatagccattgctccaagctttcttgctccgaaatccagccccatgcctcctgtgaacaatccatatccataacagatatgaatgcggtcttctgctgtaagtcctgccatcgtaagacctctggccacacactcgccccatacatctatgtctttctgtgtataagaagcaagggtaagttttccggttgttcccgatgttccctgaaccctgacaatcttatcttttggaacagccagaaggccaaacggataatttgctcttaagtcctctttcgtcgtaaacggaagcttaccaatatcctcaatccctttgatatcccctggttctactcctatttcatccattttcttacgataaaattctacattttcgtatacatttttcacctgttttaccagacgatcgctctgcagtgcagtcatctcatctctgctcatacactcaatcttcggatctctgatctgttctttccaatctttcagtgctactcttgccataacctgttccgtacctccttataaatgatagccaacgtcaaatgcttttttattaatctcaatggttttcggaggaactgtcttttcaatcacttcgtaccactgttcttttgtaaaatccatatgctgagccgctacaccaagtacgatcaggttgaacactcttggattaccgatcttctttgcttcttctgttgcatttactgtatagactctgtgttcttctccgagtgtctcaataatattttccggatactgtgctgccccgatcacaaccggcatcggatcgattctccagtcattgatgatcagtgcaccatcctttttcagaaaatgtgcatatctgagtgcttccagacgttcgaatgcgatgatcacatccgcctgcccctcttctacgatcggttctgccactttatccccatatcttacaaatgttacaacacttccgccacgctgagccattccatgtacttcggaaagctttacatcatagccgccggcaatggcaaggcctcctaagattctgctggtaagcagtgttccctgtccgccgactccgacgatcataatattctttgctgccattatctgtcaccttcctttactaactcaatcgcatcgaatttacacaggcttgcacaaagtccgcatccagtacacatcgtatcatcgatggacactgttccgtcagcattttttgtcattgcaggacatccaggtttcatgcacataccacacttcttacatttatctgtatgcgtctgatataacggtttctttgatttatccagaagtacacatggtgtcttcgtaatgatcacggatacttcatctttggcaatctcttcttttacagccttttccacagcctgaatatctcttgcattgacttctaccacattcttaacacctattgcacgacataatgccggaatatcaattgcatatgtcggatctccctgcagtgtctttcctgttgccgcatgatcctgatgtccggtcataccggttgtagagttatccaagatgatgacggttcctgttgctttgttatacatcatattcatcagagaattgacacccgtatgtaaaaatgtagaatcgccgatcacagcaacccagttcttaatatattcttttccttttgccttttctataccatgaaggcttgaaatacttgctcccatacagatggttgtatccacaacactaagtggtgctactgcgcccagtgtataacagccaatgtcacctgccgcatgaatctttaact

SEQ ID NO: 2893 - DNA, 216 bp, Unknown
  gut microbiota DNA sequence
ggttccacgctctaagaaaaactaagagagccagaatctcctaaaagcaaaggaactacgctcaaactcggcattcgcctcaaacacgttcgcttcgttcctttaacggtgattctgactctctaactttttctaagagcatttcacattcaccagaaccactttatactgttttcttcaagtcgtgactggctgcggatgttaagaaatgaaata

SEQ ID NO: 2894 - DNA, 789 bp, Unknown
  gut microbiota DNA sequence
cttctgccagaacaactcccaactcttctttatctttttcacctaactgttccggtgtttttcccatgatctttatctcgccgccatcataagaaataagtccgagcattgctttgaataaggtactcttaccggctccgttctctccgaccagaccagtaattcttcctttttctacatttaatgaacagtctaactgaaattcgccgtagcttttcttaacccctttgatttctaacataagtattcatcctccatgatgagttcaaataatgaacgaatctcttcctctttcattccgcagcgccttcccttctggatcgctgcttccagatctgtctcaacttcttttctgcgttcttcttccatcagctgtgtattggatgccgcaacataagttcccttcccatgaaccgtgactgtcatgccttccgcttccagattgtcatatgctttcttcacagtaagtgcactgatcttcagttcctttgccatcgttctcacggacggcaatatatcattttcttttaattctccggagataatctgtgctttgatctgctccataatttgttcatagattggtaccatcgacgaattattgattataatcttcatatgtttcctcctgttgtaaacagtatataacagcacagtactgttgtcaactgttatatactgtttgtctttttttctgttgcaaaatacgcggggtttacatttccagaatatgtaccggctatttgggaaaaggtcatgcctgctaatatgtgggcatatgtgcaagac

SEQ ID NO: 2895 - DNA, 3605 bp, Unknown
  gut microbiota DNA sequence
gaacaggattcatgataagtccgtgccggtccgggatacttatcagcaactgaagactgcacagaagaaaaaagatgaagtggttcagtataagcttggcgatgcagtgacacatccgaaattcggacatggaattgtggagaagatcaaccagagatctggcggggtgcatttacatatccggtttgatggggaagtgaagtgtatcgatcagaaatggctgtcgcggaagaagtatatgtgaaaagattcagtaaaaacaaataagattagaagcatgtcgatagattttgatatcgatccgttgtctgaattttgcggtcttcaagctggcttccaatgcattttctaacaggttagaaagaacaagacaaaagtctgtttcatcgactgaaatttgtgccggaagatcaatctgcacgtggaaaggaattgtgttacgttcagccattgaggatagctgaagaaaatgatggcgcatatcatgtcgtgcctgacgtgtctcttcgattgcattgcagaggttagtatatctttcctgttggattgaaagaagatagttttcttgttgaagccgtgcatttcggtttagactgtttgccattaataaaaacagagtataaaataatgaaagaatgattaacagaacaaggctgacaacaatatatatctgtaaaatccgtccggtatataaggtgccatcatattttgggaccatgaacagattcagtctgataaatataagcggcaagatccagaatacataccagatctgagcaaaattatcatcatcgatcatgattcggacagtatgagtggcaggataccagacggctaaaaggaataaaatacagataatgttatagatgattcctgtgccaatctgtaaagccgagcataatatacctcccaaaatgcagagtgcaattagaagaggaaaaagccaggcaattagctttggaagagatatttttagtgttgattttacaggaagataggcaagaatcatcccagggataattacagtaagttcaagtgtcgggcgaagaatattgttcattatgtatgcccccctttcaaataagaaatatataaaagctttctctcatgcgtttatttttttataaaacagatagacaaactacggggcggatttacaattcgtgctattttttgactattcgtgacagagcgattgaaaacgagaagtgtttttttataataaaagcagtagatgacaaaggctggaaaaaggaggaaagtataaatgaaaggaagaaaaatactattagcgtttattatatctgcaattacgctcacatcgggatgtgcaaatggtacatcaaagacagaggaggcaaaatcagagcagaagacaacagaagaaaatggagttgttccaattaagccgattacggcaaaagcaattgatgataatccatatatggcaaagagtgatgccaatgttcatcaggactgttataattcagatacgacagatgaagtattaccggttgatatttatccggagattaatgtttcttatgaaaaagtaaatccaaatgcatctccggcggtattttttgatacatatggacatgctgttgttccatttcaaggaggactggctatccgtgatattaatgcggatgaaacacagacagaaggttatttttcaccggcaaagcatgatggcggaggatatgtgatacaaagctcatattcatttgtagatgagagcaatcgcctggtatgtccgacaagcaacaaccacgtgcttatgttgaaagcaacagatgatgcgggaaatgtccttccggaatttgaaaaagtgctggatattgatattaaagcagcggcagaagaaattacagggaaaacattggatcagaacttattatctgtagtttttgactatgaaggaaatttatggtttgctacaggcggtttccgtatttatccggaacgtaaacagcaaggtgcaatgggatacatttcaagggcagcaattgatgccatcttaaagggagaacatgttgatctgaaagaatctacatttgtatatgaattggagcctggcgaaggtgcagagaatggaattgcatcgtcaaaggaaggtgcagttatattaacgaatcaaaattgttatttattaaatgcaaaagatggtgtacaggtgcagtggtgtaccccatatgaaagcgtgggagcgaaagatagcaaagagggagatgaaactacaggcggaggtcttgcctggggaggtggatgttcaccatctctgacaagcaaattagttatgtttacagataatcaggatccggtaaatctgttggcattagatatgaagaccgggaaaatagtggcaagcatgccggtaatcgatgagcttccgaaaaatatgcaggtgtcggtagaaaattcagcaatggtatatgataacggagaaggtacagtcagcacaatcgtatgtaactggtttggagccggaagtgctaaacttgcggacgcagacaacgattcttctatacagacctatgaaaatatttacgatgtaaactggttgaagaagggaaataagatggttgtgccgggagtagagcgtgtcgataccattaagacaaaggacggatacgaaatgaagagtatctggtgcagaaacgatatccgtgatacatctatgatgaagctttctacagcgacaggttatatctatggttatgttcaggatctggaaagtggcatgtggcaattcatcatgttagattatgaaacaggagaaacagcatttacaatggatgtctcagataaaccgggatacaacaatatggcaatcggcatgtatgcaggaaatagtggaaatacattatattgcccgacgggatatctggagctcttaagattgcaggacagatttgtttatctgccggagatgccttatcgaaaagtagatttagacaaggcaaagagaaatgtactaacacaagaagaatttacagaagccggcgggaaaggaaatgttgcaggctggttgaatacggttacagtagaaaatgtacatccaaatactactgtggcaatacgaatgaaaggaattgcaggaaaagcagatacatttacattatatgcatatgataaagagaataaattaaaagaagttcctgcagagttatggcatattcaggaagaagatggaacattgccggataaacttacagaggatacattatatgaagtgcatgttatggtagaagatggaggagaatttgatcttagtgatacagaaaaagaaattaagatagcagttattctcggaaataaatgatttgtttttaaggaaatcacctgaggtgtatatcacaaggctccgttctaaaaaagaatggagctttttaaaactaatgcaaagcaaacaccccaaaaatttaacaaaagttagcaagaattctccttcctctataggtgggagatgaattgcagaaaaagaagatagaacgcttgttctgcaatgcgaagtgtggtataatataatcagtcgaaaggatagaaaggactgactatatggacaaaatggatcataatgcacattcagtatatttgatgta

SEQ ID NO: 2896 - DNA, 1382 bp, Unknown
  gut microbiota DNA sequence
gtcaaggtgaacggtattatttggatggcttatataattgtgtggaggcattacatcagtattataaaagtgttaagacaactggaacaggagaagcagacgaattaaaacaatgtgttgaaaaggccagaaaaataaaaaattatgagatagcaaatatttggtcttacgaatagcatggtgtgataacaccatgataacaaaatccaaacaaaccacacggacacagcggaaaatctggatttttcctcacaaatcacacgaaaaatcaccatttgcacacagcaatacaccggtctgatatcgtgaaggtggacgtactgtaggatcaggacgtgttgctacaatcatcgagtaatatacgcgaaagcaatgaataaagcgccaatcaaggcgataaaaaaagagactgcaagctcgcttgcaagtctctttttttatcgccttggaagtgggcattttacgaatgcccgcgaacgaacgacgaagtcgtgagattggcgcatatacaagagatttgttatcagaatattaactcaagatatagaccctagaggcttaggcttctggggtttttgagttgcataaaaagataagaatagagttttgctatacaatatggtatacttagaaaaacgcaatgcaaacttggctttaggggaaaaacaaatggtttcaagaagttttagagtatttggaacaagaacagatttagaaagtgtattttatgaatttcaaaaacttaatttagttaaatattataaatgtggtagaaatgagaataaaatcgatgatattactaaaactatttattttggtatttctctcaatggaagtcacataggaaatcaatatcttgttataaaagatgacaaatcaatatgctttgataaatataaacatatatctcaatatctgaatgaaacgagtgttgctattaatcttggcggattatatgatgaaaatacaattgtgcctacaactgtatctacaatatggtatgacaataaaattagcaaagaaatcttcaatgattttaagaaaaattatgaaaagatatgcttctacaactatcaatggatatatgatattaaaaaatgcttatagtaaaaaggagcagttacgatttgtaactataggtgcgcaaagcccgagagaatacgatttaatagtttaacgaaattatgagtttacaaaaaagtcagataacgatggcattgcatagccaatagtggagggatgatatggcggtaggatttaaagtaggctattattggtttcaagttggaacaagtgattttttgcattcttttttttctacgatatgtattcggctcgaacatgggaaatgggggcgtgtttatcccaaattaatgggagaa

SEQ ID NO: 2897 - DNA, 1105 bp, Unknown
  gut microbiota DNA sequence
aatattttccgaagtgataatttacaagttcgaatcactctccatcgatgtttcctttgaatcttcttatcttggttatcacgaaatttcatcctgacaaatacttgttcataatcagaatatatctccagtccaaattccaacggcaagattaaatttctcgtcgtatcattcatagttattatcattttagcaaatctactgtcgtaatatcgcaacacttatgtatcttacttcaaaaaaatcccacatattatatgtaggacttttcttactcactatatatgctttgtgcctgttctaaattttctataattttacctttcagactctccggtgatatgactttaaatcgattcgcatattgtacaaaccagccaaccaatgtcacgctgtccatctttttaaatactgctttatactttcctttttctaacggtctgaccgacacccctgacatttccgggcagcggcataatcatatgcgaaaatctgcttcgtcctctctgactcgtcagatttaacagcttatttcgaatatcattcgcttcatgaacggacacacaccttgcctgttgcaccgaatctaacatcagcttaatttcccagtcttccagcaaatgtttctccatataccatcctttatgtgaattttctgcctgcttaatcggataaccgcagctttgcaacaaacgcacatcgtcataaatggatgtacggtgtacattttccattccgtattcttcttccagtttctggcttatctgcactgcattcatcggcgtcttctcatcggtggtctggaaaagttgaaggacgcggattattttttctttatggggtgtggacataggggtgctccttacattatgtttttgagttaaagcgatatattaattatactgtaccgtgcctgcctatacaactttcatcttttcattttttgtagttgactttcattaacaaacaggttaatattatatataagaaatgggttttttactgagtaatgtcttcggactggaaaagggtgctcgtttctttttttatatttattatatcataaaggtactttttcccatctctggcatgtctgatgatcata

SEQ ID NO: 2898 - DNA, 5567 bp, Unknown
  gut microbiota DNA sequence
aatatacaaataaaaaataaagcaacgaaatgtggcatggaaaagaagcacatatctgctcatgtataccaggtttcgttgcttttttgtaaaaattatttctgattcttatttacgttctgcagcttcattgcacgaactttcagcggaagtccgaacaggttgatgaatccactagcatcatgatgatcatacagatcaccggttgtaaagcttgcaagagactcgctgtacagagagtacggagaagtggttccggcttttgtgatcgttcctttatacagtttgaacttcacttcacctgttacatattcctgtgtgctttcaacgaaagcctggattgcctcacgcagtggtgtgaaccattttccttcgtatacaatctgggcaagcttgtcagccatttctttcttcacttctgctgtggcacggtcaagaataagttcctccaactgctggtgagcggcatacaggattgttccgccaggtgtctcgtatacgccgcgggacttcatacctacaacacggttctcaacaatgtcgatgattccgataccgtgttttccgccaagttcattcagcttgcggatgatatcagatactttcatttcttcgccattgatactcttaggcacacctttttcaaaagtcatagtaacatattctgctttgtcaggagctttttccggtgtggtagacattaccagaaggtcatcgtagttaggttcattggaaggatcttccagttccagaccttcatggctgatatgccataagttacggtcacggctgtagctgtgctttgcgtcgaatggaaggtcgattccgtgtgctttacagtaatcaatctcgtcttcacgtgactgcatggtccagatatctgtcattctccaaggagcaatgattttgatgtccggagcaagtgctgtgataccaagttcaaaacggatctggtcatttcctttaccggtagcaccgtggcagatggcaacagcattttctttccgtgcaatctccacgagacgttttgcgattgcaggacgggccatggaagttccgagaagatattcatcttcgtatacggcatgtgcctgaacgcaaggtacaatgtagttatcagcaaaatcatctacgatatcttcgatatataatttggctgcgccggaaagctttgctctttcttccagtccatccagttcttccccctgaccacagtcgatacagcagcagataacatcatagttaaatgtctctttcagccatgggataattgctgtggtatcaagaccacctgagtatgctaatacaactttttctttcatcttatatatcctcctacatgaaatatagttttatcaatcgctttaaaataatcttctcgtatacagccggaaaagtcaagtctttcttttaacagtgtgcgtttgcggctgcaaggaatactatacacctgattttataaatatgcaagaaaaaacgagaaaaaagttgaaaaatatacaaattaatgcataaaaataacaaaatgatgcataaataagtgaaggaggatagatgcggaaaggagaatctgtctgttgggaaacattacaaaaatgcagagagatatatactgtgaataatctttgaaaatctttaaaaatctatgggaaaagcttgacgaaatgtgaatgtcaacgtagaatatagccggcactttacttgcaaatagtataattagaaacaaaaataaatataaaaccggaagaaaggtttatatatatgtcatgagaaggagaagatacttatgaattatgatgtgatcattattggagcaggtccgggagggatttttgcggcatatgagctgatgaaaaagaagccggaatgtaagattgccgtgtttgaagagggatatccgcttgaaaagagaaaatgtccgattgacggggaaaaaattaagaactgtatcaattgtaaacgatgttcgatcatgtgcggcttcgggggagcaggagcattttctgatgggaaatataatattaccaatgatttcgggggaacattgttcgaatatatcgggaagaaacaggcagtagaactgatgaagtatgtagatgaaattaacatggaaaacggtggggaaggaacaaaactttattcgacagccggaaccaagttcaagaagctttgtctgcagaacaagctgaatcttctcgatgcatcggtacgtcatcttggaacagatatcaactatgtggtgcttcagaatctgtatgaccagatgaaagatcatatagatttctattttgatacaccggtagagacgatcgaaataattgaaaacggttacaaagtggtgtgtgaaaaaggaaactatgaatgtgaaaaatgcatcgtttctgtaggacgaagcggaagtaaatggatggagaaagtgtgtaaagagctggagattcctaccaaatctaaccgtgtagatatcggagtccgtgtagaacttccggcagttatcttctcgcatctgacagatgaactctacgaaagtaagattgtatatcgtacagagaagttcgaagataatgtccgcacattttgcatgaatccaaatggaattgtcgtaaatgagaataccaacggaatcatcacggtaaacggacacagctatgaaggcaatgagaagaagacagacaatacgaactttgcattgctggttgcaaaacatttctcagaaccgttcaaagacagcaacggttatggggaaagtatcgcaagactttccaatatgcttggcggtggtgttattgtacagcgcttcggtgatctggtacgtggaagaagaagtacagagaagcgtattgaagaaggccttgtaacaccaaccttatctgcaacacccggagacttaagccttgtacttccaaaacgaatcctggatggtatcgtggagatgatctatgcgctagataaagtagcacctggaacggcgaacgatgacacgcttctttacggtgtggaagtgaaattctataatatggaagtagacatcgatgagaatctcgaaagctgccataaaggtctgtatgtgatcggagatggaagtggagtgacacattctctttctcatgcatcggcaagcggtgtatatgtagcaagacatatcattggatagccaatggggacggggaaagtggccctgaccagtgaaaacggagaaataaaaagaaatgtcagtttcggtaaaagcaagccggaactgacgtttctttttattatatcttcgaaagaggctgacagaaaaaaagaatataaaaagattctgaaataaaataacaggaatcatattgacatatataggcaatcgatataatatgtagataaccgatacaatatgtagatgatctatatgttatgcatggaaaggagaagaaaaaagatggcagtagataaaagcctggtttcgggaagtacaacgatgctggtattaaaattattagaagaaaaggatatgtatgggtatgaaatgattgatactctgcgcggcaagtcaaagaatgtatttgaattaaaggcgggaaccctgtaccctctcctgcatggactggaggagaaaggattcgtggaagcatatgaaaaagaagcagtcggaaagatccggaagtattaccacattacaagagcaggcaaaaaggaattaaagagaaaatcagaagagtggaaagaatattcacaggcagttctggatgtgatgggtggtgtgtgctttggataggagaagatatatacagacggtaacagaccagattcgctgtaaacgcgcacttccactagtgaccaaagaactggaagatcatatcgaagaccagaagtgcgattatatgacagaaggaatggaaccttcagaggcggaagaggcagcggttctggagatgggcgatccggtagaagtaggaatcgagatggaccggattcacagaccaaaaatggcatggaaaatgatcggtcttattgcagttctgaatctggcaggaattcttctgatgtactgcctgagaacaagtgccctttcagatgtgggaaataatccgggagaggtagaagggattacttcggggattggcggcaatattgattatctgaaaaatattgcgtggacatttgcagggctggcttgtatgatcggaatctgttatgttgattacagctggatcggaaaatatgcaaagcggctggcaggcatatggatcgtagtaatgggactgggtatattcatgggagcggtgtatatcaacggagcggtatacggaattccgtttttattcggtctggtattaccgttacggccgctgttatatctgatcgtaccgctatatgcagcaatattatatagcatgcgaagcaaaaaaacaggatgtgtcggtatcacaaaggccatattgtggcaggtgcttccgatatggttcattttacgcattccaaatctgtcgatggcagtttgtgtagaatttacatttctgttcttgttatcaattgcagtctggaaaggctggtttgaagtgaatagaaaaagaacgctgatcatcatgtggagtctggtaatcctgcttccggcagcagggatgacattaatgattaaaatgggatatgtaagagcttaccagtcggcaagactgtcggcattcattcatccggaaggcaatgatgcaggaagcttatggggcacaataagaaatatgatctcaggggcacattttacaggacgtggagattgtgaaaagatatggttttttaacagtgattatatgctgacatttattatacattattatggaatactggcggcagtgttggcgattgctgtcataggcgctgtcctgatctggtttctgcaaaagaccggacaccagaaaaaccaacttggcatgatcatgggaaccggatgcgtggtggtcctgtttactcagttcatcggatatgtagtggagaatctgggctattttccactttcgaataattactgccctttcctgactgcaggaggaagcggaattatgataagttatataatgtttggaatattgcttagtatatataggtatcagaatgtgctggttgagacggaagtgaagaagaaaattgggatttaatttattaacggggaagcggcctctcagtccttgaaggaaacaatagataaggcttcttgttcaggttccataccataagaaacactaagagagtcagaatcacctaaaagcaaaggaactacgctcaaactcggcgttcgcctcaaacacgttcgcttcgttcctttaacggtgcttctgactctctaattgtttctaacggcattcaacattcacaataatccttatctattgtttccttcaagtcgtgactggcagcggatgttaataaataaaatgcccggaagtgtaacccggtggagtccactacggttacgcaattgctattcgtaaggcatttgatatacacggaataaaacttggaaaggcgttccagtgaatgtgaaagaggcgttggtaattcttaaggggtaaaattctgcgttaggttttcaaaatttg

SEQ ID NO: 2899 - DNA, 10153 bp, Unknown
  gut microbiota DNA sequence
tccaatacaatttgaagaaaaagcttgcataatatgcaatatggatgtataattatgcaagttcatgatttacaacgcaaaagtaaatatatggatttttgaaaaacaatcccatccaactagacaatcacaggaatttggggtactataaaacgaacaataatttataaaaattcaatatcggaaagggtgttatatagatgattaaagttggaattattggagcgaccggatatgccggaggagaactggtaagaatccttaccggacacaaggacgcagagatcgtatggtacggctccagaagttatatagataaaaaatacgcagatgtatatcagaatatgttccagatcgtggatgcaacatgtctggatgataatatggaagaacttgcaaaacaggcagatgtaatcttcacagcaacgccgcaaggcttctgtgcatcgatgatgaatgataagattttaagtgagacaaagattatcgacttaagtgcagactatcgtatcaaagatgtagctacatatgaaaagtggtatggaatcgagcataagagtccacaatatattgaagaagcagtgtacgggctttgtgagatcaacagagaagatgtaaagaatgcaagactggtagccaatccgggatgctatacaacatgttccatcctgaccgcatatccactggcaaaagaaggaatcattgatatgaatactctgatcgtggatgcaaaatcgggaacatccggagcaggacgtggtgcaaaagtaccgaaccttttctgtgaagtgaatgagaatatgaaagcgtacggtgtcgcaagccacagacacacaccggagattgaggagcagctcggatatgcatccggagagaaagtgctgatcaacttcacaccacatctggttccgatgaacagaggaatcctggcaacggaatatgcaacactcaaaaaagatgtaatatacgaagaagtgaaagcaatctatgataaatattataaagatgagaaatttgtccgtgttcttgaaaaagatgtttgtccggagacaaaatgggtagaaggaagtaactatgtggacatcaacttcaagatcgattcaagaacgaaccgcatcatcatgatgggagcaatcgacaacctggtaaaaggcgcggcaggacaggcagtacagaacatgaacctgatgttcggacttccggagacagaaggactggaactggtaccgatgttcccgtagatttaccggaaaatacagacagaggagaaaaataatacatatgaatataagagtaatgacaattgaagatttcgaccaggtgcacgcactgtggatgagcatcaaaggattcggaatacgaagtgtggatgattcaaaagaaggaatagaacgtttcttaaaaagaaatccaacaacaagcgtagttgccgaagaagatgggaagatcgtcggagcgattctctgcgggcatgatggaagacggggctgtctgtatcatgtgtgtgtagatgtgaatcacagaatgagaggcatcggaaaagccatggtagtatttacgatggaggcactgaaaaaagaaggcatcaacaaagtatccctgatcgcattcacacagaacgatatcggcaatgcattctggaacgaaataggatggacaaagagggaagatctgaattattacgattttacactgaatgaagcaaatatcacggcgtttatccagtaaaggaatttatcaaaacataagaaaagagaattaagaaaggtggaagaacagatgaaacaggtaaaaggcggagtgaccgcagcaaaaggatttgaagcagcaagtacagcagcaggaatcaagtataaagacagaacagatatggcactggtatacagccaggttccatgcgtggcagcaggaacatttacaacaaatgtcgtaaaagcggcaccggtaaaatgggatcagcaggtcgtaaagagtggtgcaaaagcacaggcggtagttgtgaactcaggaatcgctaatgcctgcaccggagcagagggatttggatattgtaaagatactgcagatgcagcagccaaagcactgaatatttccgcagatggtgtcctcatcggttcaaccggagtgatcggaaagcagattccgatcgacaaactgacagccggaatcaaagtactggcaggtaagaagaatgatacactggaaaatggtacagaagcagccaaagcaattatgacaaccgatacatttccaaaggaactggccgttgcaattgaagttggcggaaagactgttacgatcggtggtatggcaaaaggatctggaatgatccatccgaatatgtgcacgatgcttgcatttattacaacagatgctgtgatcacaaaggatgcacttcagaaagcattaagtgaagatgtcggagatacttacaacatgatctctgtagatggagatacttctacgaacgactcagttgtattactggcaaatggtatggcagagaatccggagattacatatggaacagaagattataagaattttgcagaagcattgcatatgataaatgaataccttgcaaagaaaatcgccggagacggagaaggtgcaactgcattattcgaagtgaaagcggtcggatgcgagagtgtagagcaggctaagacacttgcaaaatcaatcgtatgttctaatctcacaaagacagcaatcgcaggacatgatgcaaattggggaagaatcctctgtgcaatgggatattccggagcgcagttcgatcctgaaaaggttgacctgtttttcgcaagcaaagcaggaaaaatccagatcattgaaaatggtacagctgtagattacagtgaggcagaggcaacaaagatcctgtctgagactgaagttacagcaattgcagatgtgaagatgggtgacaagacagcaactgcatggggatgtgatctgactcacggatatatcgagatcaatgcagattacagaagttaggagattgaaagatggaaaaagtaatgcagaaatatctggacaaagcagaagtactgattgaagcccttccgtatatccaaagattcaaccgtaagattattgtagtaaaatatggcggaagtgctatggtagacgaagagctgaaagcaagagtcattcaggatgttactctgctgaaattagtcggtttcaaaccaatcattgtccacggcggtggaaaagaaatcagcaaatgggtaggaaaagtcggcatggaaccacagtttatcaatgggctgcgggtgacagatgcagagacgatggaacttgcagagatggtactcggtaaagtgaataaaagccttgttcagttggtggagcaactcggtgtaagagccattggtatcagtggaaaagacggaggactcttaaaagtagataagaagctggcagatggtgaggatatcggatttgtcggagatgtcaaagaagtgaatgcggatatcatctacgatcttctggagaaagatttccttccgattatcgcaccgatcggcctggacgatgactataatacgtataatatcaatgcagatgatgctgcatgtgcgatagcaaaagcaatcaatgcagagaagcttgcattcctgacagatattgaaggggtatataaagatccaaaggatccgtccacattgatttctgaactgaatgtatcagacggaaagaaactgatggaagaaggctatatcggcggaggtatgctgccgaagatacagaactgtatcgatgcgattgagaacggagtatcaagagtacatattctggatggaagaattccgcattgtctgcttcttgaaatctttacaaataaaggtatcggaactgcaattaaaaatgatgtagaagaacgatattattacggagaataagttatgaatgaatatatgaaagagacaaacgaagcgctgttacatacgtataatcagtttccggtcgtattagagcgtggagaaggtgcttatctatatgacacagaaggaaaaaaatatctggactttgcggccggatatgcagtgtcttcgctggggtatgcagataaagaattgaatgatgcgttaaaggaacagatcgataagatttttcatacttctaatctgtactataatacggcctgcggaaaggcagcagaagatctgaaacgtattacagggatggaccgtatcttcttcaccaacagtggaggggaagcggtagaaggaactttaaaagcagcaagaaaatatgcatacaaaaaaggaacaggacggtatgaattcattgcgatgaaggaatctttccatggaagaagttttggagccgtatctgtgacaggacatgatgcgtatcgtgaaccattcgaaccgcttgttccgggggtatcatttgcacaatacaatgatctggacagtgtgaaagcactgatgacagataagacttgtgcgatcattctggaaccgttacagggtgagggcggaatcaatgcagccacagaggaattcatgaaaggaatacgtaaactctgtgacgaagaaggaatccttatgatttgtgatgaagtacagtgcggtatgggaagaacaggcgctatgtttgcatggcaggcttatgacatcaaaccggatatcatgtctatggcaaaagctatcggaagtggaattccggtcggtgcatttgcaatgacagaggaagttgcaaaatattcactggagcctggggatcacggtacaacttacgggggaaatccacttgcttgtacggcagtaagtaagactattgagatatttgaaaagaagcatctggtagaacatgtgcagaaagtcggcgcatatctgacaaaaaaactggaagaacttgtggaagaatatgatactgtaaaagcggtcaaaggaaaaggtctgatgcagggaattcaggtgacaaaacctatatctgagattacaggagcagctttgaaagaggggctgctgattatcggtgccggaagcgatgtgatccgttttgtaccaccgcttattattgagcttgaacaggtggatgagatgatccggatattaaagaaagcattgtaaaaagtaaagaaatggaatataaaagccggtcatgggacatattatctgcataggcaggaggtatgaagatgactggttttttgattgcgcttttgtcgggagcgcttatgagtgtacagggagtatttaatacgcaggtaacaaagacaaccggaatgtgggtgagtaacggctgggtgcagttcagtgcattcctgctatgtgccgttgcatggcttatcgccggaagagattctgttggcgcattgtggaaagtggaacccagatatgtattacttggaggcgtgatcggtgcagggatcacatggactgtgatcaagagtatggcgtcgctgggaccggcgaaagcagcacttctgatcgtgatatcgcagttgatcgtagcatatgtgatcgaacttctcgggttgtttggagtagacaaagaaccgctggaaatacgcaaaattattggtatgtccattgccctgattggtgttgcaatttttcaatggaaatagtacaattaattcactaggcatatgcggggatttacagtttccgacagactgtaaaggagaagttatgcgtagaaaaaaacgacaaaacaaaataacagaaaagagaaacatacagaaagaaatatgccggataccactgctttttctggtattgttaagtgtcatgtgtacaggtagcctgactggctgcagagttggaaatccacaaggacagacggaactggttccgttgaatagaaatgatacggattcagacaaaccagatactgctgttaattccggacagaaagaacaacagacagaccgggaaaaactgcagatctgctatgtgcatgtatgcggtgcggtaaaccagcccggagtatacgaactgacagcagacagccgtttgtttgaagccattcagatggcgggcggactgacggaagaggcggcagatcagacactcaatcaggcagaagtgatcgaagatggttccaaaatatacgttccgacgaaagaagaagtaaaagccggtatggataatggcggtactttgatgcagaatgaggacaatgcagaaaaagccggaagtacatcggatggaaagattgatatcaatacggcggcaaaaaacgaattgatgacactttcaggaatcggcgaagcgaaggcagatgcgatcgtgcgttaccgggaagaacatggagcatttcagaagattgaagatctgatggaagtagaagggattaaagaaggtgtatttcaaaaagtaaaagatcaaattaagatttgataaggagtaggaacatgggcaaacgcatattggttgtggatgacgaaaaactgatagtaaaagggatccggtttagtctggaacaggatggatacagtgtggactgcgcatatgatggggaagaagcactgaaactggcaaaagagaatgcatacgatatgattctgctggatgttatgcttccaaaacatgatggttttgaagtgtgtcagcagatcagggaatattcggatgttccgatcatcatgcttacggctaagggtgatgatatggataaaattctgggactggaatacggtgcagatgactacataacaaagccatttaatattctggaagtcaaagcaagaattaaagcaatcatacgccggatcagtaagcgtgataaaaatcaggaggatgataaagtaatcatcaaaggtgagatgcagatcgactgtgaaagcagacgtgtgatcatcggggggaaagagattaatctgaccgccaaagagttcgatcttctggaattgcttgctatgaatccaggtaaggtatacagcagagagaaccttctgaatattgtatggggatatgaatatccgggtgatgcgagaactgtagatgtacatatccgcagacttcgtgagaagatagagacaaatccaagcgatccaaaatatgtatatacgaaatggggagttggttattatttcaggggttaaaaaatatctaaaaaagaatatattcaggagcatgaaattcaggatcattatgctggtagcactggcaggaatcgttccggttctgatcatgcggggcgtgttcctgaacagttatgaaaaatgcgcagtgagggtacgtactgcggagatacagaatcaatgtaccattctcagtaaccagttgagcagttcgggatatctcacaggagatatatcagaagtgatgcggacggaactggtccagttatcgaatatctatagcggccgtgtgatggtgatagatggagcatttaagatccaggaagatacttatgatatggacaagggcaagaccatcgtatccggcaatgtaatccgttgtttccaagacaaaggaaccagtgagtataacagaaaaaacagatatatagaagtgaccgcaccaatcataggaaaagatgatgcagttgtaggtgtgctgctggtaagtgcacctacagattcagtgctggacagtctggaaatattaagaaacaaggcagatgtagtggcacttgcgacgattctggttataatgatgattgcagttctggcggggatagcgatgctgaaaccattcagacgtattacagagtcgatctcagcggtaacagaaggatatgatgataactacctgcatgagaacacatataccgaaacgatagaattgtcagaggcatttaataagatgtcgggacgtatgaagacgctggacgattcgaaaaatgaatttgtatccaatgtatcacatgaattgaagacacctttgacatccatgaaggttctggcggattcgctgcttctgcaggaggatgcgccggtagaactttataaagaatttatgggagacatgtcagaagagatcgaacgtgagaataagatcattaatgatctgttatcgctggtgaagatggacaaaacagcgaataacgccaataccatgaacataaaatccgaaaatatgaatgagctggtagaaaaaatcttaaagagactgcgtccgatcgcagcaacaagaaatattgaactggtttacgaaagtattcgtccggtcacagctgaagtcgacgagatgaagatttcgcttgcaatttcaaatctggtagaaaatgcgatcaaatataataaggacaatggctgggttcatgtgactttgaatgcggatcataagaactgttatattgaagtggcagattcagggatcggtattccggcagaggcgcaggaacatatatttgaaagattttatcgtgtggataagtcacattccagggaaatcggcgggacagggcttggacttgcaatcgcacgaagtgcagtggttatgcatcgcggggcgatcaaagtattcagtcagccgtctgagggaacaacatttacagtcagaattccgttaaactatgtgtcttaggtagaaggagaatgcgatgataaagaaaaagagttactggatcttgatgcttactgccatctgtattctggcggtgacgggatgcaaaaaagaaggaaaaacagcagacttccatatctattatacagattccgagggcgtgtcgctggttgaaaaaggcataaagccagagggcaaaacacagaaagaacagattgatgaaatcttggataagatacagaagaatacggatgacattgattatcgcagtccttttgtaaaagaggtaaaggtgaaagaatggtcagtaaaggatggaaaacttatagtagattttaacaggaattaccagaaactgagtgcgacggaagagattctgctgcgcgctgcggttgttcagtctgttggacagatttctggagtggatgctgtgttattcatgatcgacggagaatcattgcaagatatgaatggacaggtggttggttatatgcagccatcggattttgtaaaaaatacaggtgtgagtctccattcctatcagaaagagacatttttgttgtattatggtaataagcagggagaccgtctggtaaaagaaaaggtcagtatccggtataacagcagcatatcaaaagaaaaagtgctggtagaacagctgatcaagggtccttcatcggacaacgagacggcagtgatcccggcagagacaaaggtgctgagtgtatctgtaaaggatcatatctgttatgtgaacctggataaggggttcctggacacaacgaatgtgatgaatccggaacttccggtctatgcgatcgtgaatacaattatagaaggaagctcgatcggcagggtacagatcctgatcgatggaaaaacaaatgtaaattatatggggaagataagtctggaaaagccgctttcccgaaacctgaatattgtggaaggggagtagtgcgtgaggaacaggccgcttcttagtgtctgtctgatcattctatgtgttctgacttcctgtacgctggtgggaaaggaacggtttataaaagaacttcgcccatcgccgcttgaaatctgcaccacggaagatgaatctgtcatcgtctgtggtgtgatttacaggcaggagcaaaaagaaaatggtcagatgatttatttgaaacataattctgtttattctatttctaacaaacaaaaatttcaagagtcaaagataatcgtttatatcaattccaaagaaaaactacatataggaaacaggataaaagtccgggggacagtatcattttatgaaaatgcaagaaacccgggtaattttgatcagaagttttattatcagaaacaggggatccatgggaaaatctacggcagtcagatgcagatcaccgataaaagtgtggacgttttccgggaaaagctggcagtgttccgtgccgggtggaaggaactgctggtgcgggaaatgggtgaacgggaagggggagtccttgctgcaatacttcttggggaaaagagtgatatggatccggagatgaaggaactttaccaggtgaatgggattgggcatatcctggctaaaaaatgtactagtggatatatatgtgtataatgttgattgtgcgtgaaaaaagatattatttgatacaggaaacacaggaagaggagagatg

SEQ ID NO: 2900 - DNA, 1316 bp, Unknown
  gut microbiota DNA sequence
acaaactgttgtcaagtgttatatagtgtttattttaaattttcttttgaaattaaaaacatgcaaatcaatatagaaatgcatgttaaaaaatatagtattctattgtaattcctttaacgcaagcaggtgtttcatggattgtttctaatatccttttgttggggaaactccattctcccattttgacacagctctgtctgtcacgcccagttcttctcccagctgcttctgcgtcagatttttttccttcctgcatgtcgatataaaccttccaagttctaatggttcaaccatatgcgtcacctcctgtcggctttattatgccatatttctcccagaaaagcactccacttatggttgaacgcctctaaatgccgctaattctcactaattcttatgaaaatggaatcagatatcactgaagcggcatctgcagattcacccataatactttcaccgcattttcatctgccggatcatcctcttctttctccaatgattccttcacaaatttttcgaccctcgccggagcctttttaacttcatcattttcctgccacaggatctttttctcaccggatcttccgacatagtcaaattccgatgcctttgttccgttatctgtgataatctgtccatcttcaaacggaatgacatatgcaacctctttggacgtaatatacatcactcttgcaaatggatttatactcgaatccatagatacttcatatgtgacagagttctttggttcgcgtacagcgccaactgcatctttacctgctaccgtatttgtatctgtgtctatatctgtctgaggataagacagtcctgtggttctgcgtttgctctttacatgtacatacagtctgccattctttaactgatacacctcttctacctttatatcttctgccgcaatccttgataaatgataagactgaaaggcatccgaatatagagccacggtcagcattatacagatcaggaaaacaactccgcacgccataacgattcttctgtttaattttcttgatactttttcagaaaactcccggaaccctttccactcctcgtctgtgccttctattttatctgtttctatcggaatctcaccttccatttttttcagatatgttctgcacgattcacattcttttatatgttcttctattgcatttctgctcttttcactgcatatatcatcctgatataacggcagcaggtctcttatgatctcacatggaatctttgccattatgtactcctcctttccagaatgtcctgtatcttcacccgggccctgtgataggtaa

SEQ ID NO: 2901 - DNA, 252 bp, Unknown
  gut microbiota DNA sequence
acagccgaagtgatgtaaatattattatgacggtgaatccgaatacgaaacagatcctgctcacaacgacaccgagagattattatgttacgatcccgggtgtatcaggtgatgcaagggataagctgacacacgctggtatctatggagtggatgcatctatggcaacactggagaatctgtatggaattgacatcagttactatgcgagggtgaactttacatcactggagacgattgtggatgcacttg

SEQ ID NO: 2902 - DNA, 603 bp, Unknown
  gut microbiota DNA sequence
tggattatttgaaaaaacttggaatagatgcaatctggctctcaccggtgtatcgttcgccacaggatgacaatggatacgatatttcagattatcaagacattgagccgatgttcggaacaatggaagatatggaacagttatttgcggaggcaaagaaacgcggaatccggattatgatggatcttgtgttgaatcatacttctgatgaacacagatggtttttggaggcaaagaaaagtaaagacaatccgtatcatgattattatgtgtggcgtgacggagaagaagacgtttatccaaacgatatgaattctgtgttcggaggaccggcatgggagtgggttccagaactggggcagtattattttcatcagttttcagtgaaacagccagatctgaactgggagaatccgaaagtgagaagagaactctatgatatgattctctggtggatggaaaaaggtgcaggtggatttcgtctggatgtgatcgatcagattgcaaaagagccagatcttaagattacaaataatggaccaaagctgcatgaatttctgcgtgaattaagcagggaaacatttcagaagggcgatatgatca

SEQ ID NO: 2903 - DNA, 1092 bp, Unknown
  gut microbiota DNA sequence
gtttcatcaatattctcctttataaataccgatttgttactcacatgatatcatattttttcttcaattacatccacctaattttaatatactgcctgtcgacttgcttctgtaaccagcatccggttaatcttctcctgcattgtttcctttgcattttcattgaaatgataacggacaacatagactgtctgcccgattttctttgtaaatgtgttaccctctgtttttgtattcatcattttttccataatcatttttcctttcttttggagccccagcagagagtcattccattggtctctgtcagaacattattctttaaatcaggcccaaaatgggcacttccagtttcacaggctacctatatatagccttttcatttttgcttgcaaaaagccttgtgatcacagcacttttttaacgtaaaaagcgttttaatatgatacagccaacgacaagaagcatatctaacaaatatcattgtctatcacttctgttttctctgccgatatctctctggttaatgcctaataatcttccctgccagacaagacgataagtacagcgtttgcttctatcgtgtttccaaatactttcttccatcatacgatggttcttcatcaagttccagtccgtgacgtttacagatatctaaaaacattgtccggcaggcagaatcggctgcagattcaaaattttattattcaaaataaataaaaatggattccaccaaaatacccatcaccaaaaatgtactggacacttctattcattatatttgcaccaacaacttgaagttatcttcctgcttacgactttccaacaacataaactccaaatatcattttgataatataaagatacttctttcttaccccagagcaagatccacctgtgtttaacaatattgtctttccgacaaatgttctttcatcaggtttttatcttgctggggattccccaaacccattctttctatttatgccgaggttactgtacacattagagcaagatccaccccggtaataccatatcgctattttagcattatggcattttccggatgttggaatcttgctaaggattgtg

SEQ ID NO: 2904 - DNA, 3065 bp, Unknown
  gut microbiota DNA sequence
acaatttaagagatcataaacaatacattcttgcacattaacaatatcgaatcattataattttataagggaaattgactatatgaagaaagcgataattacttgttccaattctacaattgaattatacgaatttgtcgaagccttttatttggtatctcaaaaagcaaatacagcattggaattacttcgacaaggcttgcctacatgggtttcgccggaaaaatatgatgaaatgaagatctctctatgggtatataatgatacaagagctaatgcattgtgtcattatgaaaacggagaaaattatatagcgttatctgtgggcctattaacagcgttttggaatgaagttgaagattttgttagtcaggataatttgacttcggtttttaaaattagtgaagaaaatcgaccaatttttatggataatgtatatttttacatgctcaattttaccattgcgcatgagtatggacatatagcacatggacatcttagagaacaaaaaggtgaaaaaagtattgatgagacgtttagaatgtcagatgtagctaatgataaagaccgaaaggtaaagaattggactacacagttaaaagaatatgatgcggattcttttgcggtaacaatacaagcggtattgtttttgcagcaatggcaggaggatataagggtaaatcttgcaaattttgataagatgtttatagcaaattatctttgtttccgaacatttgcagaaaaaacaggaagaaaatttgcggattattttgataaaagtattgatgaatatgatcatccgcatcctggaataagaatgtattattcctatattcattattcttactggataggaagatttcgagattttggagaagatacaatgataattcttggaagtggcagcgatgcagttatttcatatgagaaaaatgtgttgggaaaagaaaaaattaaggaatgctattattcagttgcatttactgaaaaaggtgcgcaacatgttatgaatcttcataatggatggcaagagaagattgagcattttaatgagtatgcttatatggaaattgaaaaaatggatataatagatagcatgccggtttcattagacaaaaatgggaattttgtaaataagaattaaaagtttgtgtattataacatacttctttaagtacataacagagcggaaagatatgatagcttgcaaatgtcatcatgaaggacaaaaagcggcggcagatcctaacgaaagaaaggatgtgccgccgcttttttgaaaaagaattaatctctctggaataaatcgcgggtatatactttatctttcacatcatcaagagatgagttataacgattggcgatgatagcctgtgacatttctttgaatttattcaaatcattcacaactttgcttccaaagaaggttgtgccgtcttcaagagttggttcgtatacgatgacagtggcgccttttgctttaattcgtttcatgactccctggatactgctctgacggaagttatcagagttgctcttcatggtaaggcggtaaacgccgatgacgcattctttttcctgatcagcggagtaatccccatgattattataatcataataaccggcaaggctgagtacacgatctgcaataaaatctttccttgtacggttactttccacaatagcagacatcatattctgaggcacatcattgtagtttgccagaagctgcttggtatctttcggcaagcagtatccgccgtatccaaatgaagggttgttataatgtgttccgatacgaggatccaggcatacgccgttgataatctcctgagtattgagctctttcatttccgcataggtatccaattcattgaagtaagacacacgcagtgcaaggtaagtatttgcgaaaagttttactgcttcggcttctgtgaatcccatgaataaagtatcaatctggttcttcagagcaccttcctgaaggagtgctgcaaatgtgcgagaagcatttaccagtcgttcatcggatttgtctgtagaaacgatgatacggcttggatacaagttgtcgtacaatgccttggattctcttaagaattcggggctgaagatgatatttgatgtattatattttttacggacagactctgtatagccaaccgggatcgtagacttgatgaccataatggcttccggatttacttttaatacaagctcgataacggcttctacggcagaagtatcaaagtagttcttcttgctgtcatagtttgtcggtgcagcgataactacataatctgcatttttataagctactttgccgtctaatgtagcagtcagatccagttccttttcagtcagatatttttcaatataatcatcctgaatcggtgatttcttattattgatcatctctactttttcaggaacgatgtccactgcagtgacatgattgtgctgtgcaagcagagtggcaatagaaagtccgacatatccggttccggctactgcgatattcagcggtgatggtgatggaagcttgttgctgctgttgtcaacgaatacttcatccggctcgaatccgagtgtttcaccgagttgttccagctgtggaatggacgggaggtaatcctccttttccagacgtgagatctgggcgcggttgatgcctgtggcatcagccagatcctgctgagtaagtttcaattcttttctcttcgttgctaccagattggcaaggagagaggtggataattttttcatgtggtacggtcctttcttttgtttggttgaattgttatttatgcatttaaattgtgcgaatgttaattaaaataacgttattgtaatgcttgtggcatttgtaaaacatataaagtatagtacatatgcggggaaatggcaagggataagttgtggagaggtgaaaataattttgtggggagatagatggtgttaattgtaataacatttgcccattgggggacgggaatagtggctttttttgtgtccctggtggtattttgttacatagacatataaactggctgaatattacg

SEQ ID NO: 2905 - DNA, 2313 bp, Unknown
  gut microbiota DNA sequence
ggcaatcatattatttgcaaatatggaacaaagatgtcaaagccgaaatcgaacgtcgtgcaaacgactcaaatcaataatcaatcatatgtgaattgtcaaggtactccggccgcaaaaatgcagccggggatttttatatccatgtctaaaatttaaacgcttacaatatttacgatacagggcagcttttttcatatttttcgggatattttttatctatatgcgtctaatctatgtaagaaaaataaatcggccgatataaaggtggtgttaaagtgacaaaagagcaattgggagtactgattcgcgactgcgagaggcagttatattctacagccaagacaatcttatacagtgatcaggactgtgctgatgccattcaagatacgattgtaaaggcattttctaagattcaaacattgaaaaatgataattatgccagaacatggctgattcggatcctgatcaatgaatgttataccattttgcgaaaatccagtaaactgacttcgttggatatgatggatgagcagacgaaggcagaaaaaataatgatgacaaaggaaaaggctgattacagtgaattgtaccaggcaatcaatgcattaaaagaagaattgcggcttccggtaattttgtattatattgaggattttaatatccgggaaatcgcacagattctggatattacagaaggtgcagtacagaaacgacttgccagggcaagaggaaaacttagatgcaatctgcgagaaagtgaggcggcgatatgaggtttgaggatatgaaaaacaatattccggagactccggagtttatccatgtaatgatacaaaatgaagtagacagacagcttcagggaaccacaattatacagattccgaagaaaaggaagaaatggaacggtgcaagagtggcagcggcagcaatggtctgcgtgctggcaacttccacagcagcttatgcgggtgtgaaaatgtaccgcatgtacgtggaaaaacagggcgattacagtgtgaagacggggataacatcagaaaataaattagcagatcttccggcgcagattcacgatattgatttcaagaccggatatattccggatggcatgaaatgggtagacgagtcacatctggaatatccgcaaagcaaacgtatggggggatttagttttgcgtccgtacttttggacaatgatgatctgaatcaggcactggaaaataaaaatgttgtcgagtccgaggagagaacatttggcaaatatgaaggtgtatatctgaaatataataatttaaagactgaaaaaggtacatttgaccaaagaatctatctcttttgcccggataaataccgtgtgatcacaatctatatcggagatgatgtatcgaaagatgatgctgtgaaagtagcagaaaatcttgagattacagaaaatgacaagatgatagaaacagcgaagatgtatacctggagcgatgaggtcaacccgaacgttgagaccggcgatgaaatggtaacgtctgtgtctgaggataaattaaaggtgtacaagattggcgaagattttacattatctgcatcaggagaagataaagacggaaacaatatcgtaaatgataaaatttctgctcacgtagattcggttcagacagcggatgatctgaagttgcttaacggtgcagacttaccggaagaatggaaaaatgtaatcgattccaacggaaaacttgtaaagaataaagtttcttatatcaaatccggcgatggtgtgaattctgtagatcaggttattaaaacagaaaatgtaaatcagaaacttgtttatgcaacagtcacgtatacaaataattcagataaggaaatcaagcacatgttgtatatcggaaatctggcattgattcatcatgaaaacggggaataccatatttataatgcaatggaacagtccggtaacggatatgaccgtgtgagttgggacggcgtggcgcatactgcagaaatgacctacagtagtgtgcgagaagattatgggaatggcggtaattatatttcatctctgaaaccgggcgagagcattcaagtcaacatggcatggatcgtcaatgaagataatctggcggatatgtacctgaatctggacggcgaaggcagtgcctatgattttaacgaaggtatgctggaagcaggagttgtggatatcagaaagtagaaaacagccgacactttgcgaagaatgcaaagtgtcggctgttttctactttctgaagattcataacttacagactgaaagggcagtccctattaagagag

SEQ ID NO: 2906 - DNA, 2936 bp, Unknown
  gut microbiota DNA sequence
catgaaataaatcagtcctgcaaggatgactctgtcagatatttccatttctttcaccacttcttataaaattatattttccgtcaatatagtctttaatgtcaacaacagcttatcaacctggatcggctttgctatatgatcattcattccggcctcaatagcctttcgcttatcttcttcaaatgcatttgccgtcattgcaatgatcggtatgcatgccttatccttatccggcaggtgcctgattacctgtgttgctttataaccgtccatttgcgacatctgaatatccatgagaatcatatcatatgtgcctgccggcattttcattattctgtttacacactgaatgccatcctcaacacgttctattttaagtccggcacgctcaaggatcacttctgcgatctccgcattcagatcattatcctctgccaaaaggatattctttccttcaagtatttcactacaggtttctggattttcatcattgttttttacataatagctttcatccgctatcctgtgttttagtgttacagtaaaggtactgccctttccgagctcactctctacctcgattgttccgccaagcagatcaacatatttttttacgatggacattccaagtccgcttcctgtgattttgctctttgtggtgttccgctcacgtgtgaatgcgtcgaaaatctttgtcagataatcccggctcataccgattccggtatcgctcacgctggtccttacgatcatgtacccgggctcatcacatgccaattcgtctatgtttaacataacagaaccaccggatggagtatattttatggcattgcttaagatattgacaaatatttcttttaccttggtaatatctgtcagtatatgttcatgctctagatttactgtgtaacgaaatgcaagcttctttttccttgcttcatcctcaaatatttcaaacaacgtctgccggatatcttcaatccgggcatagttctcatcaatctccatctttccgctctcaatctgtgccatatcaagtacattatttatgatcgacagaagaaggcttcctgactgctgaagtttttttaaatgttctgatgtttcgggcagatcctttccttttagttcatcctccataagctgtgcatagcctagaattgcattcataggagtacggatgtcatgtgacatattgttaaggaaacgtgtctttgccagactggccgtctctgctttttgcaaagcgatttccagtttgtcattgagtttttgtgtatcatttgctgcaagctttgcgacggattctgctttccttgctttctgtaaaagtataaggataataccaatgatggtgaataccaaaacacctgccgaaataaaaaaggcaagcatattgtcttttacaaagtcagaaaatgtcaccttatctgcagtactgtcgtagatagcaagtgcacttgtaagcatatccgacggcatggccttcaatgttttattcagtattgataaaagacttccctctccggttcttactgcaaagcatgcctccattgttttggtaagtggaatgcttttgaaattttgactgttatcatatatcaatgcctggcttgctcccatgaggaaacagtctgcttttccgttcgtgaccatatctgccgcatcatccagcgaatcacaatctacaagcttccattgcggataactgaaagcaatatgctgttttaaggcttctttttccttcggcacagctactgtatacacttcattttcgtcaaaatttttctcatccgttaccgccatcaggctgtaggtccaggctgtattcgttagtgcatatcctttctcttctgcgagatacggatttctgccggcataaaagatcacgtcgatctcccggtcctgcagtgcctgaatcagctcgtcatagttatcatattcccgcaaaacaaattccagcgtctgatttcccaggcattctttggcataggatacatattctgccaacgtaccggtaagttgttcagtctcttcatccatggaaaaaactgccggatcagtactcaaaaatccaatccggattgcgccatgttctttcagccagaacttttcttctcctgtaaggatctgattataatcaagggtaaaatacttcttatacagatctgccttaaaaaacggactgtcctgatccaactgacgcattgcccggtccagctctgtcttgatatcgctgcggtctttatttattgcaaaatatatacctgatttgccaatattggcaaccgatgatattccctgttcagaccagatggattcctccagcgatacaaaagcatcgatctcatgattcgctaatttcttttcgacatcatcattattatatacatttacatgctctgtgtgtataccattcttattctcccactccgtcagcatactctcaggctctgtacctaagagcacacctacacgttttccatccaaagacttgaaatcagatgtcccgctatccctattggacagatcagcataaagcatgtatttttcctcgcccatcggttcatctgaaaaaagcatcttttgtgcacgttcgtcggtgtaagagatatcacccataatatcaatctcaccgttttcaagtttatcaaaacagttggaccagtcacatttcacatactcaaatttccatccggtatagcctgcaagagcctgcatgagctcgtagccatatcctcatctgacaccgtttttatcgacataatcgaaggtatcctcgaatgaaccgacacggatgatcttctgttcgtttgtctgtgtttcatcatgattcgtttcggcagcccggcaatgtactgtcagcatcatccacattccccaaaacacaaatatggctgcacatattacggttaatttttttctttgtattg

SEQ ID NO: 2907 - DNA, 263 bp, Unknown
  gut microbiota DNA sequence
ccttttttgaaatcatggtgaatgagtgtctggtaagtgtgacaagtccttttcatatccacgtctatatttatttcattacttttctccttacctcttaacctcatcatagacctgttttttcttcttgtcaacaattattttactttttcccttactttttatttttgtatttcaaacgcttaactatatctttttataacttattataattttacccttacatttatccttatcttgtgttatgatgaaaacagaaacga

SEQ ID NO: 2908 - DNA, 2347 bp, Unknown
  gut microbiota DNA sequence
atacgcaagaaatacggttacagtatgcagaagtttggggaaatcatagataatgccccgaaaggctctgtaaacagttgggaaaagggtgtgaatcttcccaatgagaaacgcttgaagcagattgccacgttgggcaatatgacgctgaatgaacttctgtatggttcatttaaagaatatgtagatatgcttatcacagaaaaactggggattgaactgccggaagaatttaccagaactttctattctcttttagagcagaacggatttacctacggggatgatatcgagattgtccggcttgtaaacggctttctgacttatcataaccttacaacaaaagaaaccgccattttctatcagccaactgcatactccggcgattattttgacggtatcatacaaaaagcggattcttccgttctggtctgccggacatatgcagataaggcaaacaacaccttacatatcattccggcttttgagaatggacagactgaggaagtagcagacttctttcatgcactgaaaagcataaccgctccacacaacaacaattatttcacttccggctttctgacactcggactggcattgagagattccaaagtaattatctatggaattgatgaaaaacagggaacagcacaggtaatcccttacgaatatgattgcgaatcagacgcttatatccagaatgaacatctggcatataccagacaggatagctttttccgagaagccacgaaagaagcggtctatcggaaaatgcaatccgacagaagtaacccataagataaacaagaggacttgcaaggtttgtgccctttcaagtcctcttatgtatcatgatggtattggctgtgtccgttccgtaaaggactgccctacggcgtctcggcttcgccttgttcctttacctcactaataataatgttctgatagcagaactcttacttatacttttatcttactattctttcaatttttaccgtttcaccatcaatattatacttaaaaaaataaaatttaataacatttccttctgatacttgttctagatcacctttacacttagtacaatctaaactaacttttgtcgtatcaaaaaatagactactttcttccttctcatttagttctattaaaagtgtatcaaaagttttctctacaacaaccccactcaaatgaaaccaatgagaattatcatctccactagaacgcaactccatattttgacgattctccttaaaaacatttccttttacgccaagcacaattaatactattgcaagcaaaagtatgattaacaaaatcaatcgtttcttatccattaaatgtagtccccgatatgtctgtccaactatcaaaatcaaaattcaaataacgtactgtatcccgccatccatcaaataccatcaatgtatgtactgtatttccagaattatatgctcgcaaagttgcatatccctctgctgccattgaatgccccgcacgttctccagtatcactgctaattataccacaatggacaactgctatatctcctctatcaatgcaattagtgaaaaaattataattgggactatagtcagtattttgtgttacagaaacattctttccagcacaaaagtccacaaatccaagtccaatattgccaatagttgttgaaccatatgttattcctccgctctccgatgaaactgtcgttcctgttgaatcccaaatatccatataatcacctgcaatatctgtataatcaacagcattataatatgcaccacatgctaataatgcactaactgcacatgcataatgtcctgttacactttctatatacggctcattaaaggaaataaattcttgaagatgatttgttgaaacaagcgtgtagttttcataaacttcagcaacatctagcaaaacctcatcccaagtagctgggtcttttcccctactctcattcaatgacagtactgttttttctaatgtttactttaataatatatcttatttcctattttgtctatatttttttatgtttatttcaaatattgcattctatttcatttttatcaaaatattttcaaacaaatccaaacaaagaatctcggggcaaatttcggtcaaatcaggataaataaatataacactttatatgtaagtcagttttaaaaaagcctgtaattccgggctttacaacactttgtaacacaatataaaccagttcgataatccctcattcctttagataactataacgacaacgaacgccacgggccggaaggtttgtggcgttcgtcgtttcttttttctttcacaaaatatactgcttaaacctata

SEQ ID NO: 2909 - DNA, 1160 bp, Unknown
  gut microbiota DNA sequence
ccaaacacaggtaaagcaaatctcgatgaataacgataccaaccatacatggcatctacattatgttttactttataattctcagtaaatttctttccatcagctattttaataagctctggcaatccctgcgcagcattggcctttgctttggcatttgctccttttaaaatatgtgtgtagttggaatgtgcatattcatctggcaagtctgctcctatgtaaataacttcattactatcatcaatagtacaaatgtcaccaacatattgccttaaatacttttcgacctcatcccatttcaccgcccgcttccctttgaaaagaatatcatgaataaaaaccgttttctttccatctaaatcttctattacatttacttttcttttcattttaacctctccaactttcatcgcgctacacgcattgcgttattctttatccaaaaaaataagtcttacgacttatttttcatcatatcttccacttccacccgatatttcatcaaacgtaaaagatattccggaagttctctcttctcagcttcccaatcttgaacagtacgatacggtataccataataatcactaaactctctcctgttcattcccattttttcccgtaattcttttacttcttttcctcgactcattagatcaccttccagacgcattgcgttaataaaataataattcatgtataaatgtctgtcaatgactattttctatgcccccctattccatcacagtttatcatacttcgcactcttccccttagccttctccaccggatacttctctgcattcaccctgatcttctcccgcacgatctcatccagatccagtccgcaagcatctgccagcaagacacaataattcacaacatccgccagttcttcttttattttctcctgttttccttcatttaagacatctgcgccactccactggaatacttccagaagttctgctgcctccagtgaaatggagattgccagatctttcgggttgtggaattgtttccagtctctgtcgtctcgaaattttaatatttctttgattgtttcttctgtcatttcaattttcctcttcgatgtatttactgaaaatctcttatattcattatacttcgctaaccattgacgtacaagaagaagtcat

SEQ ID NO: 2910 - DNA, 245 bp, Unknown
  gut microbiota DNA sequence
gaaccttgataattaaacaatagacaacaaccctgaaaattctaaagagaattattcagaacagacatttaatgtcgaaccttaaaacagtaaaggggataagaaagctagtagttttcttgaactggaacgaacttgatttttgaatctgtgttaaagcaggtttgagatattttaacgagagtttgatcctggctcaggatgaacgctggcggcgtgcttaacacatgcaagtcgagcgaagc

SEQ ID NO: 2911 - DNA, 757 bp, Unknown
  gut microbiota DNA sequence
tggacaagggtggaacagatcgttcaattaatcccgacaatgaagtcactggatgctgataagaagactgctaaggctgaaactaaagcggtagaaaatgcaccagagaaagaagaagttattgatttctctaaagtaaaggttgagcctttgtttgaagaatttgttgattttgatacatttagcaagtcggattttagagcagttaaggttaaagaatgtattgcagtacctaaatcaaagaagctgttacagttcactcttgatgatggaacaggcacagatcgtacgattttaagcggtattcacgcattttatgagccagaagaactagttggaaagacacttattgcaatcacaaatcttccaccgagagcaatgatgggaattgaatcttgcggtatgctgttgtcagcaatccatgaggaagagggagaagaaaaacttcatcttttgatggtggataatcatattccagcgggcgcaaaattatattaatctctctatacagcgagcagaaaaaacgtgtactgcaacaaatactgcaacaaatttgtaagttgatatgaagagacatgaagttgaaaagtagataaattttgaatatcgtaaaataacataaaaaggaactttcttttggagaaatctaagagggagttccttttttttgttgcaatatggttggagcgagggagatttataatatgcaagcactttatggatatcatgaatggaagctatgcccaaacacatttcc

SEQ ID NO: 2912 - DNA, 676 bp, Unknown
  gut microbiota DNA sequence
aaatggaaatgaaagaagaatgtattatatgtaaagcaccacttatatatcttgaaaaagatgaaatgatggagtgcgtgttatgccataaaaaggaattaagcaaaactagatgtgagcagggtcattatgtatgtaatgaatgccatacaaaaggaatggatgtaattatagacatatgtcttagtgaaacatctaagaatccgatagaaattataagaagaatgatggcacagccgttctgtcatatgcatggaccagagcatcatgttatggttggttcagcacttcttaccgcatataaaaatgcaggtggtgagattgatttgccggaagctctgcttgaaatgatgaatagaggaaaagctgttccaggcggtgtatgtggattctggggtgcttgtggcgccggaattagtacaggaatatttatatcaataatctcaggagcgactccacttaaaaatgaaccttggggtctggctaataaaatgacttctaaggcacttgacgcaatcgggagcattggtggaccaagatgttgtaaaagagattcctatatagccataatctcagcaattgactatgtggcagagaatttcaatatacaaatggaaaagcctgttataaagtgtattcattctgataagaacaaccaatgtattaaggagaggtg

SEQ ID NO: 2913 - DNA, 17409 bp, Unknown
  gut microbiota DNA sequence
ataattttcctatcttcttcaatattttcctcctattcctgttcatgtagaaaacataaaaatctatccactccacctcctatcttttgtactccactcggtctttcgcctgtaacttcagatacatcataaaaatcgccattttgactcttttccgttttcataaaactgtcgcttccaaatatatctttctcgattcctacatactcatctccccagtatgtacactcctccggctttatgttattttcagtacatattttttctaaaatcacattaacattatcgcttttactcgtaactcccacttcaagatattttgcatcacaggttggtgcaacatctattccgtattttttccctgtttgtttagcaaggtgaatcaatccactaagtccatcttccattccatgttctttcaaagtctctctcaaacatccaagttcatcttcttgcataaacaaattatcgcctctctgattttctaccataagatcaattttacaataattcggtctgctaaatactatgtccgtatcaaaatcatatttctcttttaatgtgtgatgaatttcaaaacaaatctgatggatttttaaaatctcacccttgtccggaaccatatttttaaatatatatggtattccatccttaaaggaataattgtacgcacctcgccccaatccaagataaagatttttcaactcttcctctgcaaaataactttcaatttttccgcctgcgatattttcaatagttgtcccgctaacaatgattaattttatccctttttgtaacagagggcgcatcgctgcaactgcctgatctacaggtgctcttctcgacattacagccgttccatcccaatcaaaaaatatagctttatattttttcaacatactgatctccttcgcattttaatgttatatttttttcgccaatccaaaaattgattctatctccttctataatcttaaaccttgcttcctgctttgatacggtcacttccagtaacgttccttttcgtttgatcctgaatctatattcttcccattctttcggaattacaggtttaaaacgcaattttgaatcctgacatcggactcctgcaaaaccattcacaattgcctgccatgtacctgccatatttgctgcatggattcctgcataaaaattattatgatagtcatccaaatccattcttgccgattgggaaaaatatttataagcttcatccaaatatccgatatcacaagcaactattccaaatatgcatgttgataatgaagaatgatgtaacgtcacttcttgataaaaatcataatttcttcttatttcttcttccgtaaataaattgctatgtaaatacattcccaatatcgcatctgcctgttttgacattctatggcgcattataaataatggatgataattttcataaagccatgcacgtttttccggcggtatcttagattcatcccatggttttctcatcataaatccatcatccattggatatatttgacgtttttcatcatacggaaaatacatcttctcaataatctgattccacatttctatctcttctatagaaaaatctattttttcttccaaacgagataatacttccggtgcattttcattcaaatagctcactgctcctacagcatctctcaaattttcacgcgccatgagatttgtgtaaaagttattgtccaccaacacattatactcatctggtcctgttacatcacaaatacagtatcttccatctttacattctgcaaagcttccaacatcagcccacactcttgctgtttctattaaaatttctgctcctttttctttgagatactccacatctccactaacctgtaagtagagcgataatgcatacgctatatctgcattgatatgatactgtgctgttcccaacggataatatgtcgaagcttctgccccattaatggtacgccatggatatagtgcacctttcatatgtcctaatattcttgctctttctcgcgcctgatctagtgttccatatctgtaatcaagcaatttctttgcaacttccggttctgtgtatatcaaaaccggcagtacatacatctctgtatcccagaaataatgtccttcatatccttcaccagagagtccttttgctcccattcctgtatgtccgtctctccctgctgcttgaataatatggtacaaattaaagtgaattccttgttgtacagcttcatttcccttgatttctacatccgctattttccaaaagctttccatatattctttctgatatttttccagataaagaccgccatccgtttctgccgcttctaattctttattcacaaatgtttccaactcatttttccccatatcaagcgcagttgaataacaaataaatttatctaattttacagttgttccctgttcacattccacagataccgaaatttctgccatcatctcttttatgtctttttgccaggacaactcttttattaaatcattgtttttccataacacatgagaacttccacatgccattgtcaattgacttccctttgttgtgccttcataatacattttattattttttgcccacattttgtctggatccagcctacgtccaaaaggaccataatcaacaatcggattggttttccttgtgtgattttctacatctgtctgcatttttgagacaaattgaatttctcccgaatagtttaatggtgttaccctatatgaaattaacattatattttttctggcaaatgaaaccaatcgcaaaatctgaattcttgtttttttccctttcggagatgtccaaataagttttctttccagaatcccttctttcatgtgaagcactcgttcatactcttccactgtaccgtccatcatgtcaaatttttcgtcagcaagtattacgtgtgtttctttcaaattcggcaaatttaaaagagactgacttaaaagtggagaaccaaaattagcttctccataacgtattttttcgctttcatagaatccattcacaaaattgccttctaatccggtatctatgtcaaaatcataggcttcctcaaaagttcctcttgttccaatataaccattagacaaggcaaatgttgtttcgttccgataattattctttatatcaaattccgtttctgtaatatcccatacctgaatcggataaattggtcgtttatctgtatccatttatttctccttatattgaactcttcttaacgcaccttccagaaaatttcttcatctttaataaaagccattaaaaattcatatgcatctggttctaaagccgtttcatgtttcaaaagtgcctgatattttaaattattaatccctctggcttttttcatctcttctggtaattccagtatcattcgttcttcccatttataattgctgttttcttccaacccctgtggacaactaaataccgctgtatctctttcaggccagttatcatcccccgcacaggaatgaatcaatccacaaaataccttcggttcgtatccgttctttttatttaatatatccagaacttcgcatacaaagtaatacaatcctgaatgatctccatgcatatcatattcggatgttgtaaaaataacatccggtttcttttcctccaacaacatttctaaatctttttcaaatgttatgcgattatagtctccatgttttccgtattttttcatatgaaattcgactttatcctctaacccgtacgtttctcgtgcacaagatgaaggataaattttctgttcatttttttcattatacagatgtgtcaaaaagctttccctttccggcattccagtatctgcataccccataatttcaaatgattctttattgcttccaagtgtttccaatcccgccagactttctttcagccttgcataacctttagagtaatctatacagccataatcaccatttgttaccatcacaaccgtatatggaacattgttctgttcacatactctgattactcctgccgacatcaagatttcatcgtcctgatgcggcacaataaccattacattattacactcttttttgatatccagattcatcgtcttcactctcatatttaatcttttctttacccctttactgcgcctgctgctacccctgcaataatatatttctgcataaacacatagaaaatcataagtggtgcaactcccagcatcaacattgggaataatgctgtccaatctgtggcaaactgtcctatatttcttgttacctcttgaagaatgacatcattttctctgctctgcaaaaacaaaagtggtgtcataaattcgttccatacatttaatgttacgataattacaacggtagaaataaccggttttaataaaggcagtactatcaggaaaaatcttttaaaaacagaacacccatcaattgctgcagcttcttccaattcttttggaattgtcgattcaataaattctttaaacaaaaatacagcttgcggcgtattaatggctacatctaccagaataacagaccacaaagtattcattagaccgaagccttttacaattttatacaaactaacaatgttcatctgaaacggaacaatcagtcctgcaaggaacagaagaaaaactctggttcccattttggactttgttcttgccaatgcatatcctgccatagatccaaatataacaatcaaaagaactgctgttgcagtaataaataatgtatttccaaacgctcttgggaactccatattgacccatgcattcacatagttatccaacctgagtactttaggcaagccaagcggatttgctgttgcctcctgcgaactttttaaagttgtaacaatcagataataaattggtataaaccagattactgcaatcaggatcataaaaatttcagtaatcgcaagatttcttttttcttttctcattgtattgcctcactccattttcccattaattttgttactattgcactgattgcaagaacgataataaagaagcatacaccaaaagctgaacctgtactgtaaaatccttctgatattccttttttcatcataactgtcataactgtctgtgttgcatctccaggtccacctgatgtcatagaataaataatatcaaatactttcattccaccaatcaatcctgtaacaattacaatttttaccgatggacacattaatggtaatgttacatacataaattttttcagtccattggctccatcaatttctgccgcctcataaagatctggtgaaatactctgtaagtttgcaaggaaaataaccattgcccatcctgtccattgccaaatctgtgttaaaattacagaatataatgcatttttcgatgtaaagaaattcaatgttcccagacccagctgatgtaaaatattattaattaatccaaaatccgaagacgacataataaaattccataagtaccctataatcagggaactaaatactgccgggaagaaaaataccgctcttaacaaatttctgctttttaatttctgatttaatacaaaggcaagcggcaatccgagtagtgtttgaaagcccgttaataaaattgcatagataacggaattcttaatagccgccaacattaccggcgtttgcaatacttttatataattctttaatcccacaaaatgaagatttatgggattcatgtctgtgtagtctgtaaaactataataaatcgtatacaaaaacggggtaatgctaaataacaaatatatgatcagtgctggtaaaatgaaaataacaaaatatttcccaagctcaccagcccgtaattttctcttttttaccatttttattctcctaaaaagtcaaaaggtgccttgcgccactttggacgcgagaggcaccttattcattcttcctactgtatcttatttttcaagtaattcttttactgcagaatcaacattctttaatgttgtatccagatcctgttctccgagaagatatgactgcatttctgttccatatgtttcgtgtgcacttgctgcatctccccattcattccatggacaatatacattacctgcttccaacgcttttgatgcacttgcatattcttccggtaattcaaatttagctccttcaagataagaagaaccaccctgattatcttcccagaacgccttctgaccttcctctgttgaaagtgcttttaatactttcattgctgcatctttattttttgatgatttgtttactgcaaaaccgcatcccggtcctccaatcagccagccatcacttgctttcgttccatagaatggcatcatatcaaccttaagatccggatttttgtctttaatagtatccaaatcccatggaccggaacagaacattgcagcttttccagttgcaaattcctcaagagcctgatcatggtcaatacctaccatatccttcgtgtatactccatccgtaatcatctctgaccatttttcaagatacttattccagttgccttctaaagtggtttttccatttctgtatttttctccgaaatcttttccttcatctgttgaaagatattctgctgttacaaaagccatcgaattctttaacatcggttcccatgatttcaatcctgctgctaacggtttaattccaagatcttcaaattttttgcatacgtccaaatattcatcaaaggttgttggcaattcgatattgttctgctcgaataattctttattaaaatatgttccttcaaaccagctgattccaggtaatgcatatacatctccatcataactatatacatttgttcctgcatcagaatatttctttccaagatcatttactttttccaaataacctaattttgcatgtttcaatgcagatgcaggtgattcacaaataatgtccggtccttcttccgctgaaagttgtgtatcaacaaccgtatcataatttgaattgtcaataaactggaactcaattttcacatccggcacttccttttccagataatccagaagtgttttcaccgtatcttcattgttccaatatgtcattcggattttggttttaccatcacttgttttttccgaactactatcagaacttttgccacaccccattgctaatcctgttaccattgtggcacataacagaacgcttacaatttttttcttcatatcttttgtcctcctctatttacttttattatagtttttaaccatatatattaaaattgtacatttttttgatttataacattttttcaagaaatgtttttatgaaaaaagcgggaagccattatccgacttcccactttttatttattctctatctcttttctgattttaatggagaaacaaaccatcccctcatccgtagttgaactgtacaagccacactcttcatcataatacattcgaattctttcacggatattataaatcccatatccctttcccggagtatttaaaattctttccaattcttcaccaactacctttggtccattattatatacatgaaattcgagaaattcttcaccgtatatatactctatctttatttttcctctttcggattcacacaaatctgctccatgacatattgcattctcaacaattggctgtaataaaaagttcggcatctgacactctcccccagcttcatccagctgatactctacatcaaaattgttttcatgtgattttagttgaatttgcaagtatgctttaatattttccaattcattttgtacaatcgtaatctgtcttccgccattcaatgctgtccgatagaatgttgcaagaagacctgtaatttctgcgatatcatcctgatctgatcttattgccttccatttaatgctagataaacaattatacagaaaatgaggattcatcatcgcctgcaatgctttcaattcttcttttcgcttttccaatcctaactggtacatatcctgcatcatttgatttattttcatacacatttcgcgaaagctttctgccacaactcctatttcgtcagaatacccctgctctatctttagctcaaaattccccctgctaatctcttccgctccatgttttagttgaagaattcttgtacttaaaattttagaaatcacactcatcataatcaacgcaaccgcaaggcacaatcccattaccagtactgtcgttgccataatttctcgaatttgctccgaaatttccgatttatcaatataataatataatttccagccattatccattttctcagatgtggctaatatatattttttagtttcgtaaatcctttcttcccgattttcttcaatatgttgataaatatttttatttatttctctatctttaattgttctttctgtaatcttctttccatttgcatccactaaaagtattccattattcaaatagcttgattgaaaaagtccatctaaaaattcatctgcaaacacttctaatcgcatatatccaattgccgttgacgaagtcgccgaatccaaaatcattcgtgtcgcataaatccggtcatctttaacactccactctgttttaaagttattctggttttttctgaaccaacttctcttttctttcccttctaatggtttcaaaaaacttcccaatgactgtttcacatatggagaatagatttcaattccctttatcttatcatcactggctataaaataccaaaatgtgggctctacagaatcgttcatttcttttactaacgcatttctgtttttcaatccattttccagacttcctcttaactttgcattatatgataaatatttaatattgtcagtttctcgttgaatatcattttgcaaactgtaagaaattgcatcgacattgctttccattgtatacttcgtctgtcttatcagattttttttagatacataataagaatacatgccaagtactaaaattggcaatataaccaatatcaaataactgataattaatttttttctgatagatgcctttccgtaataccaatcccatatttttttcatattttttctctcaattgcttaggtgtaattccataataatttttaaacagtttattaaaataagattgattttcataaccacacgctttagcaatttgaacaatttttaatgttccttcttcaagcataactttagctttcatcatcttcacatccgttatatattttaccaatgtctgtccggtttcctttttgaatatataactaacgtatgccggtgttaaattaacattttcagctacataattcaaacttatatctttcgcataatctttttctatcagatttttaattttatgaataatccttgagtcatcttgcttttctaccgctaacgaatccagcatcttatctatagattctccataaatctccaacattgtctttgcattttttgcacgaaacattctttctgatgaagccagtacctcttccatttttattttcggagatttatcatacaatgattttatgatagaatacaatatattttgcaaatataatttactgactttatctaatgacaaaatcgttttcttcaataattcattttgtttttttatcaattccaaatccatggaggcaaaagcttgttccaattttttaccggcactttctacgtccgaagcataatattccgtctcactataatatgatttcaccctgattatctgattgtcataaccaaatatctcactttgtattttatggattttaaccagttgttcctctaattttgcatcattatctatcaaatcactaataatcattaccgcttcactatgagtttccttatgtaaatccatcaatagtttttctgcctgctcttccaactggtttccagtaagatactttttttcttgaaccaacagatatgcttcattcggatacatattaaaatataatacatttttccccatatacattttcaaaaaatgagtaaataactcttcgtgttcttcaaaaaaattctctgcaaattcaacatctaacaacttacatcctatattactttgttcaaaaagtatctgatttactttttctctgtcatcagcagcaatatgcgctctattaaatatcttataaaatagatttttacgattttgaatttccgcattttgttttagctcatcttttttattatcatcattaattgcttgtatgacggaaaccattaacttttgaaattcttcaatctctataggtttcaacaaataacttacggcatttgcttccaatgcctgttttgcataatcaaattccccataggcgctataaataataattttaatctccggccatcgtttatacacttctttcgccaattctaggccattcataacaggcatttttacatcagtaaacaaaatatctattttgtacttttcaatacattgcaatgcctcttttccatttgctgcttgcacgatttctaatggatacttatatttctttataagccaggaaatcccttctctttcttcccgttcatcatctaccagtaaaattttcatctcttcattcctttatgctagtgtattcccatatattcttgtgcattttgcacatattttatatagtatactcgctattttatgaaatatcaagcacccatacataaaaaaaccgccagtgcaatgcactgacggttttcaacattcaatattagtcctgtacgtatggcataagagcgatgtgacgtgctctcttgattgctactgtaagagctctctggtgcttagcgcagtttccagtaattcttctaggaagaatttttcctctttcagagatgtactttcttaattttgctgtatccttgtaatcgatctcgttattctcttttccacagaatacgcaaactttttttcttctgcgtccgccgcctcttctcttgaagccgccttctggacgatttcctttatcgtaagccattttggtttctcctttcaacaaaatgaaatgcggcaagtaccacagcatggtactattgcctaattaaaaggtaattcctcatcaattccatccggaatgttcatgaagccgtcacctgcatcagatactggtgtggctggtgccggagccggtgatggagctgccgcacggaaacttcctgcatttgcgtcgcttactgccttgctttcagcaaattcctgatcttctacaacaacatctgttgtgtatactttctgaccttctttattggtatagcttcctgtctgaatacgtccggttacgataaccttcagtccctgacggaaatatttctcagcaaattctgcacttcttccgaaagctacgcatccgataaagtcagctgtctgctctccgtcgttgttacgtctgaatctgcggtctacagctaatgtatatcttgcgatcgctgtagaattctcaccctgtgaatatcttacctcaggatctcttgtcaagcgtcccatcaaaattactttattcatattatacctctacttcctgcttatgcatcctgtctaacgcataaaaatctgataacgttgtccataatgcgaattctctgctcgatttcgcttggagtctcagcatcagactcgaagtggatgaaatagtagtatgcttctttcatcttctgaatctcgtaagctaatctcttcttaccccattcatcaacgtcagagatctgtccaccgaaacgttcaactaatgctttcaccttttcgattacctgagctctttcgtcgtcttcgatttttgcactgacaacaacagctaattcatatttgttcatgtcgtcttgcacctccttctggtcttttggcccccgctcatcttatgtgggagcaaggatttctgtctctattttaggacagaattattgtatcacgagttcctatgttaccataaaatctcgattttttcaagcttttttcttcaaatcttttgtatttttttctaccaatttgcgggcgatcatgatctgatgtccgcatcccatacatttcagtcggaaatctgctccaacccttagtatctcccattctttacttccacatggatgcggctttttcattgttaccacatctcctacttcataggtatattctttcttcatcactgtttcgtctcctcctcttttacccctcttacaacaaaccggtgattatcactggcgctggtacaggtcgacaatgtaacgatcgtatctgccgttgtcacttccacgccggtattatacagagaagtactctgcgtcatattcaaaaattcctgatattcttcatctgtttcaaatgttgtctgatacgattccgaagtgtcgactacctgtcctgccgaataaatatgatatttcagaattcttccatcaacggtatatatgtaaaaatatggattattcttccagaattcacgggtatcataatcctgcaggtgacggaacatcgaaccgtcccgcattctatgtccatatattacagagtttttatccgaaaaatccttttgattgtcaacattcaggaagattgctcccagcgtattttcgttagacgaaaatgttttcttcagatatttactgttatccgttccctgaacaaccggataattgatctgactcggctcatccgggaatctgatccatgcgatcgtatccggattgatctccagcagtttttgaaaatcaacagaaaatgtatcatctccgtcttcactatgatttttatctttatcatttttattcttatcatccgtcaccgcaagtttccgcactttatcatactcacttcttccatccagataaccttttccgatcttaaacagttgaaagcccgacacgcagaatacgatcagtgcaatcacaagaatcacattggcgattatattcccttttttcttccgccttcttccgcggtgatgtttttttctttcattgtctgcattttcatttctcattccggatttgatcccttcctgtgctgttctattttctttactttttcgattccataatctctacaatcgtcttttccgtccctgtcattccaggggatgcgatcattcccatgtacttcatagttgcttccggggtcctgccgttgattccatgaatattttctatgcagatatcatccattgccatatctgttgcacggaatgctgcatctactgccacgatccctttcatcgtacatccgtgattgcctccgtcacagatcattccggtcagaccgcttgccatattctgaatcacttttgtatgtttttctccatccgctccctgcagatatgccagtccacaggccatcccggttccggctgcaatcccgcagccgcaaaatgccgataatcttcctgagtactctttgatatacattgtaatcagatagctgagtgcagttgctctccacagggtctcatcatccgtcttatcttcattggcatgcctgtacgcatacaacggcatcgtcgcaatgattccgtgtgcaccgctcccggtaatgctcatagccggtctggaaaggcccagaaccctggcctctatcgcaccgttacacagtaattgtgccgtcttaagtgcatccctggatatgatccggttgccattctcacgataaagtttctttgcgaacactgccctgtccgaagccagtccttcttttaataattccagattcatcgtatacgctttttctataaacgcaatctcttcaaccggaactgtatttacataccgcaggatctctgtcagggaatatccgtgaattaccggacgtgcctgctttttccgggattcatccctgtacatcttatcttctgtctcaaatattacaatgccgtctttttctatctttacgatattcgtatgtgcatcccggatcatcaccttacaccggttattctccgttgtcaccacggcatcgatcgtgatctcggatccgacatgatccataaccacttccaccagaccgtcgctcaccatctgcgccgctttctcatcatcttccggtgtgatatctgccagcgattccagtcctttttccgcatctgccgctaccgccccaagtgccgccgcataatagttgccgaatctctccgaattaggaattccacaggtaaatgcattcttgtacataccggaattcaatgccacatgtacatttacaatcttaccttccgtatatttcttcgcacttgccacggcaaatgcgatagctcccggctcggtcacgccaagtgccggtttcatatcttctctgatcagctccgtcagcttctgcatattctgcctcctccccgttatcaaccctgttctacgaaattaacattcttatcttaacacatccaccacagtttctgcacttttctcatctaaaatctttagaaattttaatactctgtttattgatttttcctattcccggcgtatgattaaatgtatattgcaagtactattttaagaggtgaatgaattgaaactaaaagacagatttatacgttttatgtacggaagatatggtgttgattcctttggcaaatttaccatctggggatccctgatccttatgctgatcgcaggatggacgcatcggggaatcctttcctggctggcatgggccggtatcatctattcttatttccggatgttttccaaaaatacttacaaacgagccgccgagaatcagaaatatctgcagatgacacgcagcatccggacatttttctacaggcagcgtaacatgataacacagcgcaagacacaccacatttacaaatgtccgtcatgcaaacagaagattcgtgttccaaaaggaaaaggcaagattgagatccgctgcccgaagtgtaacaccagatttatcaaacgaagctaaggagttcccatgtttggttatatttctatcaacaaagccgagatgaaattcaaagattatgatgtctatcattcttattactgtggactatgcaaagtcttaaaagaatgttatggtagaagaggtcaggtgactttatcctttgatatgacatttcttgtgatcctgctcaccggtctttatgaaccggacacgaagacagagatggtccgttgtattgcacatcccatgcaaaagcatgcggcaaagaccaatgaatttactgaatatgccgcagccatcaacatgctgttatcttattataagtgtgaagatgactgggcagacgaacacaggaagaaagcttttgttgccgcaaaacttttgcattcaaagataaagaagattgaaaaattatatcccgtaaaatgtaaggtcatctcagaaaatctcgcccaaatctcaaaatatgaggcagaaaatgaacagaatctggatcttatgtccggactttttggcaatatcatggctgagatttttgcataccgccacgatgaatgggaatcctctcttcgtaagatcggattcttcctcggaaaattcatctatctgatggatgcctacgatgatgtcgaaaaagacatcaaatccggcagctataatccattcaggaaggcatacctggacgatcctgcatttgcagatgactgccgcagccttctgacgcttatgatgtcggaatgctccagggaattcgaacagcttccgatactgctgcatgcagagatcttgcggaacgttctctattccggagtatggagcagatacactgccgtaacatccgaaagactcgccggcaagaatacacacaacgctgcagatactgctgacggcaattccactgccggtagaaccacgaatgataatccacatcctgacacagataattcaacaacaggagatcaagaacaatgacagatccatatagtgtcttaggagtatcccgtgatgcttctgatgacgagataaaaaaagcatatcgtaacctcagccgaaaatatcatccggatgccaatatcaataatccgaacaaggatcaggcagaggcgaaattcaaagaagtccagcaggcctatcagcagatcatgaaagagcgggaatacggctcttccgggaattacggtccatatagccagaacggatatggtccgttccgcggcttctacggagaataccgacagaccggtaatgcaggtaatgcaggtcaggaaagtgagcaggatcttcacttaagagctgctgccaacttcatcaacaacggccggtatcaggaagcaatgaacgtattaaacggaatcaacgagcatactgcccagtggtattactacagtgcgattgccaattccggtctcggcaacaatgcaacggcccttcagcatgccaaagaagcgctccgcatggaaccagccaactatcaataccagatgttagttaaccagtttgaaagtggcggaagctggtaccgccaacgccagaatccgtataccaccaccttcggcggcggaagcgactggtgtgtaaaattatgtattgccaacatcgtctgcaacttatgctgcagcggcggaatgtgctgcggtgccccgggcggttacagtggcggccattatatgtaaatcatgaaatttcaacaggatacagatgtacagtaaattgtcatcatcagcaaacgcaaaaaaaggaggaattcttatgttggattatcttgttttatatcaaagcggatccggaaatacaaagaaaattgctgcatctatcttctcacgtcttcccggcaattccaaagatctgatcgatatcgatacagataagacgattccggaagccaatgtctacttcatcggattctgcgtgcaccgaggaagctgcagcctggaagtcagtgacttcttaaatgacttaagcggcaaacagattgctttattcggaacttgcggaatgggggattcccctgaatattataaggatattgccggacgtgtcagtgcctggatcgaagcagacaatgattatctgggatattttatctgtcagggaaagatgccgcagaaggtacgtatgaaatatgaatccatgagaaatgatgaaaacaacgaccagatcgaccgttttatccagaatttcgatcttgcacttactcatccggatgatctggatgtggagcatgcaaaagtattcgtcgatcatatattaaagaagattcaattataatgaaataatatacgagaggctgccaccggcagcttttcttatattctttgatgcaaaaacacccggaaataaatattccgggtgtttttataagaggcgccaaccagatttgaactggtgatagaggtgttgcagacctttgccttaccacttggctatggcgccatatgactccaacgggaatcgaacccgtgttaccgccgtgaaagggcgatgtcttaaccgcttgaccatggagc

SEQ ID NO: 2914 - DNA, 16004 bp, Unknown
  gut microbiota DNA sequence
gtatatttatttgtcattgtgcttttcacacgaccgagatttaatatatcatagactcggttgtttggcaagtgtttttttgaattttctgaaaaatttttatttttcagattttttcttatcttttgcggacagcaaaagctttacctgcttttctgtccgcatctcgtccggttcataatcgtaataacgaatccatatgtcccttacagaagtgtatgatataaaatcaaacgtgttacatcagaatcagatcttacatgcccctgtcgtcatcttaattattagcgattgtgatctatccgatccatatgctcaatcagccggaatatctgacttgtatatccccactcattgtcatagaaacagatgaccttgaaaaagtgggaattcacttgaattccctgccttgcatcaaagatcgatgcatgtgaatctccgataaaatctgaagataccacttcatcctctacataatccagaatgccggacaaatatgtctcagaggcctcccggacttttttgcagatctcatcatatgatgccggctgctttaacgctacattcagatcaacaattgatacatctgaagttggaaccctgtaagaaataccactcatcttatcctttaaagccggaatgacaagcgagattgcttttgcggctcccgttgtagatggaatcagattaccaaatgccgaacgtccggttctccagtctttctgggaacggctgtccacaaccttttgttttgcagttgcggcatgaatcgttgacatcagcccatattcgattccataattatcttccagaactttacagattggtgcgagacaattcgtagtacatgatgcattcgatacaactggcatatccgatgtatatttgtcatggttgattcccatgataaatgtcggtgtatccccatcttttgccggtgctgagataataactttcttcgcaccgccttctaaatgggcttttgccttttccgttgtacagtatgcacctgttgcatcaataatatactctgcaccacatgctccccatggaatcaatgccgcatctgattctgaaaatacaggaatcttctgtccttcaatgatcagtccattctcatatgtatccagttctccctgaaaacgtccaaatgtagaatcataccggatcatatacttcatataacccaggtctgcattccgtacattgattccgcatactttaaaagtgtctggttgattaatggcgatacggagtgctacgcgtccaatacgtccaaatccgttaatgccgattgaaattgccatgttacaattacctcctataagacatacttgtctgccggttatcctgttccggtctctgttgttagaggggcactgttttttggctctttctgattctttttgtactctgttgtcaatgtaacataggacaatataaaatgcaacacatccaaaagtaattaaaatattaacgattttttacatctgatcggctttctcgacgaatccccggatgacgttacatgaattatggagctgctctttttccttctctgtcagggagatttccataatctcttccacaccgtttttcccgatcacacatggtactcccgccggaacaccctgttctccatattctccttcaaggagaacggataccggaaggatcctcttttcatcatgcatgactgctcttgcaatattgctgagtacggcaccgattccaaattctgtacagccttttccttctacgatgtggaatccacagaccttatcctcctcactgatcttatcaaaatctaatttatcccggaattccggatgaatactcaggtattcttttaccggtattccgccaatctgtatatgtgataccggaataaactgcgaatccccatgctcacccatacaataagcctgaatggaatgacggcttacgccggtgatctcagataacattctgcggagtcttgctgaatccagagatgttccggtgctgaatacctgattttttggaagtcccagtctttttcttaagaaatcagcaatgatatctgccggattggaaatgctgatcagaattccatggaatcctgactcttttaacggtcctacgatcgtattcatcatcttaatcgaatcatcgaacatatccagccttgtctgtcccgggagacggctctttccggccgccatcacaacaatatgagcatccgcacagtcggaataatctccggctctcactgtaaaatctctgtctagattagaggccatatcatcaagatcaagtgcctgcattaccgctttattcttatctatatcaatatatacgatctccgttgccagtccctgcatcataagactcagtccgcaatgagatcctacatgtcctgctccgataattacaattttcccattttttactgctttcattttttcattcctccgtcttttcctggtatactgcctcggctggacatctttcctggtcaggacagttgtatctgttgtatcaatatgatgttactcattctagcaccattggtactgcctgtaaatagagtgcgctctgtttttttctttttggaaccacaaaaagctcctcaactttcgttgaagagctttctgtcttttaaaaatctagagaatggatttttttagaagcacatttttcggggttgaatattcattcttttgtacttctcatacaatatatcatatgaaattcactatgaatatagttttaatcgacagattttattctataaattgtgtgtcgcacacaattatgataaaatatatctatactctgatcaacatatatcaggaggactacacttatggcaattaaattacagtccctgtatgaagcaattaacaaccaatttgatgtcatccttcataccaatagtttttatgataaagaagtaacctggatccataccgtcgaacagggtgaattctcccatctgctccacggtgatgaactgatctttaactccggtctgaattttacctctcaagactggctgaaagagttcttaaagtcattgaaagacgcacacgccagcggactgatcatctctgtaaaatcacgtcctgcattttcccaggagattatcgactattgcaatgaaatacagcttccgctgttctccacttcctgggacactccgttcattgatatcatgcggatcttttctgagattctgttaaaaaacgaacaccgcgagaccagtcttgccgctgctttgaaaaatgcgatctattaccccgagaatgaagactcctatctgaatcctctggaaagcaatggattcttccgcgacatgaactatactgtcctcataatcagctgccacacttatgacagtgattccggtaattcttacctggaacagctggaaaagaagatccgttatttcatgtctaaagggatcgtatatgaagaagggaagcatctgatcgtattgtttgccggtgaatctgtaaacgatatatctcagaagctctacgatgtctgtcagaataactccgatgtctatgtcgggatcggaactacggtctcgcagcttacagacattcaccgctcttacgagaccgcatttaccgcctatcagctcaccaaaactgctctcccgaagaacttccttgagtacaataagcttggtgtatacaaacttctggccgatatccacaatcaatctctgacaacggatttcctgaactccacacttggcccgattcttgactatgacgctgtgcatcataccgattatctgcatatcctggaagtctactttgatcatgactgtagtatcatccataccgcagatgcactttattgtcataagaatacgctgtcgtataaactgaataagataaaagaacttctggattatgatatcctgaccaatgagaaccggacaaacatcatgctttctttttatattttaagactggaaaagcgcagtatataaatgatcatcccctcaacttctgcatgatttcaaagactacggacctgaatctgtgttataatttcaagtagaaatatctaaacaacataaacgtgggagggattcattatggatcagaatcgaatcaaacgaaaccagatgttaggcgcaaagattgtaaaagaacttacagcccgcaacatggaagcttattatacagactccaaagaagaggctctgaagaaagcattagaattaatcccggaaggaagcagcatctcctggggcggttccatgtctgtcaatgagatcggcttaaaagaagctgtctgtcagggaaattatcaggtatacaaccgcgataccgcaccgacaccggaagataagcgcaagatcgagcttgcggcatatgattgtgattacttcctgaccagtgcaaatgcgatcacggaaaatggaattatgatcaatattgacggacattccaaccgtgtatcctctatcgctgccggaccacagaatgtgttgatgatcatcggaatgaataaagttacacgcgatgtagattctgccatgtcccgtgcaagaaatgaagccgcgccgatcaatgcacagcgtttcaacctgagcactccttgttgcaaaacaggtgcctgttttgactgcaaaacaccggatacgatctgctgtcagatcctgatcaccagatattccaagacaccgcagcgcatcaaagtcattctggtaaatgaagatctcggattttaacatacagattttcttgacttcatcttacgtatttgttatacttaacagtacgtaaggcatggcgccatagccaagtggtaaggcaaaggtctgcaacacctctatcaccagttcaaatctggttggcgcctcttatataacctcggaaacatcatgttttcggggtttttctatatctgaaaggagtatatatatatgaaatcactcgtactggcagaaaaaccatctgttgcccgcgatattgcccgtgttctcggatgtcacaagaacatttccggtgcgatcgaaggcagcaattatatcgtcacctgggcactcggccatctggtcactttggccgacccggaagaatatgataagaaattcaaagcctgggatatgtcttatctcccgatggttccaaagaaatgggaactcgtcgtgatcaaacagacatccaaacaataccataatgtaaaaacacagcttttccggaaagatgtctctgagatcatcattgcaaccgatgccggacgtgagggagaactggttgcccgctggatcctggacaaatccggctgtcataagccgatccgccgtctgtggatctcctctgttaccgataaagcgatcaaagaagggtttgcccacttgaagaacggtcgtgcgtacaacgacttatatcatgccgcaagaagccgcgcagaggcagactggctggtcgggatcaatgccacccgtgcattgacctgcaagtataacgcccagctctcctgcggacgtgtgcagacaccgacacttgccatgatcgcacaccgcgaacagcagatccgttcatttaaaccggaagattattatggactgcggtgtacaacttctgttaccggtggttctgtcggcactatggcttctatcgtcacatggacatggcagcaaaagaaaagcggttccctgcgctcctttaacaaagagctgataaccggccttgataaaaaattaaagaaccagacacttaccgtgacggatgtgcatacctcatccaagcggacaccttccccgggcctctatgatctgacggaattacagcgcgatgccaataagcgctttggcttctccgcaaaggagacattgaatatcatgcagagtctgtacgaacaccacaaagtcctcacctatccaagaacagactcccgctatatcggtacggacattgtgccaacgatcaaagaacgcctgaaagcctgcaatatcggaccttataagaaatatattccggagctcttaaagaaaccgcttaagacaagcaaagccttcgtagatgataaaaaagtcagcgaccatcatgcgatcatcccgacggaagaatatgtccaactggaacatatgtcgaacaatgaacgcaagatctatgatctggtcgtacgccgttttatcagcatcctctatccggcatttgaatatgagcagactacactgaaagctgaagccgcaggtgaaacttttactgcaaaaggaaaggtcatcaaagccgccggatggaaggccgtatatgccgatgctgcatcttccggttcctctgcttcacagtatgatgcttacggggattatgaagattctgaagattttggagaagatttccaaaataatgatatgtacttaaaggcttcagagcaggcacttcctgttctccacaaaggcaacaccctgactgtcacacgcacgaatatcacaagcggtaagaccaaagctcccgcccgttttacagaagcgacacttctgtccgccatggagaatccggtacgttatatgtcttctgatgataataatatgaaaaaaactctcggtgaaaccggcggactcggaaccgtagcgacaagagccgatatcattgaaaaattgttccactctttcctgttggaaaagaagggaaatgagattcttctgacatccaaaggaaaacagcttctggaattagtcccggaagatttgaaaaaaccggagcttaccgcttcctgggaaatggaacttgccaagattgccaaaggagcacacaaagagcaggtatttatcaaagatatcgaaagctacaccaaagaattaattcgggatatcaagacttccgacggaactttccgtcacgataacctgactaatacaaaatgcccgcgttgcggcaagcgtatgctttctgtcaaaggcaagaactcccgcatgctggtctgccaggaccgtgaatgcggctaccgcgagacgatcgcacgcaccagcaatgcaagatgtccgaactgtcacaagaagatggaactgatcaaaaagggggacagtgagacatttgtatgctcctgcggctataaagagaagctggaagcattcaagaaccgtcgtgccaaagaaggtgccggcgtatctaagcgcgatgtccagaaatatctgaagaaacagcagcagcaaaatgacgaaccggtgaataacgcatttgcacaggcactggcgggacttaagttagataaataatatgcaaaaaggaataacaaacctttgctaatctggtttgttattccttttcagagagagaataattatttcattgtcttttcaagttcccatgaccgaatgctttcaatcatcagatctccaccaattgctgtcatttcatttttctgatcatcatccacattatatatattacaagaaaaattattctgataatcattgctgaatatttctaatgaaattttgtcagaataaatatgaatatccagatgctctttgcccattaaattcaatggacatcttgcgactcctttactccagccatcggaattattacggtcaaaatatgcttccgcttttcgcagatcaaataggatctctgtcttctttccctgagacattcttaagttcagcctaatcttgtctgcagttgattttttcagatttatccgcatttccgtttcataaacacagccgctccgaagttcttttttctcgtcttcttttatcagaatgtccgcttcttcctgcttattcttccggagatcctgtaattcttttacaggaataaactttaatgtattatcttctgctaataccgcctctctcggaatgttaaagaatccgcaccagccttcttgatatgtcggaccccagtctttccaaaatggcatccaatcccatgcattcgcccatcctaccagaatccttctgccatccggtgccaggaatgactgtggtgcataataatcaaatccccagtcaatttcccctgaaattgtatagaaaaattttccggtatcatagtcaaaatctcccaccagataaacactggtgcgctcttttcctcccatcggagagaacatcaacacatatttatctcctaccggataaaaatccgggcactcccacatatagccccattcgcctctgctctctgcaaggacattgacaaattcccagtggaacatatctgtcgatttatacagtcttgcctgtgcaaatccatttttgcttgctctacagactacataataggtatcatcatgtttccacactttcggatccctgaacagatctgttggaacaccttccggtgctgtgatcaccgggttcccttcatatttttcaaagtggatcccgtcttcactatatgcgatacactgtgcctgttcaaacccatttccattattacaggttcctgtatagatcaggaataactttccatcatgttcaatcgcactgccggagaagcagccccccttcaaatgatcatcatatacttcacttggtgcaagcgctaatggcagatactcccaatgaatcatatcttcactgacagcatgtccccagtgcatacagtcccaaaatccggaatatggattatattgatagaaaaagtggtactttcctttaaaatatatcaacccatttgggtcattgatccatccggtttctgccataaaatgatagtcctgacgaaattttccctgctgtacggtttctctttttgcttcaatttctttctgggctttttctattctttcaatcatcagttcttttgacatattgtgcctccgatattattacttatattcttcacgaagcttctttgcaaattcagtattaagctttgattcccggcgggccttattttctttaattctgaactgttcttctcttgcaggcttatactcttcccagcgttttgcccatgattctctcgctgctttcatttcttctgttaattccggcatctgaagattgcgttctggaagtaccggtacatttggaattctctcttctacaggaagaatcgtaattggttttgctgttggcagtgtctgataccagtatgctgttgaactccagtcatctgacagatggttcgcatgtccatgttcaatcgtaactttcaaatgtttctcaaatcttactggatctgtaatgtgaaaacggtaagatacctggaatccatctgtatcgctttcatgtacaatagttccaaagaatggatatgcatttttctgcattccccatgcatggttgaaataatcctctgttcctgtaccatttaatgacgggtattcctctccatcaatgaagaacatatcatttccttctccccaccagcttccctggtagtgttttacagtaaggttacatcctacataatgtcccgttccttctacgtcaagcaccgtatagttattctcacctttaaaattggttacattattaacttccggacagtttgtctgaaggtctggtccccagccctgacaaggattttctctgtgccagcttgcatggaaatatgctgtattctcatccagtggctctttatacatttcatagtcaatattgaaatataaaataaatggaagttcgttttcatttacaatctcaatttttgcttttttattaaaaggcattgggaaatagcatgacacagaacaaggagctccatatcttcctgcttcttctggtttcagcgaaacattaaatggcagcgaagaaaaattgcccggataactgttaccaatacagaagaaatctcccaatggtgcaagtacacttggtgtatcctgatcatcccatgtaatcttgatcagaacttttctataatagaatggatcataatcatcccagataactccaagtgccggatgaatctccataaccggagctgctgaagcatttaataccggatcaagaatacttggtgctactacttttctgcaggaagaagtcatccagatatgtgtgatacatccaggtccttccacttctccaagagagattgtctcacctgccgggatttcccaataatcctgattcttacctctctgatcccagctggcaagtcttccgtttctggctttttttacagttgtcaaatctttaaataatcctgatacattgctcataatataagtctccttttctttttgttaataattatcctttcacagctcccgctgtcataccctctacaatattcttctggaataatccatagaagatcagttccggaacaataatcataagactggatgctacaattccaccataatctaccgtataatttcctttgaagaatgaagctcccatagaaagtgtataatcagatacatctttcagcattacagatgcatacggatattcattccatatgtataacacgttaaaaatgacaattgttgcaataaccggctttgccattggcaaaataactttcaccatcagctgccagatgttacagccatctattacagccgcttcgtcaatttccgtaggaagctgtttcaaatatgctgtcagaagaagcgtattgaatgaaatcgaacttgctgcatatggaaaaatcaatgcccattttccgctcaacccgaaaaagatattaatcttatataccgggaacaataaaataaatggtgaaacagataatcccaaaatcaaaaatccatacaataaactctttgccttcggatgcttaaattccattcttgcaattacgaaagagctgcagaatgtaataataagttccaacacaacagataatatacatacaacaaaagtgttcgcatataattgtggaaagtttaatgtttccaatgcatgtttgaagttgtcgagattaaatgctttcggcattgccaatggattagacatgatctctgaacttgatttgaacgaaagcaataccatccataaaaatggaaatacaacaatcgctgttataatgatcatcgcagcatacattgcaattttctttcttttcggtaccattcctattcacctctttctcttgtaagtattgaataaatacctgtgatcaccagtgaaagaaggaatgtaaatgtagccagagacattccataaccataatctccactgttaaatgtcattgagtaactatatgtaaccaacgtctcagacaggtggtttggacctcctcctgttgtctgctgcacaatttcaaagatcttaaacactcctgtaatgatcagaactgctactgttgaaatcgttgatttcatcattggaattgtgacatacattgtcttctgtacaaagcttgcaccatctatttcaactgcttccaacacctctcccggtatcattttaagacctgcaataaataccgttaccagatatcctaattgctgccagaaatagataatcgcaatactatacggagacagtgtattaccgcctatccatttttgtttcaaaccagatgcccctatcgcatccagaacattattgataataccaatgtttggatctaatatataaacccagataattccaacaatgatcggtgcgataatcgcaggagaaaagattaatgactttgaaaaatccactccttttaatttattattcagtaacaaagcaatgagaaaagataaagacaataacaatacaaatgccaatataaacataatcattgtgttctttaaggatatccaaaacaaacggtctttaaataatctcatataatttgtcaatccgttgaatgtagcctttccaattccagaatattttgtaaaactatatccaattgacattccaataggaataataataaataccatatacacaaccagtgtcggaattaccaatcctatcttgtatctctttttacttaaccaatgcatacgctcatcctctttatatctgggaccaccatgataaatcttcatggcggtcccatgcagtgtcagccaatattaacgtctgtctagtttgctgctgccgaatccatattttttaaagcatctttcggactgtatgttccttgcataacaccaaatattgcatcatacattgcttcctgaactgccggagtaactgtctggtccggagctgcttttggtgttttccatccatttccaagtgctgtgatcattgcattcattgcatactgtgaatctgttgctgcaataccatcataattggttgccgggaaaacggatccttcataagaaatctttgctgcttcttctccataataatatttcaaaaatgcatacacagcttcttttgctttatcattatcttttaccgctgaacttactaccagcggagctgccggaactttcattgcaatattctgttcataagaagaatcctcaaattttggtccccaccagaatccaatgtgttcaccgatatttttatcaaattctacacagtcccactggcctgttccgaacactgctgcttttccttcattaaagagctgttttgcatcaaaatattcgattgttgccatattttccggaaatgctccggcatcagcaagtccttttattttttcaaaacatgcattcatatcatcgtttgaatattttgccttatcacccgtataggatttttcattatcttcccatccatatcttgaaaagaattcattgaactcccacattgagtatccactgttcttacttccgattgcgattggtgtaactcctgaatctttcagttttgcgatcatatcaaggaattcgtcataagttgtatcatctgttggataagcaatcccagctttatcaaacaaatctttattatagaaaaatccctgaacattactttgatatggaagtccatactgtacttttccatcattgaatgcattttccataccatccagtgcatcatcaatgtctttattttctttcaggaaatcagacatatctaataagtatccggcctcattgtattccggtgcctccgctgaatctaaatgtacaatttccgggagacttccatcctgtgctgccagtttcatattttttgaatgtgcttctgtatcagctgctacgaattctactttatattttcctttattttctttgttaaatccctgaacaatattgtaagtaaccgtttcctgtttttttgggtttgccacatgaataccaaatttaatgacggttgccccgtccgcatccgtttttgcttctcctgatgacttacttcctccgcatccagcaagcagtcccatcgacatcgctgcaactaatactgcagatgtaaccttttttaaactttttttcttcatagtttttcctccctaaatgagtagatggttgtttatggaacccgttccatgtttgttaaaaaaataaattcagctgtgcacatgactgatttgtataatctatatataactcttagctgctcagatgtcaacattttttcgtcatttcgtttatttcatcaaatttttagcactgtttttgtgcatttttactattccattgttgttctcccctttctcacagatactcctaatgttactttttcatttttatatgtcttcccattaaccaattcacaaattaacctggccgcctcttttgccagttcttttgtcggctgaacgattgaagtcacacttggttctactatctgcgtaatatatgttccatcataagccacacattttacatccttcggaacctttttatgtcttcggataacctcattcatacactcgattgcaaccagatctgttccgaatatcccatcaaattcccattcatccagtctgtcaaacaaatcttttaccgcatacttataatactccagatcaaatttattccatgccagttcataatcaaagcactctactccctgttccttcataattcttgcgaattcaaaatgtctttcgtgatatggcgactctactgcagttgaacctctgaaatgtactatttttttacacccattcttaagcagaatttccgccgccagtcgtccgccctccttatgatcgactgcaactacaggaatatcttctcccaaataacggtcaaatgcaacgattggtttttttatctttttgtactcttctacatctaaggaatgtacacctgtaatcacaccatccacgatatgcctgtttaacatatccagatattcgagttctgcattatgtgccttatctgtattacataacatgatcttgaatccttcattatagagttctgcctcaatattatgtacaagttctgcaaaaaaaggaatttctactgttggcaccagaacggcaatgatcccactctttttatgatacagatttctggcaagttcattcggtgtatactgaagatttttcatagcctcttctattttttcacgtgtctcatccgatacatatccactgttattcagtactcttgatactgttccaacaccgactcctgccttttgtgctacatcttttatacttgccatgtttacaccccctctcattttaacaatttattataacagaacatttacgcaagctctagtttcatttttcgctttgttatatctttatgtatctttaaacgcccaaattagaaatattactcttcttcaacttcgaataataactatccgcagtataaagcgccgccaccggattatgccccagtacacggtctttcgtcactgctgtcgtagtcagtgcctcggaatatttgtaaaacagactgtcatgccccacacaaagtccgaccacaacattcaggtccgtcttcgccttgttcagaagctttgcctgcaggattggattacacatattcacaccgacaccttcgcagcattccgggatgccgaccgatgtcttcttctgtgttccggctttacagccgacaccatacacctcaaagccgtgtctgcgcaggatatctgccaggatacggctttctttcaacaatccgacacaggttgcgatcccgatctttttcgcattaatcttctttgcaaaatccatgatttcttcgacacgggtatgtttgcagtaattctcatactctacttcagctgcagcaattgttactttgcggttctcgtcttcattgtagcattccatagcttcatttagaacttcttcatccatgtgtgttgtcagacagaaatccggataggttttatccattttgttgcagttttttactgcgcagtcgatacaggacatatcttcttttttcatttttttcattctccttttgtataccttggtatctacagcggcctgccactggcagattctctagattaagctttactttgtaaaacatcctctatttacttcataataacaaatacttatactacagacaatggttttccgtttttattttcttattttttgtagttcttttctatgagaaacgttccccgattcagggttgaataaaaggatcttttaaactttttcctcgtctaaaagatccttttaaattatagagattgttttttatcctacatgtttcttttactcttccgctatctcttttcccggttcttcatccttctccaacacaagtatatctgcaatactgcatcccacataatcgcagatcttcgcgatcgtagccagatcaactctcacgactttgttcttacaataattattcagctgggtatgctgcagcttacatgcatagcataactgattcttgctgatctttctctcttttaataccttttccagttcaatcttaattctactcatctttcgtaccatcctataactgaagtatactaagatttcggttgaaaaaatagatgtgataacttacactgtatttatatagatgtatttatatacactgtaagaaattaccatttaggaggtttgccttgaaaaaaagaaatatccgaatcctagctatattattgatcattgcattctttttctcctttattcaaaccagaccttattctgtcaggcattctactatctatactaatgataatacgctagaaatcgagctatatatagtaa

SEQ ID NO: 2915 - DNA, 10831 bp, Unknown
  gut microbiota DNA sequence
tacggactcatggttggtaattcttaagtaaaaaagttgaccgtttgctcacaaaaaatccactgtctgagatgaatgtcgagtttggattttttgtgagctcgtttttaggccaacttttttgctttagaatttccccatgttggagtcagcacaggataggaccttgtaagtttattccgatcggtgatagccgctataatgcattaaatagaaaacattcctccaaactgtgaaaatcccaatatacaagccgcacataccagcataaatacaatgattacttttacgcctatagatatcttcgcataactttcacagatcgggatctgtttatactcccattccgtctgcatttttcttctcttccatttctgaaccagtgtgatgcagtcacatacgaagaacgcgataataaatccaaaactgaataccatggctgctatataatatcctgcatcggcaccttcaacatctatctgccgtttgcacaataccacagccgtaacgatcaataaaaaattaagtaatgtatccacaataatcatcttatctacgatacttttcctgccgatttccttcatacgctccgctccttcctgtaacaaccgcttttcatccaggtcttcttcttttttctgtttcaccgcttccagttccgtctctaattctttcatatatttcctgcattcactacattctgctaaatgctcttccaccagttttctgctatcttcgctgcataccttatccagatataacggtatcagatctctgataatctcacatttcatcattgcctgcgcctcccatcttttctacgatcattttcttggctctgtaataggtcactctcgcccagctttcactttttgaaaataactgtccgatatctctgtatgatacctctcccatcacccgcagcatgaatatttctttgtacggttcctgtaagtcatgtagaatctttcggatgatctgtccattttcctgattgattatgccatttaataaatcctccccttgatctgcatgattttcatctaatttatttgcatatcttttctgcttttttgtccacgcataatattcatgcttcgcaatctgacataaccacaccgataatttacattcacctctgaaattttccaatttttcaaatgcaatggcaaatgtctgctgggtaagttcttctgctatttccctgtctccggataatctcagcagaaaacaatatacctcttttaaatatttctgatatacttcctcaaaagattccatgaactcacctctcttctctcatttatatcttcttttactattaagagtcattttttctcaattcgttacaaactttttttatttttatagaccaaaggtacttccataaatccccttgacatttccttctatatctattatagtacttatcgcaattgtttacaaagtaaactattataaaggagcaactatgaaaggcaaaaactggaccgatatcgtatcaaaacaaggcgacctccggcatttcgcaagtatggcgatccggaaatccggaaaatcagagcacacttctgctcaggagattgattttctgttccggatcgcgctttcggaagaaccactgaccccaagacagattaccagcgctatgggcatcagtaagactatcgtaagccgcctgaccgaccatctggaatccaaaggatttatctataaagaagcctctgcgtccgaccgccgcagttactgcatccgtattaccgatgcaggaaaagatgagattgaccgtatgtactattactatctggatccactctatacattacagaaaaatatgcagaaagaaaaattcgagactttattccaactaatccgtgaagcgaacgagattctttcttcacaaaaaaaataaaggagattttattatgacattttaccaggaactacaactaagctcgaccggctctaaacagctgattaaaaacacaaccgataaaaaagaaaaacgccgtcacatactcatttacaactttaaagtatatcttgtaatggtattctgtgtcgccgttgtatctttatatagtaaattcatcggaaatgacaacagtgtcgtcggagttaccgtgcttctggccgtgctggttctcaggcaggccgatttcggaatccgtaccacgcacgggcttgcctctatcgcaggtatctacgcaatccttatggcaggtccccgtcttgccaacatggtatccccggttccggcattctttgtcaatgtggtctgtatcatgctgctgatgatcctcggatgccacaatgtgatcatgtacaatcactctacttttgtccttggctatctattattatttggatatgatgtaagcggacatgcctacattttaagactggaaggactccttgtcggaatgatcctctgcatgatcattttctataagaatcagaagaaccgtccttaccggcgtaaattttctcatctgtttcaggaattcaacattcattccgcacgcagcagatggtatatcaaactgacattcatcgtatcatcggcgatgctcatcatgtccctgctcggacttccaagagctatgtgggcaggtatcgcatgtatgtccgtgtgtcttccgtttacaaatgactgtgtcgcacgttccggaaagcgttggatgttcaacatcgtaggaggtctgttattcattgttctgtatacggttcttccgaagtctatgtatgcctatatcggaatcatcggcggtatcggtgtcggatattcggcaggatattcctggcagacagtgttcaatacatttggagcgctttccattgcgtccggtctgtttggaatgccatatgcagtagcactccgaattggtgccaacctgtttggttctgtttatacggtcctgtgcaacaaattattcgataaagcacacgcttattttcatagcatcgatttaaaaacaacgctctcttaaaaaggggatgtagcttgcgctacatccctaatttttctactacttcctgtgctgcaggtgttccggcaacaccgccgacaccggtttctctcaatgatacgtccatcttgtctccaacttctttcatcgcatctatcacctgatcaacaggtaccttacttgtaattcctgccagtgccatgtccgctgccgccagcgcattcactgcaccgcctacattacgtttcacacacggtacttctaccagccctcctaccggatcacatacaagtcccatcaggttcttcaatgccatcgcacaggcatgtccgatctgatccgtatctccgcctttgatatagcagattgccccggctgccattcccgaaccggaaccgatctctgcctgacatcctcccgatgctcccgcaagatatgcccggttggcaatgatctgaccaagtccggctgccacatacatggcttctatcatcttctcttccggaacattgtattctttataataagtaacaagtactgccggaagtacaccgcaggctcctgctgtgggtgccgcaacaattcgtttcatacaggcattattacaccccatcttcagtgcattagacatcacctttgagacaaaatccccacacaacggttcttcattctcacggtaattgtccataagcccgccttctgttccgaccagaccacttcttgataccttgtccggttcataggcatccagcgcatccagcatggactgccacatatacttcatcttttcccaggaatcttctatcttcacatccctctcctgtgcatcctctaactggattgctttccagaatggaatgttctctttttcccctctcagtttcgcctcttccattgactgatatgacatatcttcttttcctccattatctataccgatccgttcggatcaagaaatttcacacggataattcccggcttgctctccagttcatcgatcgcactctgcggaatcacctgatctgtctctacaaccataacagccgttccgccacgcttgtcacggaatacctgcatggtcgccacattgatctcagctttactgagtgcagcggccacctccatgatccgtcccggctcatccacattccggatgatcagtgtacagctctctccactgaaatttacatcaatcccatccaatttacagacacagatgcgtccgcctccgatggaatgtgcctgaatcttcatctgcggcacaccttctgcttccataataatctgagcagtattcggatgtgcccccttaatgttcttgttcttcattacaaaatccatccccatgtcttttgcaacttcgtaactgtccggtatgcgcatatcatccggcatcatccccaataaaccggcaatcaatgccctgtccgttccatgtccctttcctgttgctgcaaacgagccatgcaagataacctccgccttctccggctgacggccgaataactgtcttgccaccataccgatcctgactgcccctgctgtatgcgagctggatggacctaccattaccggtcctaaaatgtcgaatatatttcccatattctttttccctttcttttttactataactatccccttccccatctttttcaagtgtcggatagttacgtattttggtatattctatttactattatacgttcccatctcatcttttacaatggtcaaagattgttttttcctctctgatatgctaacattttataacgcaggaccggatatctgatatagaagctttaaggtatcctcccagcctatgataaggaagtgtatagcatgaataaaaaagaagttttggagatccgcagacagttttctcctgaaaactgtgccatcacacgcatctgcggatgttatgtggatcacgaaaaagagaaaaaaatggaaatgaaaaaagccttcttatctttacccgaagaagaggctttcaaatattttgacatcttcaaacacaccctttccggaacaatcggaaagaacctcatcaatatggaattcccgctcgaccaggaattgaatggcggcacacaggaatttcttatgagattaaaggacagtaaacttcaggatgaccttcttctggaggaattctatgataaggtcgtggaaagttatgaatacggcgaaaactactacatcatcctgatccatgccgtatacgatgttcccggtaagaccaaagatggtctggagatggaggacgcctacgataccgtatatgagcacatcctctgcagcatctgtccggtcaatcttacgaaagccggacttacttacaatgcacagacaaataacattgaagaccgtatccgcgactggttcgtagaagctccggtcaaaggatttttattccctgcattccaggatcgtgcaacggacgtacataatgtcctttattacacgaagaaaccagaagaattacagccatatttcgtagaacacgtccttggaagcactactccactgactgccggtgatcagaagacaaccttccaggtaatcgtaagtgataccctgggcgaagacagtgactacgaagtggtccgtaacatccatgataatttaaatgagatgatcgaacagtccaaggaagaaccggaaccgctggaattatccaaaactgatgtcagaaagctcctgacacgcagcggagttgccgaagagaagctggaatcattcgatgatgaattcgatgagacagtcggcatacacggaaccctgctcgcatccaacatcgccagtgctaagactttccagattgagacaccggatgtggtagttaaggttaatccggaacgagccgatctggtagagacgcgtgatatcgatggacgccgctgtctggtaattgcaatcgatgatcatctggaagtaaacggaatcgaaatccattagatttgaagaaaaaattaaaaaaatttcaatttttcacaaaaaatgtttgcattttccgtcagactatgataagatactttttgtcaagcggaaatggcggaatggcagacgcgctagattcaggttctagtgggagcaatcctgtgagggttcaagtccctttttccgcatgaaaaaaccttgaagatttattcttcaaggttttttatttttctgaattatgattttatttacttctttttatgcgctcccgcagttcctcaaatatctccttatgctgcccgacctgcatcttcgggaatgccttcacgagacgctcaccaacttttgtacggttctctgccatctcttcgtatttcgcttttaattcctctatacgagctttcttctcctccctgaattccataccttccattacattctcatagatattctcgccaaccttatcagacagttccttcagctcggctgcaatcttctccattgcttccagtctgcggttcatcttaaggataccggaagctgttacatacagatccgcaagaagtccgaccgccagacacgccataactacaattcccagaacgagcggaatcatcgtcagcactttgtagatcagcggatgaataatcttcacgatcaggacgcagaacactccccagatcagcgaaaacaacacacatacatatccaccaatattcaatggctgttccgaataatcccaccatttattatgaaagatcttctccagcaaaaatccggtaatcccttcgatcacagtcacaagtatggtagaactgatatacagcaacaccaggttattctcaaccggcgtcagaaactgtactacaacaccaacccctattccatataccggacagatcggtccattcaaaaatccacggtttacaaacttgccctgttttgctgctgcatatgcgacctccgtgcaccatcccatgaatccatatacaaaaaatgataatgcgaaataatataactctgtcaaatatcctctctccttctttgtcattatattaataaattttattatacgtgattccactttatttctcaacaaacttctttttcagatctgttaagcttttatttcatataatacaaatctaaattttttcttacaacttcgtgaatattctgtgaccactcttgagagtttttttcaaacattataaaatagaagacgggtataaataggagggattaacaatgagtttaaatagcaagaagaacacaccaactgcttctgatgtttttgacgatgatttcgaagtgatctacgaaggtgatcttccggacatctccatcgatgatgacgatgatgatgattaccgtgatgtattatccggattatccgacattgatcataccgattatatcagaaaaaatgattatgacagattaacaaaaaaattaaaggataaaaacaggaaaaattccagaaaaaacaggaatcaaaaaggaaaagataatttctttgataccagctattatgatgaggatttccttgatgagttagatgatgagctttatgatgatgacaatgccatggatgatgattatgatgattcccgcaatggtcgtaaaaaagagaaaaaccgccggaaaaaacgtggggttaaaattccaaatgtcgcaaaaccggttgcaaaaaccgcaaaaacgggaggaaaaatcttattcaaatttatcaattttctgttaagaatgggaacgctgttattgatcgcatggatcatttatcttttgggactgcatttcctgacaaatgtaggtccttttggtaacattatttcccgtctgacagctgcagatcaggaactgatcgcctatcttgcggttgccggagtattattgctttatgagattattatctttttctgtgttctcggcggaagcaggaagcagggccgtgatggaaataccatcgataacggccgggggcttacatcctttatcattatcgcagccggctcttatctgtctgctgtgtttgcaagtctcattccgcagattcctgccgcactccagggaatccagagtgcattgactgtttacggaagtttaaagaatacattacttccaatctgtgccgcaggagttgtaagctgtataatccggaaatttattataaaatagttaaaaaacaccgaggcagaattgaatgcccggtgttttttcatttcttttattttttctttttaacacggatttttctgatcaactttcgtatcagccagataatcactataatcagaaaaagaagtcccgcacagattcccacgatcattccggcaaatttattcggatgttttaacagatctgcaatattcctgctgtcttccactactttccgcccgtgtgtcgtactatagtaatcagaaacatttgctattccgtctccgtctgtgtcttcaaacgactgcatatatcttgcaattgccacccatgcctttaattctgtcttgccgtctgtaattgcctcatcctccagattctttagcagcttaccattcttatccttcggttcaatctttaataatccatatgatacatccgtgacagagcccaacatctgtcctgtatacagatctgtcacaaccttgtataatttatcatcctgtatctcttctctcttcccgtctttggtcagatagcagtctgttactttattcagaatcatgcggtgcggattataagtaaagttcattccactgcaatataatcttgcagtcgtcatataatcagaaacagacgcatctacttctgctaccagctttaattcttttccggttaaatatgcagtgatcagtggataaccggcaagaccgtctttaccgatccccagcgagaaagaattataaaccttttctaccgtaatatcaccttttgtgtatgtgtcacgcaccgttccacttggcacaaccgccacatctaccggcctgccatcatatccttcggaattttccaccgcatacacataggcgtcagatataatgtctcccagattcagttcttcatgctttgtttccatttcctcaaggctgttgaacttaatatcattttctgcaagtacctgatcttttgtataaccgaaatttaccagataattggtatcaacagtatccataaatttatcaatctgcttttgggctgcctgatcagattttacattctttgttaccggaatcaatttataagtattcattttccagcgcttatctttcttctgggtcatggaaatgcttccaagatttctaccgtattccccacaggatacgatataagtattcccatgtctgattggctggtctaattgcgtatgtgtatgcccgctgatgatcagatcaatatccggtacttctttcgccagagtctcatcttctgatactttctcatcttcccatgtcccactgtgggaaacgcatgcgatcatatcgacatcttcttttttcttaatctcttctactgtattttttgctgattccacaggatccttaaactcaagttcacaggtaggtgcacattctaatgcatctttcccgaataccccaagaaccgctatctttacaccgcctttttgaataaccacataatcctttactccatatgtctcaaatgcggattctatctgtttctgccctttgcttaatccttctttttccatggcatcccagtctacattacacactacaagttccggaactgtctcccctgaattctttgcagtcttcagcatatctgcaagtccgccggaacggtaatcaaattcatgattgccaaatgtcgtaacatcacaacccagatatccaagcatcctaagttctgccgcttctgttgtgtacactgtctggatcagggttcccatggaaaaatctcctccgtccaggataagtgtatccggattttctttcttcttttcatcgatcaatgttttgatccttgcaaagcctccgacctctttttgtttcccatttacgattgtagaatagctgttcagatgcgaatgtgtgtcatgcgtaaataatacatccagatgtttttccccatctgcagcctcggtctgcactcccgtcagcagcggcatgcataacatcacgatcaaaatcagcacaataactctttttactcttctcatatatttttcctttcttttttatataaagagaactaccggcagcagattctcctgtataccctcgtatgcaaaaaatcccgaagaactgcatcatatcatactgttctcgggattatcttttcatgcggatgacaggacttgaacctgcacgtcgtggacactagatcctaagtctagcgcgtctgccaattccgccacatccgcttaataaaaacgcaaatccttcttattctgaaagatctgcgtttttaaatactgagcgtgcggggattcgaaccccggacaacttgattaaaagtcaagtgctctaccacctgagctacacgcccataataaactgggctagttggattcgaaccaacgaatgcaggagtcaaagtcctgtgccttaccgcttggcgatagcccaataataaagaaaaagggtgggtaatgggactcgaacccatgatatccagaaccacaatctggcgcgctaaccaactgcaccatacccaccatattacttatcgaactgtcttttgtccaactaagtatcaccgtattaaattttgtggttcaaacgagcctggggggattcgaaccctcgacctacggcttagaaggccgttgctctatccagctgagctacagactcatatctctaaccacacccaaaacaaattgtttcaggaaagcgggtgatgggaatcgaacccacgtatccagcttggaaggctggtgttctaccattgaactacacccg

SEQ ID NO: 2916 - DNA, 242 bp, Unknown
  gut microbiota DNA sequence
gacgtatcggggtgacaggattcgaacctgcgacctcctggtcccaaaccaggcgctctagccaagctgagccacaccccgatggtgttgttttgtatcactttttgttaccgctccgtgacacaagacatattatatatgagtgccaactaaatgtcaacaacttttttcgttttttttattttttcttcaagcagtccggaaacccttgaaattgatatgctccccatatggtagacaat

SEQ ID NO: 2917 - DNA, 73215 bp, Unknown
  gut microbiota DNA sequence
gtagtaattctacttgttctattggagagattttcagagaaaaatctgtccaatagagatttaagtttgttccagtattctgattaccatagtttattgtctgtaaaaatgtctttacggattgaaaacctgcctgtgaatcaattgcctgaaaataccagttcacggaattatgcatagccgaggtcaaatcttgatcagattcccaagattcaaaaggacagggttctccattccatgtgaaagtggaatgttccggtgtaatgattccagattccaagccaagtaatgcatcgtatattttataagttgaattcggtggtatacgtgtggaagcattatctatattataaatattccacttatcagtagcctgatcatataaaacaaaacttccagtgtagtccccaaaattggaagaaagatttagctgagtaatattcttttcggttgtgtcaaaatgatacccagtctgatcagaagcataaacagaaagtatgggaatgcatccaatgatgatagtagagacgaatatgcatataagatatccacgaattttttgtttaaaagtaggttggtggaatgatgcaatatttaaaatgcgtccttttaactgttttatatttccactaattcccatagtaagagggaatggagacagagctattgtttcggcaaagttaatcagtgtatttccatatgacttgtattctgtttctttcaataattgtaatacagcactgtcgcaggcaagttcccgttcctgtcgtattctttttagaaaataccagattaggggattgaaccagtagaaaacatttactgtatttatcaaatatccaattagaatatctttatgcttgtagtgctgcagttcatgaagaagcatatagcgaatatcagttgcgcttatagttccagcgttaaaatctgaaatcaggtgaattggaagataaatgcgaggatgcaggaaaccagccaaaacaggagatttcaaaaatgctgtactataaatcggaatggtatgcttgctgttcacttcgtttaaacattctatataaagagcgtttagttcttcattttgaagaggtaaagcagaactatgtaaggcttttacttgttttactgagcggtagagaagaaaaaacattatgaatataccgatactccagaaaaatacaagtaatgtgtgaataaaagttggtatttgggtgctgacagagacagcaaaatcatttattttatccaaattataaccattaccagaaagaaaagtggtttgaatgtcaccattggtacttgaactggctgtcagaaaatgtctccacgatatagaagatgggtcagagtttatcggtaaaaagggaacaattagaacggcaagaaatataatcgaaagattatattgcatacgtgcggataattgcctttgcaataaattttttaatcccagtaaactacctaaaaaaatacaaatgatggcattacagagtaaaaatcgaaaactaaaatatatcaaaatatgctcctcccatggttaatgattggaaagaagattccgtaagctggcaatgtcttcttcagacaatttatcatcctcaatgtaagaggcaagcatagaagtgatattaccattataatatcgctttaaaaaagaattactttcctgccgaatatattcgtcttccttgaccaatggagtatagacaaaaacccggctttgtttttcataggttagtgcttttttagaaacgagacgtttaatcaatgtctgaattgttttaggactccaactggaaatttgtgttaatttttcagtaatttcattggtgctgattggtgcgtatttccaaacgattttcataacttcaaattcagcttctgaaatttgaggcagattgctcatgtgatattcctccaaatcttacgcttgtaataaaaatattatatattgaaaatgtctgatctgtcaatggaatgaaaaagcttggttttattgatagacgaggaaggtagtggattcctttactggacttagttaaagtaatcaggtaaaataatatttaacagaatgcggagtgtgaatatccgcctgattaaaaatacccaggacgaaggagataaaattatgtatgaaattatgagtgcagatgaagcgattcgtctgattcgggacggtgactgtatctgtgtcaattcatttgtaggaatagagaatccgacggaacttcatgaggcaatctaccgaagatatcagaagatgcagtcaccgacgcatctgacaattgtatcgagtgcagggtttggtgtctgggacgaggaacataatgcagaaagatatatcaaagaaggtgcagtggacaagctgatctgtggtcattttggagcaatgcttagcacgaaaaaattggtgttggaggatcggtttgaagcatataatctgccgcttggatgtatttcccacgcaatccgtgcacaggcaggggggcttcccggagctctttccaaagttggtctggatatttttgtagatccaagacgagaaggacctggaattaacagaatttctattgatgactcactggtaaaacatgttgaagtggatggggatgaatttctgtattataaacttccaaagattaccattgcgttgatcaaaggaactgcggcagacagaaaaggcaatattacatttgatgatatgttcatgtcaggagatgcgctttctatttgtcaggcagtaaaggcaaacaggggaaaagtaattgtgcaggtagacagattggttgatacaccatcccgaccacggaatgccattattccgggctgtttggtagatgcaatcgttgtggcagagccggagaagagaaacgaagcatatactgcacttaccggaagttttgagattccttataaggagtggcatacatggagcgaaaagatagagaatgtgtctacgaagccacagaaaaacagtgtaaccggaaatattatcggcaaaagagcggcgcaggaactcagggtagatgatattgttaatatcgggatcggaattccggagatggtatcaagatatgcacgaaagtgtggtatgcttgatatggtaaccttaacagtagaatcgggcggtattggaggatttccggtatcaggagaggcttttggagcaatgatcggggcagcatctgtctatgatatggcaaaccagtttgatctgtatgataatggcggacttgatatctgttttatgggtgcgttggaagtggatagatatggaaacatcaatgcacatagaggtcccggagcttttgccggaattggtggatttgcgaatattacggcaaaaacaccaacggttgtattctgtatgacatttgatgccaagggattggatgttacgcaggaaaaaggtgtggtaacgattcggaaagaaggagagataccaaaatttgtagataaggtcaatagtgtaagcttttctgcaaaacgtgcgattgaaaacggacaaaaggtattgtatgtaacagaacgctgtgtgttcagactgacaccaaaaggcttaaaactgatcgaagtctacccaggagtagatatgcagaaagatattctggacaggctgccgtttgaggtggagatttaaattgggatttaatttattaacttggaagcggcctctcagtccttgaaggaaacaatagataaggcttcttgttcaggttccataccataagaaacactaagagagtcagaatcacctaaaagcaaaggaactacgctcaaactcggcgttcgcctcaaacacgttcgcttcgttcctttaacggtgcttcagactctctaattgtttctaacggcattccacattcacaataatccttatctattgtttccttcaagtcgtgactggcagcggatgttaataaatgaaatgcccggaagtgtaaccgtagtggcttccgctgggttacacttccgggcatttcattcgtaaggcatttgatacccacggaataaaaagtaggaagctgttccagtgaatgtgaagaaggtgttggaaatagttaagcgtcaaaattatgcgttgggttttcgaaatttgcctgtttgagccgaatggcgagttgcaaatttcggaagcccgtttttagcataattttgacgctttagtatttcccaccgacggaacctgaacaggaacggcttcctactttttatgcaggtccgggtagtcatgccttcctgaattaaatcccaatttaattaaatcccaagaattacagaatatcaatatattctccggccaaagctttattcatacttctgactgcacagaattttccgcacatactgcaggtatcactatgatcatcttccgggcttcggctgtcacggatggctttggctgtttcagggtctaatgcacaggcatactgtgcgtcccagtcaagtttctgacgtgcttcagccattttatcgtcaatatcacgtgctccgggaacacctttggcgatatcggcagcatgtgcagcaatcttggaagcgatgattccctgttttacgtcatctacattaggaagtgccagatgttctgcaggtgttacataacataagaatgcggcaccattcatagcagcaactgcaccaccaatagcggatgtgatgtggtcgtaaccaggagcgatatccgtaacaagagggccaagtacatagaacggagcacccatgcagatactctgctgtactttcatgttggcagcaacctgatcaagcggtacatgtcccggtccttctaccattacctgtacattgtgatcccatgcgcgttttgtaagttctccaagacgcaccagttcttcaatctggcatacatcggtagcatcggccagacatccagggcggcatgcatcaccaagggagatcgtaacatcatattcttcgcagatatcaagaatctcatcatagtgttcgtagaaaggattttcttctccggtcatacacatccatgcaaatacaagacttccgccgcggcttacaatattcattttacgtttgtgtttttttatctgttcaattgttttacgtgtaattccgcagtggagtgtgacaaagtctacgccatcttctgcgtgaagacggacaacatcgatgaagtcctgcgcggtcagggtagcaagatctctctgatagtggatgacactgtcgtatacaggaaccgtaccgatcatagcagggcactcatgtgtcagtttctggcggaatggctgtgtgttaccgtggcttgataaatccatgatggcttcagcaccaagctttacagcactcataactttttccatttcgatattgtaatccttgcagtcacgggatacaccaaggtttacattgatcttggtacggagcatgcttccgacaccctccggatcaagactggtgtgatttttgttggcacagattgcaaccttgccttctgcaaccagtttcataagtgcttctgttgtcatgttttctttttttgctacaatctcaatttcaggagtgacaattccttttcttgcagcatccatctgtgttgtgtaatttctcatgttttgcctccgtttaaaaaaataaatataaggttataatgcgtcagcaaacacacacagatttcgatgcgggaaaacatttctctacacagatctgcggttcataaaagaactatgaaattactgacgcctatatcagatgggaaaatctgatacttgtgtatgcggtacaaggtggtgtccccaatgtaccgtttctaaacaactcttaacgagtcgtttttatcatagacattacgccgcctttattcagcgctgtaatcagcagaaatgcaagaatgcttcctgcaatagtagaaatcagaaatggaactacatagacgaagatcccggcaggagtgattcccataatatatactgcaacaggataagcagccaggccgccaagaattcctgtgccgagtgcctcggcaagacaagtcaggcttagcttgtggcaaatggagtatacaagtccgcagcaaagtgctccaaccatacttccgggaaaagccatcatgctgccaagaccaagcagatttcgtaacaggctggcacaaaatgcaattcctacactgtaccagggtcctaacgtaactgctgccaggatattaataatatgctgtacaggtgcacatttactgcctgcaaccggaaagcttaagaaacttccgacgatggcaagagccgtaaatacaccggcaagagccagtcgtcttgtccgtgaagagtctgatgataaagttgtgtgtgtcataaataaacattcctttcataaaaaaatacccttcattcataaagcggatggagggtacaaaaagtaaaaaaagaagagatgcgggggcatctctgtcaaatcaatacatggtatgaatccctccgttggcattatccaaatcaggtaaagggtcgaaacggaattacgtttcctctcagccgattttctccagctcccctgtttataaaaaactttgttcaatcgttattatagtctggcatatcggaaaatgcaagaaaatttttctgccggtaagaagaaggggaggatttcatatactgtttaaaaagcctggaaaaatataaggaatcttcatatcctacagatctggaaatttgggcaattggaagatctgtattctgcaaaagttcacaagctttgcggatacggtaatccagaagatattcctgtggggagaagccggttgcttttttaaaaaggcggtaaagataagtacgttccagtccgagagaatctgcaatttcctgaatgctgaaagaatgatcataattattttcaatgtattgtaaagagtcttcaacataagaacgctttttagcttccggtgaaatattttcctgcggatatttggcggcaagaagatataggtattcgtacaggatactattgagtatgagatcacgattttgggttaggtgataggcttcatacattttttcatggcaaaggcggacgcggtcatctttgtcataatgaaaacatggatgttccagtaaagaagtgcgttcaaaatactgacgcattttgatcccctgaaatccaatccatgtataactccatggatggttgtgatccgcttcataatagatgagggtatctggtttgatcaaaaaagcatctccttctgaaagctggtaaatcttaccgtttgtcttataaattcctttcccttttaaaatgtagtgaatcatatagccgctgcggatggcagggccataactgtgtccgggaatacaggtttcatatccacaagtataaatcatggcatccagactccgggaaaaatcatttgagaatatataatctttcatagtgtacacctttcaaatattcaacaaaatcacatatacaaacaacataaatccatatataatttaaaatatcagattataattagaattgcaataaggaaatgggaaaggagtagaaaatgccgattgtttacgataaatcaagaaaaatttttcatttgcaggctggagatacaagttatattatgcagattgtgaaagaaaagtatcttgtacatttgtattggggaagacgcatttcttcatatcatgaaagcaggaggattatctggaaagatcgtggttttgcacctaatccggatacatcagatcgaacattttcattagatacattaccgcaggagtatccccagacaggaaatggagattttaggaatccagcatacgggatacgtcaggagaatggaagccggattagtaatcttgaatacatagggtatgagatttcagacggaaaaccgaaacttccaggccttccagcatcatctggaagtaagaaggatgtacagaccctgaaagtgtatatggaagatgccgtagcaggccttaatgtatgtcttttatatagtgtatttgccagcgagagcgttattacacgtagcgtcattttcctgaataaagggaaaaagccgttgcatttgacgaaaatgttaagtatgtcagtagacataagagaagatgaatttgatgttttgaccttgtatggagcacacaataatgaacgtaatatggataggcggcctcttagtagtggaacggtaaagatcgagagtctgagaggtacaagctcgccgcatcaggcaccgtttatggcactcttaagaaaaggtgctgatgaagaccagggggaggtatttgctgcgaattttgtttatagtggtaacttcctggcagaagtacaagtagatccgtaccgaaatatcagattccagatgggaatgaatccatggaatggagaatggaaattagaagcaggagagatgtttcagactccggaagtagtaatggtatattcaaaacaggggttgggagaaatgtcccgtacatttcataaattctatcaaaaccatctggttaggagcccatatgctaaaaaagaaagaccgattttgattaacaattgggaagcaacattttttgattttgatgaagaaaagctcttgtcgctagcgagaaaagccgcttctgcaggaatagaactatttgtactggatgatggatggtttggacatcgggatgcagatgacagctcgctgggcgactggtttgttgataaaagaaaactcccaaatggcttgaaatcacttgcagagaaaattcatgatatgggtatgcaatttgggctctggtttgagccggagatgatatcgcaggacagtgagttgtacagaaaacatccggattatgtattacatacagaagaaagaccgtatacaatcggacgtggtcagttggttttagatttgtcaagaaaagaagtatgtgattatgtgattgcagctgtcagacagatattaaaggataatccaattgactatgtaaaatgggatatgaaccgtcatctgaccgatgtgggaagtatgtattttgaaccagaccgtcagggagagattacacaccgatatgtgttgggactttattatattatggacgtgttaacatcggaattttcggaaatattatttgaaagctgttccagtggaggtggaagatttgatccgggaatgctttattatatgccgcagacatggtgtagcgataatacggatgcagtttgccgtatgaaaatccaatatgcaacatcactgacttatccaccgatcacgatgggagcgcatgtaagtgttgttccgaatcagcagacaggaagagtatctccgttggctacaagaggctatgtggcaatgagtggaaactttggatacgaattggatcttggcaacttaacggatgaagaattagaatatgtgaaagagcaaattcagtgttataaaatgattcgcccggttatacaacatggagatttttatcggataaggaatccgttcaatgaaaatctcgcggcatggaactttgtgtcgcaagatcagaagcgggcagttgcattctttttcgaaatattaagtcagccggccgcaccagtaagaattttaaaattaaaaggtttacatccggataaattgtatcgtagatatgataatggagaaatctacagtggagatgaactgatgtattgtggtatcagcattccgttgaaaaaagaggatttcagaggagaaatgtattgctttgaagagatagagaaaggagaagaaaatggacactaaaaaaagagaacgctatgaagctattgtgcagcaggtaatagagcttgcaggaggaaaaaagaatattctcggaattgcacattgtgcaaccagactaagactggtattagaagataatgacagtgcagatcttaaaaatatggaaaatgtagatttggtaaaaggtgtatttgtagcaggggatcaggtacagattatctttggcgccggactggtgaatgatatatgtcaggtattgggagagacacttcatatggataccatgagtcttggagatctaaagacaaaagcaggacaaaagatgaattttcttcagaaagcgttgaaggcattatctgatgtgtttatcgagattatgccgggaatcctggcagcagcgcttctgaccggactctcaagcgtgcttggaaatatgaaagctgtggaaagtaatgagacattatatggaattgcaagactgattaatatttcgtcaggtgcgatttttggttttcttccactttgtgtcgcctatagtgcagtgaaacgatttggtggaagaccaattatgggtattgtaattggatgtatcatgttatctgggagtctggcagatgcttatgcggccgcacagggaactgtagaagtaacaacattacatattttcggacttggtgtagatcttgtgggatttcagggtggaatcattgtggctttgcttatgggacttgtaactgctaaattagatattttctttgaaaggaaagtgccagaagtgatcagacttttggtatcaccacttcttacgacattggtaagttcatttttattattccttttgattggaccaattggaaggggattagcatcaggaattacaaatgtactggtgtggatgaccagaaacttgggaatttttggatatgctgcattttcaggagttcagcagttgattgttattactggtttacatcatgtgtttggagcaattgaatcgcagcttttggtggatactggaagaaactttctgaatccgttaatgtctgtagcaatcattgcacagggtggagcagtacttggatatatggtgagaaatatgaaagatgcaaaggcaaaagaactttgtattccaagttttgtttctgtattatttggaatcacagaaccagcactttttggcgtgaacatccggtatagatatccactggcaggaggctgtatcgggggtgcagtcggaggcgcaattgtatatattacaaaccttgcagcacttggatttggaacaactgtagtaccaggaattgcacttgcagatccggcacatcatggatatatgaattatgtaattgcacatgttgtggctcttggaactggatttttgatgacacttattcttggaactttattaggaaagaaaaaagcaacagttacaactacagatgaagtgggtgaaaatatatttgaaaagattcatgtgacagagagaaaaatggctgaaacacaaaagaatgagatcgctgcatatgcagatggtgtattgattccgattgaagaagtagatgatgacacatttgcgcaaaaggtattgggcgatggaattgcaatcatacctgaaaatggaaatatatacgctccgtttgatgcagaagtggttatggtaatggatactggacatgcaatcggattgatggataaaaataacaatgaatttttgattcatattggaattaatacagttaatctgaatggaaaatattttgatgtacaggcagctgttggtgatcaggtgaaaatgggagatattcttgtgacagaggatatagagaagataaaagcagaaggttatgatatgtcagtgatgttaattgctacagatgcaaatggaagaaaaatagaaaaagaatctccgggcaaaataaaaaaaggagaaaagattgctgaattggtataagtaataaaagtaagaaaagcggaagctggtgtaaaaaacagtttctgctttttgtgttccggttattctttattctatagatgtcggatgatttgatgtatacatgacatagaaaggtatgctaaaataaaaaaagatgttgttataaaaactgtactggaaaagaagcagcgtacagacagatgtatggactggaggttcaaaaaaagaatgagagagaataatctagagaggtttatcaaagcgcaggagtcagactttaagacagctcttgcagagattaagagtggacataagagaagttgctggatgtggtacatttttccgcagattcagggattggggagtagtggtactgcaatgtactacgctattgaagactatgaagaagctaaagcatatatagaaaacgcagtgacaaatgcacatttaagagagatttcagaggcacttttgcaactggaatcagatgatgcaaccagagtcatgggatggcctgatgatctgaaactgcgttcgtcaatgacgttgtttgcgctggcggcaaaagagaatgaagtctttcggagagtactggataagttctttgatggaaaattagatgcgcagacagtagatatcctggatatgggatatctggtgatgagaattgatgaaccggattttggatgtgaaggaagaccggacggggtagaaccaatggctaaagtaacccttctgaagctgaaaagtgaagaagagattcagttagagattccggatgcggaactttaccggaaagagattgttgaggggagcgaagttgcagtcagtccggatggagtcatgatcaagatgtaaacagatcagggagccggttcagaagacgataagtaaataagacgggtaataataagtaataaaggggagtttcaggtgaaagacagagacgagaaaaaagagaccaagaagaaaagaaaagaagagaaggaagaactgaccggtatggcggctgtatgggattatctgaaaacatttctgatcatattctgtgttgtatttgcaatgaacaaactggtgtatatcaatgccgtgattccgtcggaatctatgcagaatacgatcatgaaaggagaccgggtgctggggaaccgtctggcatatatcaaagatgatccggagagatatgacattgtaatcttcaaatatccagatgatccgtccaagatttttatcaagcgcgtgatcggactgccaggagagacggttaccgtgaaagacgggaagatttacattgatggaaaagagcagacacaggcggtaagcttctgtccggaagagatggcaggaagcttcggaccttatgaagttccggaagatagttattttgtaatgggggataaccggaacaatagtctggattccagatactgggataacacgtatgtaaagaaagaggcaattctggccaaagcaggattccggtactggccgcttaataaagttggatttgtaaataaatctgcagaaaaatagttgcaattgttttccgtgttttatataatgaataaagttttgcgagaaaaggctctgaagcgatatcagggtcttttcttaacgtaaacacatagaaggcagcttgaagatgaaagatagcgatatacacagatgacggaaaaggaggaaaacaggatggaaaaagatatgacggccggcactcccgggaagatcattttcaattttacaatgccgatctttatcggcaatattttccagcagttttataatatggcagatacggtgatcgtcgggaaatttgtcggtaatgcggcactggcggcggtaggagcatgtggaacactggtatttctgatcattggattcctgcagggagttacggcgggatttacggttgttacagcacagcatttcggagccggaaacatgaaggcgatgaagaagtctgtggcatccggtgcggtacttacagggatcgtaaccgttattcttacattgctgagcatgatcagtatggcgaaggtgctgcatttgatgaatacaccgtcagacatgtatggagaagcttacggatatattatggtcatttgcggcgggattgtggcacaggcactttacaattatcttgcaagtgtattaagggcactgggcgatagtaagcgtccgctttattttcttgtgattgcggcatttttgaatattgtgctggatctggtgtttatcattgtatttagaatgggagcggcaggggcagcctatgcgacagtgatcgcacagggaatttcaggaatcctgtgtctgctatatattgcaaagaaggttcccgtactgcatctccatagagaagactgggaaatagataagaatctggccggatggcagctgaaaatcggacttccgatggcattccagtattccatcacggcgataggaacgattgttgtacagtcttgcctgaatatcctcggttctacagctgcagccggatttgcggcagcaagcaagatcgagcaggtgtttacgcaggcctacgttgcgcttggtacaacgatggcgacttactgtgcacagaatatgggggcagggaaatatacgagaatccgtaaaggatttaagagtgcaacattgattggatttatttatgcggttgtgacaggtgtgattattttctttgtcggaaaatatatgacgatattctttgtatcagagaatgtaaatcagatcatggaatatgtggatatttatttgaggtgtgtaagcgtgtcattcctgcctcttgttattgttaatttgtatagaaacggaattcagggaatgggatatggactgcttccgatgacagcggggattgcagaacttgtcggacggagcggtgcatcgctgattgcatcacattttggcagctatatgggaatctgtctggcatctccggcagcatgggtgctggcgggaacacttcttcttattatgtactttgagatcatgaaaggaaagaaagacagaaatttgaaaaatagatagaaaactgaaaagcaacttgttataataaaatgtacgaataaacatagaaacattgatgggtgaaacagcatgaatcaaagagtaataaaaaaagtccgctgtaatatctgttcagcgggatgtccgatcgatgcttatgtagaagaaggaacgcttgtgtcggtagaaggcagccgggatcttccgggacagagtgggggattgtgttccaaaggagcggcctccaggcagtatgtttataacaaagacaggatcctgtatccgatgaaacggatcggaaaaaaaggaagcggggaattcgaacgagtatcctgggatgaagcgtatcggatgattgctgagaatcttctcagggtcaaaaaagaatatggtcctcaggcgacagcgttttatgcgggatatccgaaatggtacagaccggcacttctgcggctttccaatgcttacgggtctccgaattactgtacagaatccagtacctgttttcagtcggcggcaatggcatggagatccatttatggaaatgacatctgctttccggatctgatgcatgcacagacggttctggtatggagtaacaatctgtatcattccaatgcagggatggcaagatcttatcaggctttgaaagcacgtggggcgaagatcatagccgtagatccaagagagaccgtaacgacacaggcggcggatatccacttgaaattgctgcctggaacagatggggcactggcgttgtctatggcgcaggtgatcatagaagaaggtctgtatgataaagaatttgtagaaacatatgtatatggttttgaggagtatctggcatatgtgaatcagtttccgccggaaaaagcagagaagattaccggtgtagataaagaactgatccgtgaggctgccagaatgtatgcgtctaacggtccggctggcataatgttttcagcgtctccagttgtacataatattaatgggatgcagaattaccgggcagtgatgtgtctgatcgcacttaccggcaactatgatatcccgggtggcaatccgtcaagaccgggtccggtgtctccttgcaatgaatatggaaaagtaaaacggctggatacgatagaagccatcggtgagaaagattttccggcatggtttgatctcccgtgtgaggaagcgcagtgtacaagaattgcagattatattctgaaggaagaaccatatccgttgaaagctgtggtgggattcggcctgaaccacagaatgtggccggagccggagcattttcagaaagcattaaaagcgctggacttttatgtgaatgtagatttgtttttctcggattcaagcaagatggcagacctggttcttccggcagcgtcttcctttgaacgagatgttgtgctgaatggacggggaggaatgttcttcctgtcagaaaaagcaatcgaaccggtcggagaggcgaagaatgatattgagatcatgatcggcatgcttcgtgccatgcagttacatgatgaagcattggaacatggctatgagaaatatatggaatatattctggagccatccggtgtcacactggaggaattgcgggtgcatccggaaggggtaaaaggacgtgtgatcattccgccggcatttaagagatatgaaaaagaaggctttcatacaccatccggtaaggtggaatttgtatcacagatactcgaacgttacaaagacagccacggatattccggacttccggaatacagagatttccgtgaggtgtcaggcatggacagggaagcatatccactgattctgaataccggttccagaaaaccacagcttttccatgcaagaacataccgggtaccgtggcttgcaggacttgaaaaggcaacactggtagaaatccatccggaagatgcgaaaaagtatggtattgcagatggtgacatggtgagggtatcttccccggtgggaagtatctgcggaattgcggcggtttacctgaacagccagccgggaattgtacacgtctatcatggcaatgcaaagggtgaggcaaatgatctgatagacagaaattatctggatccaatttcaggattcccgggatataaaagttatttctgtaaaatcgagaaagaaaaaggcgaggtgaaggcatgagttaccgattaaaatttgatccggataaatgtgtcggctgttatgcctgtcatatagcctgcctggatgcacaccatgatgtggaagatgtagatgcaaagagccatcggacggtcaaaaaggtagtgaaaaatcagtttgaaaagaatatctgtccgggctgtgatcactgcggtatctgtatcaaagcctgtccggtgcaggcaatttacaaagatccgaagactggatttgtactgacagacaaagaaaaatgtattggatgtcatgcctgcgaaaaggtctgcccgaaagacgtgatccattttgacaaggacggaaaaatggaaaagtgtgacgggtgtattgaaagaatcagggaagggcgggaacctgcctgcgtcagagtctgttttcccggtgcgatcacactggaataaagacgaatagataaaaaggtgagactgataaaagtaagaatagatgaaactggataaagctaagtaaagagagataaggataaaggcgtatgttaaaaatcaaggaatatgtgaaggcagagagtctggaacaggcatatgaactgaaccagaagaggacgaactgcattctgggcggcatgttgtggcttaagatgtcgaaccggaatgtacagaaagcgattgatctgtccggacttggtctgaatcagatcgaagagacagaagaagaattccggatcggatgtatgacgacactccgtgaactggaatgtcatgaaagattgaaccagtggtgtgaaggcgcagtaaaagatgcggtcagtgatattgtcggcgtacagttccggaaccttgcaacgattggtggaagtatattcggacgctatggattttcggatgtactgacggtgtttcttgcaatggacagttacgtagaactgtataaaggagggattgttccattacaggaatttgcgcagatgaaaagagacaatgacattttagtcagagtcattgtaaaaaaggatcagagaaatatggtctatctggcacatagaaattccaagacagattttccggtattgacatgtgcggtttcagtaaatgctgaaaatggatgcgtatgtatcggtgcaagaccgcagaaggcggtccgactggaactgacagaagcagtcagagaaaaagtatggagcggtgtctgtactgaagaagagatgaagaaagaggcagaatgcattgcttcacaggtgaagacggacagtaatatgcgcgccggcaaagaatacagaagccgtctggcatatgttctgatccacaggacattggaagcactgaatacaaaaggaggagatcagtaggatatgaaagtaaagattcttttaaatgggacaatgagagaagcggaaatatccagcgatcagcttctgatcgattttgtcagagatcatggatgctatagtgtaaaacgtggatgtgagacgtcgaactgcggcctgtgtacagtgtttgtagatgataaaccggtattatcctgttcgatgctgacagccagagtcgacggatgcaaggtagatacgttagaaggacttcaggaagaagcaaaagaattcggtgcatttgttgcagatcagggtgccgaacagtgcggtttctgcaatccgggaatgatcatgaatgcaattgccatgttccgcgagaatccggagccgacaagagaagagatcaaggcatatcttgcgggaaatctttgcagatgttccggatatgaaggacagcttcgtgcaatggaagcatttatcgaatacagaaagaaaggagaaagatcatgaaagcagtcggacaaccgataagaaaaaaagatgcaatggcactggtgacaggaaaaccggtattcatggatgatcttgctccaaaggactgcctgatcgtaaaggtactccgaagcccgcatgccaatgcgatcgtaaaatcagtaaagacagatgtggcaaaaagggtgccgggaattgaagacgtttacacatgggaagatgtgccgcaggaaagatttacaacagcaggacagacctacccggagttcagcccatatgaccggctgatcctggaccggcatgtcagatatgtgggagatccggtggcaatcgttgcaggtgagaatgaggcatgtgtggataaagcgttaaagatgctgaaggtggaatacgaagtgcttccggcagttctggattttcatatggcaaaagatggtgatgttctggtacatccggaagataactggaaagcactctgcaaggtaggcgccgataataagagaaatctctgtgcaagcgattctacggaagacggagatgtggatgcagtgctggcagattgtgatgaggtcgtagaaggaacttatcacgtcagggctgcacagcaggccatgatggagacattccgtaccacttgctttatggatgcttacggaagactgaatattttaagttccacgcagatcgtatatcatgtaagacgaatcatttccaatgcacttggaattccgaaatccaggatccgtgtcagtaagccaaggatcggaggaggatttggtgcaaaacagtcggttgtggctgaattattcccagcatttgttacgtggaagaccgggaaagcatcgaagatgatctttacgagagaagaatcacagattgcatcgtctccaagacatgagatggaagttcatgtacgtcttggtgcatccagagaaggaaaaatccgtgcgattgatgtgtatacactgtcaaatacaggggcatatggagatcacggtccgacaacggtcggattatcgggacacaaatccattcctttatatagttctgcagaagcacaccgttttgcatatgatgttgtctatacaaatcacatggcagcaggagcgtaccgcggatatggagcaacacagggaatctttgcggtggaatctgcggtaaatgagatggcgcagagacttcatatggatcctgtggagattcgtcttaagaacatggtaagagaaggcgacgttatgccggcatattacggtgagacggcgaagagctgtgcacttgaccgttgccttgaacggactgcggagctgatcggatggaaagataaatatccatacaaagatatgggaaacggcaaagtcagaagtgtgggaatcgcaatggctatgcagggttccggaatctccggtgtcgatgtaggatctgcaaccattaagatgaatgatgatggattctatactctgatgatcgcagcggcagatatgggtaccggatgtgatacgatccttgcacagatggcggcagaatgcctggattgtccggtggaaaatatagaagtccttggagcagatacggattcgtctccatacgattcgggatcttatgcgtcaagtacgacatatgtaacaggaaaagcggtagaaaaagcctgccagaaactgatcaccagaattcttgagattgcatccggtatgctggatgcaccggtggaagaactggaatttgcaagcgaccgtgtagaatggccaaaagcacggaagtctgtatcactgatagatattggtacgaaatcaatgtgtggaaatggctgtgcactggaagcgacagaaagtaacagttcaccgacatcaccgccgccattcatggcaggagctgtggagattgaactggacaaagagaccggtcatgtggagatattggattataaagcggttgtggactgcggaacagtagtgaatccaaatcttgcaagagtacagaccgaaggtggtctggtacagggaattggcatgacgctttatgagaacatccagtacaatgacaaaggaaccatgttgaataattctttcatgcagtacaagatcccgtccagaagagatatgggaaacatccaggtggaatttgaaagcagttttgagccgacgggaccgttcggagcaaaatccattggagagatcgtaattaatactcctgcaccggcacttgcacatgcaattgccaatgcgacaggaatctggtttaaggaacttccgattaccagtgagcagatcgcaatgggagtttttgagaaggaagatataaaatagatcatatattaaaaaatatatgtataaatgacttgcaatcagaacgaaaagtcattacaatatggggtaacgtttagaaaaatatgtggaggccgctaagatgcagttattaaaagacagaatccgcaaggatggaaagataaaagaaggcaatgtcttaaaggtggacagctttctcaatcatcagatggatgtaaagctatttcaggaaatcgggaaggaattcaagagaagatttgaaggtgaggagattacgaagattcttacgatcgaagcttctgggatcggaatcgcatgtgttgcggctgaagtatttgatgtaccggttgtatttgcaaagaagacacagacaaagaatattgcaggggatgtatatacaacaaaggtagaatcattcacacacggaagagtttatgatattatcgtttccagagaatttcttggaaaaggagataaggttcttctgattgatgatttccttgctaacgggaaagcactggagggactggcagaactggttaaaaagtcaggagccgagctggtcggagctggtgttgtgatcgagaaaggatttcaggttggtggagatatcatccgctccaaaggaattcatctggagtcgctggcaattgtagaaagtatggatgagaagacaggggaagtcgttttccgtaattaacagctaaaattcaaaggattttttaagggaatgtgagggtttcatattcccttttttttattcctatgatatactttatgataagtatgtgaatgcataaagagaacttatagtaaggagtaagaacttatgaaaagagtattgttaaaactcagcggggaagctctcgcaggcgataaaaagacaggatttgatgaagctacctgtatgggtgttgcaaaacaggtaaagcagcttgtagatgatggggtacaggttgcgattgtaacaggtggtggtaacttctggagaggaagaaccagcgagacgatagaccgtgttaaagcagaccagatcgggatgctggcaacagttatgaactgtatttatgtatctgatattttccgttatgcaggaatgaagacagaagtatttacaccatttgtgtgcggcgcatttactacattgttttctaaagatgcggcagtagaagcactgaatgaaggaaaagttgtgttcttcgcaggtggaacaggacatccatacttctcgacagatactggtgcggttttaagagcaattgagattgaagcagatgctatgcttcttgcaaaagcaattgacggaatttacgatagcgatccgaaggttaatccggaagcaaagaaatatgacgagatttctattcaggaaattattgataagaagctgatggctgtagacctgacagcatctattatgtgtctggagaataagatgccgatgctggtattcggactgaatgaagagaacagcattgttgagacgatgaagggaacatttacaggaacaaaagtaacagtataagtattattatggattattgcgataaaaggagatcacgctatgaatgaaagattaaaaacatttgaggaaaagatgaaaaaaacaattggaaatctggacggggaactttcagcaatccgtgcaggacgtgcgaatccaaatgtgttaaataaaattgtagtagactattatggaacaccgacaccaatccagcaggtggctaacgtatctgtaccggaagcgcgtatgatccagatccagccatgggagaaaagcatggtaagagagatcgagaaagcaattatgacttctgatctcggaatcaatcctaccaatgacggaacaactgtacgtcttctcttcccggaacttacagaggatcgtagaaaagaactggttaaagatgttaagaaaaaaggggaagctgcaaaagttgcaatccgtaacatccgtcgtgacggaattgatgcagctaagaaattaaaaggaacagatgtctcagaagatgagatcaaggacatggaagatgatctgcagaaactgacagataaatatgtaaaagaagtggataaagctgtagaatcaaaatcaaaagaggttatgacagtataagatctgcaacagataaaaaggtatagaataagaaggggataagatccagagaatctggaactgtcccctctgttcttgtatgactgaagagcactgaaaaagttttgcgattacataagttctaatgtgttagtaggaggaaataatcatatgaatgtaccaaagcatgttgcaatcatattggatggaaatggccgttgggctaaggcaaagggaatgccccggaattatggtcacgcacagggcagtaagaatgtagagcgtatttgtgaagaagcctggagaatggggattaagtacctgactgtctatgcattttctacagaaaactggaaccgtccggatgatgaagtcaatgcattgatgaagcttttacgtaattatatgaagacatgtctgaagacagcagcaaagaatgatatgaaggttcgtgtgattggagatatcaccagactggatgaagatattcagaagagaattctggaactggaagaggcaacgaagaataatagcggtctgaatttccagattgcgatcaattatggaagccgtgatgagatggttcgtgcaatccggaagcttgcaaaggattgtatagatggaaaagtgaatccggaagagattgaagaacagacatttgaacaatatctggatacaaagggaattccggatccggatctgatgatccgcacaagcggggaactcagactttccaattatctgttatggcagctggcatatacagagttttattttacagatgttccatggccggatttcagtaaagaagaactggaaaaggcgattgaacagtataatcaccgcgacagacgttacggcggtgtgaaggaggaagaagaacagaatgtttaagacaagattattaagtgggattgttttggtcattatcttaatagcaacagttggaaccggtggcggattgttgttcggctttctggcactgatcagtctgatcggattgtcggagctttataaagttgtggatgtgcagagcaaggtattaggttttaccggttatctggcagccattgtatattacggaatcttatataccggacagatgcagtatgtgacatttcttacgattgtatttctggtcgtactgatggcggtatatgtattttcatttccggtatttaaagcagagcaggtgatgacggtattctttggtgtattttatgttgcagtgatgctgtcttatgtataccagacaagaatgctggatgacggagctgttgcagtatggcttatctttttgagctcctggggatgcgacacttgcgcatactgcgtaggtatgcttcttggaaagcataagatggcaccgaagttaagcccgaagaaatctgtagaaggtggaatcggtggaatcgtaggagcagctcttcttggggcaatctttgctcttgcagcgaataagattacaggagcaggtgtgaatccgggacagtatgcaattatctgtggagttggaggaatgatctcacagattggtgatcttgcagcttctgcgatcaaacgtaatcatgacattaaagattatggaaaactgattccgggacatggcggaattcttgacagatttgacagtgttatctttacggcgccgatcatttattatcttgcaacatttcttgtaggcagattgtaggaggttcatatgaaaaagatagcaattttaggttccactggttctatcgggacacagacgctggaagtggtcagagagaacggtgatattgaagtgcttggactggcagccggaagtaatattaagatgctggaagaacagatccgtgaattccatccgcagatcgtggctgtatggtcagaagaaaaagcagaggaattacgtgtgaatgtagcagatacggacacgcagatcgtggcaggcatggatggacttctggaagtcgcaaccatgaatgatacagagattcttgtgacagcggttgtcggtatgatcggtatccgtcctacaattgaagcaatcaaggcaggaaaagatattgcgcttgccaataaagagacgttggtaacggcaggacatatcattatgtcgctggcaaaaaagatgggagtatcgattctcccggtagacagtgagcatagcgccattttccagtcattacagggcaatcgtcacggggcagttcataagattcttctgaccgcatccggcggtccgttccgtgggaaaaaatcagaagaactgatggaaatcaaggtggaagatgcattgaagcatccaaactggtcaatgggacgtaagatcacaattgattcctctacaatggtcaacaaaggtctcgaagtcatcgaagccaaatggttatttgatgtagatgtggatcgggtgcaggttgtagtacagccacagagtattattcattctatggtagagtatgtagatggtgcgatcattgcagagcttggaacaccggatatgaagcttccaatccagtatgcattatattatccggagagaagattcctcccgggggacagagtagacttctggacattgggaaaactggaatttgagaagccggatacagatacattctatggactggagcttgcatacgaagcaggaagaaagggcggaagccttccgactgtattcaatgcagcaaatgaacttgcggtaagcaagttcctgaacagagaaatcaagtatctggagatcacggagatcatcgaagactgtatgaaggcacacaaaaatattgaaaatccaacattggaacagattctggagacagaagcagcgacctatgaaagaatcaacagcaggaggtaattagaaatttgggaattatattagcaatcttgttattcagcttcatcgtattttttcatgagctggggcatttcttactggcgaagaaaaatggaattgatgtagatgagtttgctataggaatgggaccggcaatttattcaaaagaatataaagggaccagatacgccgtacgtatccttccaatcggagggttctgtgcgatgggggaagatgaagaggcgaatgattcgccgaataactttaataataaatccgtatgggcgcgaatctcagtcatagcggcagggcctgtgtttaactttattctggcttttatctttgcagtgatcataacggcaatggttggttacgataagccggtaatcggggcagtggaatccggatatccggcagcagaagctggtttaaaaaaaggtgacgagatcgtgcagatggggaataaaaagatccacattttccgtgaagtcagtttttataatcagtttcactctgatgaagacgtggttgtcactgtgctgagaaacggaaaagaaaagaccgttacactgactccgaagatggacaaagaactgggatataagagactcggaatcggcagttccggttataccaaagccaatgcactgacggcggtcaaatatggcggctatgaagtgaaattctggatctgcacgacactggacagtctgaagatgttagtgaccagacagatcggagtgaacgaactttccggaccggtcggaattgttaatacggtagataccacctataagcagagccgttcctatggtctgtttgtcgtcattgtagagatgctgaatttggcaattctgctgtcggcgaaccttggtgtgatgaaccttctgccgcttccggcactggatgggggacgactggtattcctgatcatcgaagcaatcagaggaaagcgtgtgccgccggagaaagaagggtatgtacatttcgcagggatcgtgctgttgatggcgcttatggtgtttgtgatgtttaatgatgtgcatcggatattctttgggggatagaagaaatcaaaaaggagatctttccgattttctgtgcgcttggctgcgcatgtcgcagtaaaatatatagttgggaaaatgacagatgaagacttattgcatcaattaaaagctgcaagtgaaaatcactgcctttttatgaacaggtatctggtgaatggattgacggagcagaaaggaagaaaaatgagaaaagcgattgtatacacatctgtgcatcatggaaatacggaaaaattagtaaaaaggatagcagaagaatgtcaggtggatttgatagatgctataaaacaaatgaacgcagatttaaatgattatgatatgattgggttcgcatcaggaatctattattcaaaattccaccagtcaatattaaaattttctgaggagaatttatcagccgacaaaaaggtatttctgatctgtacttatggtggaagtgcaaattttaaatctatagaacagattttgaataaaaaacatgccagtgtggttggaaaatttggctgtaaagggtatgacacattcggtccatttaaactggttggtggtattgctaaagggcatccagatgaagaggatatgaaaaatgcagtggacttcgtaaaaggattacactaattgaaaaattcagattatataatcaaaaggcatgcgaaaaatgaatggacatttttttcatgcctttttaaagcattaggtgacgtagaactcaaagttagcattttcccatgtggggaaaatggttgtcagttcaattccgcaatccgcgatacccccacatatatctccgatatcttataccaggtcgtataatccacttctccggtctgaggcagtccaaagactttttgaaatacccggacagcttcggcagttgccggtccatagataccgtcagcagtgatctttggaatagccggataagcacctgcaatcacatttaactgctcctgcatctgccggactttgttgccggatgagccaatcttcagagtataaccaggccaggaggacggaatgccggagatggcttcggcggtgttgatgtacatgtcatcaccataataatagcgtaggatttcgataggggagtagccctgatcgcctaatgatttggatccccattgtgtcatccagttcggacactgcacctgccgcccgtcacaatactgtgtcagtatcggctgcttcacattcggtctggaaagataatcggcaaacaactcatcgacgatcacagagattgtatcatagatattccgttcaggaatccatttatggtcaaaagcggtagatgaggtaatcgtgaaatcatatcctttgttccggtaccattctgtatacacacggttcagtgtaaaggacatgatcgccagaacatttgcccggattgtatcttcaggccaggtagcatagatttcgctggaagccacatttttgatatagtctttatactttacgtaataatttcttgcagtagaatcccgcgggcttccatcgtggacaacaatatattcaggaacgacgacacgacttaagacaatctcaccggattcaatggttggcttgatctcatcctctggaatcttgggcgggtatgtggcatataatgtatgagcgggtatgacgaatatagattcattttcttcctggttatcgacgggtttcatgctgacattctgcagggctgttacgtggggcagaatctctgttccggcaatgctgacggattcatatccggcagcagatatttgtaaggtgtattctgaatatggctggatctcattttccgggtccaggctgtattccagcggtggtgcggcaagatcaatcatatcggtctgtccggaactgtcggtagtaagctgctctaaaggagtttccgggataccggtgtaggagatggaaatccgggctccctgaatcggatatgcagtgatgtcggagacaagattgatctgcagacggcctttatcaggagtatcctgagtggttggagtcgctccattcataataataggacctcttttaagactctgttactgacagagtatgcaaaagtaagaaaaatgtgagaattgcggaaagagaaagaacccggtataataaagtattcctacattatgcaggaaatcataagaatgatagaaacaggagcgaaaaacagagcatgaaaagaagacatttgcgaatatatagaaaaagaagaaaaaagaaaacgctcatcctgattctgatatgcatcttactcatagggatcgcggcagcagagcgaatcggatacatagatatggaacagtttatttctgataaacaggaagcgattccttatcagaaagtatccaaaacggcagaagagaacacagaaaaatactattaccggcaattgccggaagaacagaagcaagtttatcgggaaatcctggaaggtgtcagaaatcatacagaggagatctatgtacatgatacagatgcggatgagacgaatcagatattccggaagctgatgaaagatcagccggatatcttctggtgtgatggaacagcgacagctacaatgcataagggaacggaaagctatacggttctgaaaccaaaatatttttatacagctaaggaaagccagacgatgcagacagagattacgcaggcggcagcaaagtggctggcaggtctggatgctgatgcagatgagtatcaaaaaattctctatgtgtatgaaaaaatcgtagatgaagtggactatgacgagagtgcaccggataaccagaacatttacagcatatttgtcaacaggcaatccgtatgtgccggatattcaaaggcaacgcaatacttactggaacagcttggtgtgttctgtacttatgtgacaggaaagacgacagaaggcggaaatcatgcatggaatctggtgaggtgcaacggcgattattattacgttgacacaacctggggagatccggtgtttcagcaggaagaaggcgaggagatatcccgggatacaaatcaagaaacagacacttccgggaataagacaaatatcagttatgattacatgtgctgtgatgatacacagctgttccagacacatatcctggataaagacacgcagatgccagagtgcagcaagatggattgcaattattatgtggtaaatggaatgtattacacgcagtatgatgcggaacaggcattgggagccatgaaccagacaatctggacgaagaaaagtgcgaccactttcaagttctctgacaatgcggtttatcaacaggcgcatgatgacattttccagaaagaacttacaaaagcagcgcagaatctggcagactactatgggttatcacaggtgaagtaccagtacatcgatgatccgagattacacaagattgtaatattttggcagtattcataaaaaaacaaaaatatccgttgaaaatcctcggattatgtagtataatttttacaatttgtgaagacataaattgtctggtaccgatggatcaaaacagggcagttttgtgcttgcacaaactgccttttgttctatatttttaagaaaaaattccttgttacaacgaattttttttgcccaaatataggaatatacctgagggacggcgggatggcttcataaaaaagaaaaagaaacacagaagggaaaaggtgaatatatgaaagcatttcttatattagaagacgggactgtctttaccggaaccagtatcggttcgacaaaagacatgattagtgagatagtgtttaatacttcaatgacaggttatctggaggtattaaccgacccttcttatgcgggacaggccgtagtaatgacctatccattgattggaaattatggcatcacaccggatatggagtcaaggaaggcatggccggatggatatatcgtaagagaactttccagaatgccaagcaacttccgttgtgaaggaacaattcaggatttcctgaaagaacaggatattccgggaattgcaggaattgatacacgtgcccttacaaagattcttcgtgaaaagggaaccatgaatggaatgatcaccaccaatgagaattataatttagacgagatccttccgaagctaaaagcttatacagttggtgatgtggtatcaaaagtaacatgtgatgaaaaatatgtcttagaaggcaatggaccaaaggtagctcttatggactttggtgcgaaaaagaacattgccaagtctttaaatgaacgcggctgtgaagtaacagtctatccggcaggtacaaaggcagaagaaatcattgcttctgaaccggacggtattatgttgtctaatggacctggagatccggagacatgcgtatctattatcgaagagatcaagaaattatacaatactgatattcctatttttgcaatttgtcttggacatcagcttatggcacttgcaaatggcgcaaagacttataagttgaaatatggacaccgcggcggtaaccatccggtgaaggatctgactaacaacagggtttacatttcttcacagaatcatggttatgcagttgacggtgcgtcaattgacccgaaagtagcaaaagaagcgtttatcaatgtgaatgacggaaccaacgaaggacttgcatatgaaggaaagaacatttttacagttcagttccatccggaagcttgtccgggaccactggattccggatacctgtttgacagatttatggatatgatgaaaggagcaaaataatgcctagaattaaagatattaagaaagtattagtaattggctctggtcctattatcattggacaggcagcggagtttgactacgcaggtacacaggcctgccgttcgttaaaagaagaaggtctggaagtagttctgctgaactctaatccggctacaatcatgacagataaagatatcgcagaccgcgtatacattgaacctctgacagttgaagtagtagaacagctgatcttaaaagaaaaaccagacagtgttcttccgacacttggcggacaggcagcgctgaacctggctatggaacttgaagagaatggattcctcaagagaaataatgtacgtctgatcggtactacttccgagacgatcaaaaaagcggaagaccgtttggaattcaagatgacgatggagaagatcggtgagccttgtgcagcttctaaagtcgtaaaggatgtgcagacaggtattgaatttgcagaaagcatcggatatccggttgtacttcgtccggcttatacacttggcggaagcggcggaggaatcgctgacaacagaacagaactcgtagagatcctggaaaacggacttcgtctttcacgtgttggggaagttctggtagaacgttgcatcgcaggatggaaagagatcgagtacgaagtaatgcgtgacagcaatggtaactgcattaccgtatgtaatatggaaaacctggaccctgtaggtgtacataccggagatagtatcgtagtagcaccttctcagacactgagcgataaagagtaccagatgctccgtacatctgctcttaatattatcagtgagttaaatatcactggtggatgtaacgtacagtatgcgctgaatccagattcatttgagtactgtgtaatcgaagttaaccctcgtgtaagccgttcttctgcacttgcatctaaggcaacaggatatccgattgccaaggttgcagcaaagatcgctcttggatatacactggacgagatcaagaacgcagtaacaaagaagacatacgcaagtttcgagcctatgcttgactactgtgttgtaaagatcccgagacttccatttgataagttcatcagtgcaaaacgtacactgacaacacagatgaaagcgaccggagaagttatgagtatctgtgataacttcgagggagcacttatgaaagccatccgttctctggaacagcatgtagacagccttatgtcttatgacttctctcatttaaaaggagaagaactgttagaagaactgaaagttgtagatgaccgccgtatctggaaaatcgcagaagcaattcgtcagggtatcagctacgaagacattcacagaattacaaagattgacaactggttcattgacaagattgcaattcttgtagagatggaacagaaattaaagacagaagaattaacagcagagacattaaaagaagcaaaacgcttagagttcccggataatgtgatcgcagaactgacaggaaagacagagcgtgagatccatgaccttcgtcatgacaatggcatcacagcttcttataagatggttgacacctgtgcggctgagttcgcagcagagacaccatattactactctgtattcggaagtgagaatgaagtagttgaaacttccggcaagaagaaagtactggtacttggttccggaccgatccgtatcggacagggtatcgagttcgacttctgttctgtacattgtacatgggcatttgccaaagaaggatacgagacgattattgtaaataacaaccctgagacagtaagtacagacttcgatatcgctgacaagctgtatttcgagcctctgacaccggaagatgtagaaagtatcgtagatctggaaaaaccggacggagcagtggtacagttcggtggacagacagcgatcaagctgacagaatctcttatgaagatgggcgttccgatccttggaacatctgcagaaaatgtagacgcagccgaagaccgtgaattgtttgatgagattcttgagcagtgcgagattccaagaccgacaggtggaactgtatttacagcagaagaagcaaagaaagttgcaaacagactgggatatccagtactggtaagaccttcttacgtacttggcggacagggaatgcagattgcgatcaacgatcacgatattgatgagtttatcggaatcatcaaccgtatcgcacaggatcacccaatcctggttgataagtatttacagggtaaagagatcgaggttgatgccgtatgtgacggagaagatatcctgattcctggtatcatggagcatatcgaacgtgccggaatccattcaggagacagtatttctgtatatcctgcacagagcatctctcagaagacaaaagagacaattgccgaatatacaagaagacttgcaaaatccttacatgtaatcggactgattaacatccagttcatcgtatgtggagaagatgtatatgtaatcgaagttaaccctcgttccagccgtacggttccatatatcagtaaggtaacaggtattccgatcgtaccacttgcaacaaaagtgatcatcggacacaagatcaaagaacttggttatacacctggattacagccggaagcagattattttgcaatcaagatgccggtattctcatttgagaagatccgcggtgctgatatcagccttggacctgagatgaagtctaccggagagtgtctgggaattgccaagacatttgatgaggctctttataaagcattcatcggtgccggagtcaaacttccaaaacacaagaacatgattatgacagttcgtgatgaagataaggaagaagcagtagagatcggacgtagatttgaaaagatcggttataagatctttgctacagaaggaactgccaaggttctgacagatgccggagtaaaggctatgacagtgaataagatcgagcaggaatcaccgaaccttatggatctgatcctcggacataagatcgacctggttattgacacacctccgcagggagctgatcactcaagagacggattcgtgatccgtagaaatgcgattgagacaggtgtcaatgtactgacagcgatcgatacagccaaggctctgatcaccagtctggagaatacagatatccagaagctgacactgattgatattgccaaaattaaataaagaaaattagaagtggcatacagcattcgtatttgcggtatgccgcttttttttgttaccagatatcgacagaacctgccattgacagtttttcgaacatatggcagttataaaatcaaaaaattaaaaatatatgatcatttatctcatgtaatacgttctatatataggggacgcccttaggaggaagaattttgatgcgtgaaaatgaattacttaggaagatagcaaaaggtgaaacagaatactgggaagaattgatcgggatgtattacgaagatatcctccgttattgtatctaccatgcgccagataagacggcggcagaagacgcggtacaggagacatttctgaaagtgatccggtatatgcctaactacagacaccgggggaagttcagggcattcttatataaggtcgctgcgaatacctgcaaagaccagtggaggaaatgtgcaagggaagaatggtttgatacagacagtgaggcatcggatggcgagaaaaagctgtctgaagaaatgatctatctggaaaccggttatgcaaagacagaaggtaatatcaatttcctaagactgatccgggagctttcaaaggagcagagagaagtggtatatctaaaatatgcacaggaactttcgtttcgtgaaatcgcagagatactcggaattccggcaagaacggttcagtcaaggctcaggatttcattgaagaaattaagaaaaaaggagggaaagccggatgcgtaggagacgggaaacaatcgaagaggagtatttatataaagcattgcagataagagaatcgctgcaggtaagcgaagagaaaaagtcggaacagattgaaaaaatcatggaaatgagcaaggctgaccgactgagcgagaggaagaaagcccggacaggttttacagaatttctgattcgtcagattccgttcatcggatggaagatgtggagcatacaggcgctggtaatgataactgcgctcatattcttctgtggaacagaccggggggcagtggatatgacatggctgctcacgggaaggcagcttgcgttttgggtcggagcactgggaactgttatggcgatgatcgggatcccttatgtgatgcagtctttccggtatcggatgtatgagatggaaaaagcggcaaagaatggatttgcaaggatgcttttaagcaggatggttgtattgtcagtcggagatctggttactgtcctgttgtgcatgatcatgatcagcagtaagaattatgcatcggccggtatggttctgctgtggtatctggcaccgttattcttgataggaagcttctgcacggggtggatgcagaagatagaagcaaaatttgatatggaagatcagaccttaagatgtatccagatttgtgaaggtgcctgtgtgggacttttgattttgcagtatcttttatacatcaagctgccatctgtgtatggaaatacgggatggtggatcggcattctcgtgattgcggcaggagctatgctgtatcagggaaagaaggttatcatcatacaatcttaaaaatagaaatgaatcacagaagcttttgcaaagaaaggaataaaatatgaaacttgaaatatgtgatgtcagtaaacaatataaggataaatgtgctgttgatcatgcgaacctgacactgacaccgggagtctggggactccttggagctaacggtgcaggcaagacgacgcttatgcggatgattgccgggatcatgaagccgactggcggtgagatccgttatgacgggatcgagatcgacacactgggagaaaaatacagagatatcttcggatatctgccgcaggaattcggattctatccaggattctcggtacaggattatctggaatatatggccgcattaaaaggaatcggcaaaaaagagacgaaggaaaagatacaggaactgctggagattgtatcacttaccgatgtcagaaagaagaagattgtaaaattatccggcggaatgaaacgccgtgtgggaatcgcacaggcattgttgaatgacccgaaagtactcatcttagatgagccgaccagcggtttggatccgggagagagaatgcgtttccgtaatctgttatcggagttcggaaggaacaggattgtattgatctccacacatatcgtgtcggatgtggaatatattgccacctgcaatgcgattatgaaagacgggaagattgcagcagtaggagagacagaagaactggtaaaagaagtcgaaggaaaagtctggaatgcagttcttgatatggcagaggcaatgacttatgagacgaaagttccggtggtgaacatttacaaccgtgaagatggcaagacggtactgcgttatctggcagagcgaccggtcatttcgggatcggaaccggcggatgcaagaatggaagatttgtatctgtggatgttcccggagcagggaaaggaggaagtacgatgagactgtatgtattagaattaaaacgtctgctgaagacgagaagtgtcggtattttgatcattgcggcactgatactttcggcagtgctgtcctatctgccggtaacttatatccaggcttataagacagacaagtcgggaacaatccaggtggtcaccggaatcgaagcgataaaggcaaaaaaagcagacaaaaaagcactgcatggcgagatgacagaagcaaagatccgtgagacaatcgcagatataaaagaagtattgaaagaatacgggtctctggagcggcagaatattccattggacgtatatgtgaaaaaagtatattcgcatctggatatcattgcagtactggaacagacgattattccaaatggaaagaacctgtatacattggagtattcatatatcagtgaagatgatgcgaagaatgtatatactgcataccgggaaaatgttcagaatctgaataaaaatccggaagttcagaagaaaatcaatcagatgacgaaacatatacagataccacttgcttattattcggagtttacaactgatcagctggactattatcaaatctatctgttcctggtaatgatcttcttcatggtgatcataacaccggtatttgcgaccgagtatcagactggatcggatcagattctgcgctgtacgaaacatggaagatttcgtcttgccattacaaagatcgctgtggtatttacattaattttcgcagtatttgcggtcggaacgacagtcttttctattataatgcgtatattatatggcgcggaagtatttaaaaatccattgcagatgcttggatatctgtactatattcctgcatttacagtaggaaaaatgtataaggtcatggttgcgggtgggctgctttcacttgtggcagttggagcgagtatactgttcttttcggcaaaatgcaagacagtacagtcggcactgatctgtgcatttgcaactgcatttgtaccgatggttatttttacaatatcaaacagccggaatattctggagattttaaggtgtatcttcccgaccagcggacttgccttcatgaacagtctggagggagaattgcttgccagaaactttgtacagattggcagtggatattactggacaccatatattattgcgattgcggcggcaatctggattccggtatttctggtcataacggtggtgagttattgtaaaagggaagcttaagaaacagtgaaataacagagaaaaataaataataaaaacgaaaaaaagaactgtgtaatctgtgtgttcaaaaataagtaaataaaaaagttgacaaaacacgatgtacatgatatgataccaatcgttgcttgtaacaaatttgtaatatttgtaataaagttgcaaaaagtgaatatactttattaaaagaaatgtaaatcattgcaacaaaatcaggagggtatttatattatgttaaaagcgaagagactgaaatcaatgttcgtgctgtattcggcatgtgcagtaatggcaactggttttaccagtcaggcagcctctgaacggccggaagtaacaacaatcacagagacaaaaaaggaagatgcgaatacacataccgctgtacagacaatatcacagagtatcgttgcatctgcacaggagatgacagatgcaagccagcaggtgatcgcagaaaatatagcaaaaaaagaagaggaagaacgtattgcaagagaaaaggcagagcaggaagcaagggaacaggcggaacgcgaagcaagagaagcgtacgtaagagcgaatcaggaactaatggcatccatcatctattgcgaagccggtaatcagccatatgaggggcaggttgctgtaggtgcggttattatgaatcgtgtcaagagtgggagctatccgaattccatcgaagaagtcatctaccagtccggacagttcggaccggccacaaccggatggctgaacagagtcagaagttcaaagggatattcacagacggctcttcaggcagctgtagatgcattgaatggatcaaatccaatcggaagctgcctttattttgaccagggaggttccggaatgaagatcggagcgcactatttccattaggattcaaacagaattccaaagaaatcttaagaaagccggaattgacaattgtattacgaatgtattacgataagagggcaaaagtttttaacttttgtcctttattaattgttggggagaagaaagattgtataagattttaatcgtggaagatgatgagacaatagcaggcggtctgaaaaaccatttgggaaaatggaattatcaggcagagtgtatgacagattttaaagacgtgatgggaaaatttgtggactttgatccgcagcttgtgttattggacattgtacttccattttttaatggatttcactggtgtcaggagatccggaagatctcgaaagtgccgatcattttcctgtcatcggcgaatgataatatgaatattgtgatggcaatgaatatgggcggcgatgaattcatcgagaaaccatttgacctgaatgtggtgacggcaaaggtgcaggccgtgttaagaagaacctatgaattccgtggaacggcagatatcatggagtggaatggtgcgatcctgaatctggcagatgcgacagttttgtatcaggatcagaaacaggaactgacgaagaacgaatttaagatcttgcagatgcttctggaaaatacggggaagatcgtaagccgtgaaagtattatgacgagactctgggacagcaatgaatttattgatgacaatacactgacggtcaatgtggcaagacttcgtaaaaaaatggaacagattggccttggtggaaagatcatcacaaaaaaaggaataggatatatggtggaggcatgaaacttttaatagcatttttaaaagataaaacaagagagatcagcctttatgccggaacggtcggaatatttattgttgtagcatttctttataatatcaggatggatgcgttgaaatatgcactgctgctggtgatattgtggctgctcctttatgtaataacggaatatcatcgcttccggaagaagcatcttctgctggaacggtttaagaagagcacgcaggagtgcacaaaagaactttcagagtgcaggaatcttctggaattggattatcaggaattactggggatctttgacgaaaagattctggagttgaaatcagaggcaagaatcaaaggccaggacttaagtgattattatggtatgtgggcgcatcagatcaagacacctatcgctgcgatgcacatattgctgcaatcggtggaagatgaaaacccggcattgccggaattaaaagagatgaagatagaactttttaaaatggaacagtatgtggagatggtgctgacgtatctccgcatggaagatatgtcaggggatctgcagtttgagaaggtatctttagataagattctgaaacaatctgtccggaaatattctcagatgtttatttttcagaagatccgtctggattaccggccggtggaacgaatagttcttacagatgaaaaatggctggagtttgtgatagaacagattttgtctaatgctttgaaatacacaaagaatggcggcgagatcagaatctgtctggaagaaaaaagaggacgggagtgtctggtgatcgaggacaatggaatcggtattcaggcagaagatcttcctagagtatttgaaaaagggtttaccggatataatggaagagcagataagaagtctaccgggattggactgtatctttgcaaaaagatcatggataagatgggacataagatatggattgattcagaggtgggaaaaggaacccgtgtatatctggaattgacaaggaaagaatggaatccggaataacgatcagacaaaaagagaaaaccttacaggaatgtaagattaaacagggggaaatgtcacatgcttcgatggcaggatatttcctctttttttataatagtaccgtaaagaagaaatcttaaaaagaaaggaagaaaaacttatgtcattactggaagtaaaaaatgtgaagaagatatatacgactcgttttgggagcaatcaggtagaggctttaagagatgtgaattttacggtagaacgcggggaatatgttgcaatcatgggagagtctggatcgggaaagacgactttgctgaatattctggcggcacttgataaaccgacagaaggaaaggtttatttaaaagacagggatctgggaaaattaaaagaaaaagagatcgcaacgttcagacgtcagaatctcggctttgtatttcaggattttaacttgttagatacattttcattaaaggataatatattcctgccactggtattatccggaaagaaatatccggagatggaaaagagattaaaaccgattgcagaaaaacttggaattgaaaaactactggagaaatatccatatgaggtgtccggtgggcagaaacaaagagctgcaattgcaagagcgctgatcacgaaaccacagctgattcttgccgatgaaccttcgggagcactggattcgaaagcggcagacagtctgatgaatctttttacaacgattaaccaggaaggtcagacgattgttatggtgacacatagtgtgaaagcggcgagtagtgcgaaaagggtgctttttatcaaggacggaaaagtattccatcagctttacagggggaatcttacgaacgaagaaatgtatgaaagaatttcagatacgctgaagattcttaccacaggaggtgaggaggatgaataatttcatctatgaaaaacttgctgtgaccaatcttaagaataaccgtaagacctatgtaccttatatctttaccggtgttctgactgtcatgatgttctatattattgatgcgctgagcagagggaaaggtattacacaggatacattaaagatatgtctgcagtatgcaacgggtgtgattgttgtatttgcagtgatttttctgttctatacaaatagtttcctgatcaagcgacgaaagaaggagatcggggtatacaatattctgggaatgggaaaacggcatattgcacgaatgatggcggttgagacgatcctgacggctggaatcagtattcttggcggtctggtgtttggaataatatttgggaaactgatgtatctgctgctccttaagattctgcacaatagcgtagatatgcagttttcggtcaatgggactgcaattgtacagactgtcatattatttgcaggaatttttcttctgacgtatttatataacattttacagatacagctggtgaatccggtggaacttctgcacggaggcaatcagggggagaaagagccgaagagcagatggctgcttgtgatcgtcggtgtggcggcacttggcaatggttactggattgcacttacaacagaggcaccgttagaagcacttttgaaattctttgttgcagtggtctgtgtgattattggaacttatgcactttttattgccggaagcattgtggtattgaaaatactccggaaaaataaagcttattattataatccaaagcattttaccagtgtatcaggcatgatctatcgtatgaaacaaaacggagcgggacttgcgaacatctgtgtgttaagtacgatggtgctggttatggtatccacaacggtatctttgtatgcgggaatggaagatatcctggactcacgttttccgagagatgtttcaattgtctgcaaacaggcagatgtggaccatgaagagatcattgaacgtttgctgaaagagcaatgtgaaaaagcaggtgtgaaaataaccgacagagtctggtacagatatggaagtatgaatgcggttctgaagggagataaactggaaaatgtggatcagtattatccggataatcatttctactatgtagagatgatgacacaggatgagtataaccggatagaaaaacggaatgtatcgttagaggaacaggagatactgacctatacctcgaacggcaaatgtgggaaaaaagagataaacattgcaggacggaactatcaggtgaaaaaagaactgtccgagatgacgagtcagccgaagagtacggcagaaatgtacaagacattatatattgtatttgcaaatgcagagcagattgaacgtatcgagtcattttcttatgcagataaattcaacctgaagggagatgacggaaaacaaaaagaggcactggaacagatacagaacgaattttatgaaaagtttccggatggaacgatggaaagccgtatgttaagccgttcttctttttatgaattgtatggcggactgttctttattggaatctatctgggaagtatgtttattatggcaacggtactgatcatttattataaacagatatcggaaggctatgatgacagggagcgttaccagatcatgcagaaggttggcatgagtaaaaaagaagtgaagcgttccattcgaagtcaggtcttaagcgtattcttcctcccgctgattgtagcagtgatccatgttgcagtagcctttaaagtaatgacaaaaattctgggagtattaaatcttacgaatgtatcgttgtttgcggtatgtacaatcattacgatagcagtgtttgcagtattctatatcatcgtttacagcataacagcgaaagaatattaccggattgtgaattaagattaagggtttaccattgactttgtatctttcaggatgtattgttgttttagaatgttttacgaatcaaggaggaacttaaaaatgacaagagaaggcgaaagagaactggtaaaagtggaacatgtaaatggcggagacggttatattgtaagagaagcaatggttacttcggaagaagttggagaagcctgtaagatgtatgccaagattcatctggatccgggatgtgaagtaggataccattatcatcatggtgagacggagtcttacttcattctgaccggacacggaacttatgacgataacggcgaaaaacagccggcaaatcctggcgatctgttcctgtgtaaagacggagatgcacatggaattaagaacaccggtgatgaagaacttacctttatggcattgatcttaaaaaaataacataggaaaatatgaaaaacacctgtctgtaacttggatcatttcaggaatgataccgggccgcagacaggtgtttgtattgccatgcattcggaagaagctgccggtggcaggttctctgtattgattataatgaacggaatacatccagcagccggtcattatcctctggattcataatgcagaaccgtacatattctccgttcaggctttcgaaagaagaacagtcccggatcatgagattctggtgaatcgccttttcaaagacatcgaaagaagtgagtccttcttttaaaatccttacaaggacaaagttggcataagcaggataaatctttacggtatccagtccggaaagctttgtgcacattcgggtgcgctcggaatcaatgagagtccaggtcttcttaatataatcggtatctttcaacatccgttctccggcataagctccgacactgttcaggctccacggattctggtgggtaagaagcgtctgaagaaatgcctgattgcttgtgagcccatagccaaaacgaagccccggtgccgcaaagaatttggatactccacggatgaccataaagttatcgaattccggaaccaggggaacagctgaaagggcggtccctttcggtgcgaattcgatataagtctcatcgatcataacgaagataccaagtgaccggcatacggttaacagctttttcatatcagcggtactgatggctgaagaggtcgggttgttcggattacagatgatcagaagatcaatatcacttttcagtgtatcggtcagatcggaaatatccagtctgaaatcctgttcttctttcagattataatattccagtgtgccgccgaccagattcagctctcttgcatattcggaataggtcggtcccagaagcagcgctctttttggtgcgcgctggctgatcagaagtgagataagctccgtagaaccatttccgacaacaatatgttccggcgaggtattggtatatgcagcaattgcttttttcagatctgtataatctctgtctggataactgctgatgatatccagatgttctgcgagatctttttttacctgtccggataatccgagcgggtttacattggcaccgaacaaaacaatcttttccttatcaaggtgataataatctgcaatcttttccagatcgcttccgtgaaattctggtttttttttcataattttccatcctatcgacacaattttgatattttctctttccggcattgccattcgttgacaaacaatgctataatttattatagtatgttttaagaaaaaagcaacgaaagaagcaggtgtaggacttgaaaaataaaatccaaaaattttcaaaaggcgactttcagttgatacgacctgatgttatattcgatgagaccaatctggtactcattataggtgaaggggaagtatacagaggaagttttacaatgagggcaaacaatgagggaaggatacgaggactggtgtactcgtcttctttccgcgtccattttaaagatcagggatttgagggaaatccggcaagagtggaatttacgtatgacggacggggacttcgtccgggacatgtagaggcaggaaagttcacggtcgtatgtaccggtggtgagtttgaactggcttttacggcaatcattgagaaaccatatgtgatgacaacctatggaaaagtacagagtaccgatgatttccgcaaacttgcaattaaggatttttcagaagcgggaaggctcttccgttccaaagaattctatgagattttaaaatatgagaatgagcgtacattctatctgtacgataatatgcgcaaatggtctctcggagaacaggccatggaagaattcatggtagggatcaaacagaaagaatgcattttccttacgcttcagggagaggggatgctattcgaagatctgacagagtcgacaaagggaacactgactctgatgaaaaatacatggggatatatgccgatccatattgagacagtcggtgattttatccgggtgtccagacctgagatcagcacagaagattttgtgggaaatgcacatgagatcgaatatgtggtaagagcagagaaacttcatggcggacggaattacggagcattgaagttcgtgacaccatatgagacactcacttatgaagttgaggtattgcagaatcaggagtatgacgaagatcacaggatgccggaacttttactggctcagatcatcaaagaatatgtaggatatgtggcaggaagagtgacactggaacactgggtggatagtgcagtcgagaagatggtagcgctgcgtaagctggatcctctgaatgaagtatatcagttgatgcttggtaatatttatctgctcggaggcaagacggaagaagcaaaatggattcttgagaattacaattataatcggttcgcaatcggaaaagatccgctgacaaactgttattatctgtatctgactgcaaagatccgcggagatgtgaactatgaagaacgggtgctggatgaggttggaaagacatatatgcgtcatcaggattcctggtggctgctctatatgatcctgaatcttgacaacagatataagaatccttataaacgtctggaagttctggaacagcagtttgagtatggaatccatgcagtaatgttctatttggaagcatatctgtgctatcaggaaaagccgacacttcttaagaaattaggcacatttgagattcaggtgttaaattttgcgaccaaataccgcatgatgacaaaagaactggcactttatatttcaaattttgccagtcagcagaaaaaatacagtgacaatctgttcagaatcctggaaagaatctataagatgtatgaagagccgatgatactgaatacaatctgtacacttttgatcaaaggaaataaaacggcaaagaagtatttttcatggtatcagaaggcagttgattcggatcttaagattgcccagctttatgaatattatatgatgacaatcgacgaagacagtgcgcacggaccgttgccgaaatcgctggttttatactttatgcatggaaatgctctcgattataagaaggctgcgtatctgtatgcaagtcttgtgacccatgaggaacaggcaggagatctgtatctgaattacagagaacagatggtggcatttacatgggaacagttggcaaagcgccacataacagaatcactgcgtacattgtacaaaagattttgcagagaagacgagatgacggcagaacgtatggaggcgatgcgtgacatctgttattcttatgaagtaaggacaaaggtacgcgggatgaaatgtgtgctggtaattgaaaaagatggttcggtacgtcagcgtatcccgtatgatacgaagaatggagctatcatttatctgtatgataaggaatcgagaattgtatgggagtctgtagagggcagacattatacggattccattccatatgagacgaaaagactgttttatgagccgcgttttgtagatatgtgcagaaaatatgcagcatctacaggattctggaatcaggagccggagaaagaaaaaccggattatgaaaagatccaggcaaaggggatagattcatttgaggataaggatgtcttcctggtttgcagcagaagaatcagggaagaaaattatacggaggatgacttcttaagttatcttgcttttgaaatgttccggagaggacagtatgacaaggtgacacttacgtatcttgcggagtattactgtggcgcaatcggagatatgaagcggctctggaaagtattaaaacaatatggggttccatcttataaggtcagtgaacggatcattacacagatggtcttttcggagacattgtatgaggaagagcatatttttgaagattattatctgtcggacaatgtatattttcgcttaaaacaggcatatcttgcttacgttacaagggaatatatcgtatatggacgaagcctggaaaaatgtgtatttgaaatcattgcaaatgaatgtgatcagaaagaagatctgccagatgtatgtaagattgcacttctgaaatattattcagataaagaatacacaggtgaactggaagatgtccttcatcaggtactacgggaaatgtgcgaaaaacaactagtcttcccatattacatgaattataaagaggaatggctgcgggaagtacaactctataataaggtgatggcagcgtaccgctgtaaaccgggaggaaaagtaagactgtactataagatgaaacaaaaagaccgggaagaactgggataccgggcagaggcaatgatgccggtctatgaaaacctgtatgtaaaacaatttgtcctttataatgatgaatcagtgaattattatttccaggaatccggaaacggagaaatgatcacaacagacaagaagacgctgaaaacagataaagaacgtgtatttgccggaaaatatcagatgctgaatgcaatgacagatatggattcggatgcggaacgttcgaaagccatgcttgagtttgaagaagaagaacagatggcagatcagatatttaagatatattaaaatgaaaggaggagacgataatgcaaaaaggaagtgttctgggctatgatctgaatgaaaagaattgtcagatcagttattatgatgaaaataaagaagaaccggaaacgatggaagcagcagttgataattatcagattcctctgatccttggctattataaagaacgatgggtatatggacaggaagcaaaacgattgagagaagcgggagagggagatattgtcactcatctgttccgtaaagctgtaaaaagaaaaaaagtacgtgtaggcgggaaaatccatgatggcgtatggcttcttgcaaagttcatttccatgacattgaagaaattcgaacagattgattatattacgttttccgttccgtatacgaatgttgatatgtcgaagatgttaaagggaatcggaaaatatatcggtgtaccgggagaatgtgtatttgtacaggattataaggaaagcttctgtcagtatatgttttatcagccgaaagaattgtggcaatatgaatcagcattgttttattgtgatgcgcaggaaatccgtgcatatatgctgcgccgcctgaatacagtaagcaccaagagcagggatatgtttgtgacagtagaagaagtcgccaatgcgcacatgaaagaactggaagcaatctatcctgtgttgaatgtagataaagccaaagatgcggatgagagttttaagtctttcatccagaatgtatttgataaaaaagtggtatcgtctgtttatctgacaggagagggatttgagaataactggtatccgaattccctgaaggtactgtgtaacggacggagggctttccttggaaataacttatacagtaagggtgcatgttattcatccatgcgctatgcagatccgtatgatgatggtccgatttatctggatggaacaaagatgacagaacagatctgcctgcgtatgagaattggcggacaggaaggatggtatccgattgttgcatggggaacacactggtatgaggcagacggacagtgggaagtgattttggaagatacatcggatattgagatccatatagagacacttgacggagaggatcttaaagttgagacagtgtcactggaagaactgccggaacgaacagattattctttgcgtcttcagattgaagtcatgtttatggatgagcgtacctgcaggctgcgttttaaagatgttggtttcggagaattttatccggcatcagatttccttgtagaaaaggaattacatttaggaggtatcaatgggcagtttaattctttgtcataaaaaacgggccaaacgaccttttgaaatatccagagttcatatgcggatttacacgatagaagaattgtgttattacatctgtaataatctgtatctgatcgattatacgatcgtcaatgaacgattgtgccggtgggtcggggatgaactggaactgccgaagctggcagaggaattaagaaggcttcttcgggagaatggatcgatggaagaatttgtacttacgatcctgaaggaatctaatatctatgctgcggcagaaattcataagatgcagagtgttctggaacaactgcagtcacagagagacgtagaaaaagaaaaatataaggcggatacgcttcaaaacagtaaagaatacgaatcagcgattttagtatatcagtccatccttaacaaagactgggatgaatcggtagataaaaagttttacggtcgtgtgtatgcaagcatgggatccgcatatggtcatcagttcctgtataaagaagcggcaaaggcttatcaggaagcgtataagatatgtgaacagcctgatatattgaaggcgtatctttatagctgttataaagctcttccgcatgatgaatacttaaaaatgctgtcggggaatccaatccttctgagtctggacaccgttttgcgtgatgaaatggaaaaaacaaagaaaaagataggtgcggatattccggaagaaaagctgaatgaatggaaaaaggagtaccgcaggattgacaaacaccgtggaatatgataatatatccaaagattttagtgtggtaaagtaatcaactgctaaactggtaaaagagcgtagcggctgtttggcacacgtaaaaggaatacaggaggatatatgttatgaaaaagagattagtactgctccttgttacggcaatggcagctacaacggtattggcaggctgtggaagtaaagattcaggttcatctgacagtggaaagaaatcggcaaaagaatcaaaagtagaaaatgatgatgacacattgatcgttgggtttgatgcttctttccctccgtatggttataaagatgatagcggagaatatgtaggattcgatcttgatcttgcacaggaagtatgtgatagaaatgattggaaactggtaaaacagccgatagactgggattctaaggatgcggaactaaattcggaaacaattgactgtatctggaatggattcactatgaatggccgtgaagatgattatacatggtcagatccatatattgacaacaagcaggtcgtggtagtcagaagtgattcgggtattgatgacttttcggggctgaaaggaaaacatgtagaagtacagacagactcttctgcacttgcggctctggaaggagatcagaaggacctggcggcaaccttcgcagatcttaatcaggttgcagaatacaatacagcattcatggatttggaatccggtgcatgtgatgcaatcgctatggacatcggagttgcaaactatcaggtgaattcaaggaaaaatccggatgattacaagatcctagacaaagaaatttcatctgaacagtatgcagtcggattcaaaaaaggaaacacagagctgaaagataaagttcagaagacactggatgagatggccgaagatggaacggttgataaaattgcagaaaaatatgcagattacggagttccgggagctctttgcataggaaagaacagcaagtaaaatgaaggggccaaccccggaggggattggtcccttttggctcgccattcattcggaagaagcgtgaaaaaactggaggacattatagatggagataggaacactgataagagaacttggcggaggaatgtgggtctcggcagagatatttattctgacattacttttttcgctgccgcttggactggtggttgcattcgggagaatgtcgaagattgcaccggtcagatggatatcaaaattatacatatcgattatgagaggaaccccgctgatgcttcagttgatggtagtgtatttcggaccatattatctgtttggaatgcgcatttccacaggataccgtatgactgcggtgctgatcggttttgcaattaattatgcggcatattttgctgagatatacagaggcgggattgaggcaattccggtaggacagtatgaagcggcaaaggtactgggatattccaaaagccagacatttttccggatcgtatttcctcaggtatgtaagcatattctgccggcagtgaccaatgagatcatcacgctggtaaaggacacttcactggcatttgtgctggctgtaacggagatgtttacaatggcaaaacagattgcggcggcacagacttccatggttccgtatattgcagcaggtatcttctattatgtatttaatttgcttgttgcgatgattatggaaaagattgaagaaaagttgaattattaccactaggaggaatagatcatgagtctgcttgaaatgaaaaatatcaaaaaaaattttaacggggtcgaagttctgaaagacatttctctgaaggtggaaaagggagaagtccttggtatcatcggtccttccggctcgggaaaatcaacccttcttcgatgtgcaacggggcttgagactgcggatgcaggggaaatccattattccggaacctttggactggtgtttcagaattttaatttgtttccgcattattcggtgatgaagaatatcactgatgcaccgctgaaagtacagaagagaaagaaagaagaagtctataaagaagcgagagaacttttgaagaagatgggacttgccgacaaggaagattcatatccttgtcagttgtcgggaggacagcagcagcgtgtatcaatcgcgagagcacttgcactgcatccggatattctgttttttgatgagccgacgtccgcgctggatccggaactgactgcagagatcctgaaagttatcagggaacttgcgatggagcatatgacgatggtgattgttacgcatgagatgaattttgcgagaaacgtatcggatcatgtaatcttcatggatggaggtgtgatcgcagtagaaggaactccggaagaagtattcgattcatctaatgaaagaatgaaagaatttctcggaaaattcaatgattaaccgcgggaaaactaatgaatagagctggattataagctatgcttattaaacgacgcgttataaataatgtatcagcaggaatacaaggtagatggaaatattgcttttccgtttgccttgtattatactgatatagcaaaatgctttttaaagacagttttgacaaatgaaaaatttgaaaagaatggagtctgcatttatgagtgaatttgaaaaagtaacaacaggactgggtgaagaatgcggtgtgtttggagcctatgatatggatggcggagatgttgcaccatccgtttattatggactttttgcattgcagcacagaggacaggaaagctgtggtattgcggtaacggatacatatggagaaagaaaagtacattccaagaaaggacttggactggtaaatgaagtgttcgatgaagagtctttacaggaattgaagggaaatcttggtgtcggacatgtaagatattcgacagcaggtgcttccagagctgagaatgcgatgccgttggttatcaattatgtgaaagggatccttgcaattgcacataacggcaatctgacaaatgccattgaacttcgccatgaactggagtacacaggcgctattttccagacaacgattgactcggaggtgatcgcatatcatatcgccagagaacgtctgaatgtagagaaggcagaagatgcggtaaaaaatgcgatgaagaagatacagggagcgtatgcactggttgtcagttcgccgagaaagatgatcggtgccagagatccatttggattgaaacctctttgtattggaaaaagagataatacttatttcctggcttcggagagctgtgcgattgctgccgtcggaggagaatttgtaagagacgtagagcctggagagattgtaagttttacaaaacatggaatgaaatcagataaaactatggcaatcgatcccaaaaagcaggcaagatgtatttttgaatatatatatttcgcaagaatggacagcgtgatcgatgatgtgaatgtatatcatgcgagaattgttgcagggaaagctctggcagaatcttatccggttgatgcggatctggttgtcggagtaccggattccgggctggttgcggcgaaaggatattcggaacagtcgggaattccgtatggcatggcattccacaagaacagttatgtcggaagaacatttatcaagccaaaacagagtcagcgggaaagcagtgtgaagatcaagctgaacgtgatcgaagaggttgtaaagggaaaacgtattgttatggtagatgattctattgtacgaggaacaacctgtgcgaacattatcaagatgctcaaaaaggccggagcgaaagaggtacatgtaaggatcagttcaccaccgttcctgcatccatgctatttcggaacagatgtgccttcgaatgaacaactgattgcgcattcccatacaacagagcagatccgtgagatgatcggggcagattcgcttggttatatggaagttgataaattaaaaaacatggtcggtgatctggcatattgtgacgcatgcttcaccggtaattatccgatggaagtacctggaagagatgtttcgctggcatttgaatagaaaacaggttaaaatagtcgggtggaagaattgacgaaggagattattagtatgagtaatgacagatatacaagtccactttcagaaagatatgcaagcaaagagatgcagtatattttctcaccggataagaaattccgtacatggagaaaactctggatcgcacttgctgagacggaaaaagaactgggactggatattacggaagaacagattgaagaattaaaagcacatgcagatgatatcaattatgatgtggcaaaagaaagagaaaaggttgtccgtcatgatgttatgtctcatgtgtatgcatatggaaaacagtgtccgaatgcaaaaggaatcattcatcttggtgcaacttcatgctatgtaggcgataatacagatattattctgatgtcggaagcattggaaattgtcagaaagaaactgatcaatgtgattgccgaacttgcaaagtttgcagatgcacataagaaccttccgacacttgcatttacacattttcagcctgcacagcctacaacagtaggtaagagagcaacactctggatgcaggaattcatgatggatctggaagacctggaatatgtaaaaggaagtttaaagcttctcggatcaaaaggaacgaccggaacacaggcaagcttcctggaactctttgacggagatcaggagacgattgataagatcgatccgatgatcgccaaaaagatgggatttgagacatgttatccggtgtctggtcagacctattcacgtaaggtagataccagagtggtaaatgtacttgcaggtattgcggcaagtgcacataagatgtccaatgatatccgtctccttcagcatctgaaagagattgaagaaccatttgagaagactcagattggatcttctgcaatggcatataagagaaacccgatgagaagtgaaagaatcgcttcactttccagatatgtgatggtagatgccatgaacccggcaatcacatccgcaacacaatggtttgagagaacacttgatgattctgcgaacaaacgtctcagtgtccctgaaggatttctggcaattgatggtatcctggatctgtgtctgaatgttgtagacggactggtagtatacccgaaagttatcgaaaagagactgatgtcagaacttccgttcatggcaacagaaaatatcatgatggatgctgtaaaagcaggtggggacagacaggaacttcatgagagaatccgtgagctgtctatggaagccggacgcaatgtcaaagaaaaaggattagacaacaatcttcttgaactgattgccgcagatcctgcattcaacctttcgcttgaagaactgcagaagacaatggatcctgcaaaatatgtgggacgtgcgccggttcaggttgatgcatatctgaagaacgttgtgaatccggtgctggaagcaaataaggatattcttggagtaacagcagaaatcaatgtataagattctgtaacagacaaaaatgtgaaaaagaaagtggagtttcagtgaacaatggaacatcactttcttttcttgtatatgtgatttataatgaatccatatggaagtgtaagggggaagaaagcggatatatggaaaagactatggaaaagattaggactatgatgaatggtgcaacatcagaaaagcaataccgggtcagaagctgcagatacacagaccttgtaatgatacttgtgatcgtagttgcgctacagtgtctgacaaggctggaatatgcaggggaaagatttatccaaagccggaacgggtataagatagccggcagtacaatgaaaagctgcggacaggaaactgtaaaaggatatgtggaaataaaagcattgtgcatttcaaacgcgaagaatatagccggaagcttgtgtgctcaggctgcgacaccgaatgaaacagctatgaatgtgaccattccaacagctgatgcgggaaaagatgacagccggaatacaaagctgcctgctgcagaagaaatgaacacatctgctttggaaggtggagcggagatcctgaaaacagaaaagagtgcgggagctgcacctgttgtggcagatacaacagctgccgggtctgcagccgagagcagtgaagaggacaggggcagtacagaagaacagcagggcgaaatgctggaacttggtggatttatcataggagaaaatggcttgatcgaacgttgtgagaatccgtctctggctgccgaggatggaattattatattgccgtcagacgacagatgtaaggggatcggagcagaagcattaactggaattacgggagtggaagaaatctatattccggccaatattacatggattgaacccggagccctggaaaaactggaaaatcttatgtatatagaggttgcaccggacaatccggcatatcaaagcatagatggagttctttacagcaaaaaggagcagaaagaaaaggcatgaatattcgacaggtaacagacggcaaagaagattatatagaattgcttcgtatgggagatccggatgaatccagaatccgtaaagtattggaagaaggtgaactctttttacttgaagagcatggaaaactccgtacattgtgcgtggttatattttcggaagaaaagaaatgtgagataaaaaatattgtaaccatagaaaaagaccgtggcaaggggtatggccggtatatgatccattatatctgtgaacattactgctcacagtatgactggggatatatgaaaaaagaccgatgccgggacatcatggaattctgtgaaaaatgtggattcacagatgaagatgaggtatatctgaaaaaggaactgatgtcggaaatcgacacaaaacgtgtaattaatcttgcaatggaagcaggaagaatgcttttgaaaaacggaggcgagatctttcgtgtagaagagacgatgatgagaatctgtcgtagattcggggtgaaatatgtggagctgtttactttgagtcatggattgtttatctgtgcaggaacggataaagaaaagttgtatacaaaagtaaaacaggtaccgctttcctctacacatcttggaatagtagcagaagtaaatgatctgtcccgggaaattgcagcaggacatgtcggaattgaagaagcaataaagaagttaaagaagatcgacaagatgccggtcaagcgtattccttatcagatagcggcggcgggattaagcgccggtggattgggttatctgcttggcggaacatcaatggaagcatttgtggcattttttgtcggctgtgttgtgttttcatggtcactttttgccggaaaacacggtgtttcaaagatcctggttcacattgtaggcgggatcattattgcctctatggctttggcagcaatgcagattccgcttttaggggaacttaggatggaagggatcgtgaccggcgggattatgccgctggtgcccggacttgcatttgtgaatgcgatccgtgatctggcggacagtgattatcttgcaggtacagttaaaatgattgatgcgattatggtatttgtctatattgcaatcggtgtgggaacggcattgtcggtatatcatcatgtgttaggaggcattttataatgatcataaaaattatagcaaatctggcatgttcatttatcgggacgattgcatatgcggttatgtttcaggtgccgagaaggttctatatcggatgcggaatcaccggatcggtgggatggatgatgtacaagtttgcgtctgtatattgttcggttgcagctgcgtcctttgtaggaacggtatgtgctgtattggttgcgagaatgctgacggtccgcctgaaatgtccgatcactatctttatgatttcgggtatcattacactggtgccgggagctggcatctattttacagcgtattatctggtgacaaatcagtttgcaatggctgctgcgaaagggatcggagcaataaaagtagcttttgggattgtgcttggaattgtctgcattgtatctgtcccgagagaagtgttccagaaagaatactgggttgaaagaaagattgcaaaacaacagaaaaatggaaagaggaatccggtaaatcttccgggtgaaagacacagatgaaagatctgatataaaaggttgctgtccgccttggatttgtgctacaatgtagagacagatagtgttctaatgtatgtagcaatacatagatttcatacatttcaaaataataatgaaacaggagataatgacagttatgagtaaggtaagaacaagatttgcaccaagtcctacaggaagaatgcatgtaggaaacttaagaacagcgctgtatacttatttgatcgcaaaacatgaagatggagattttatcctccggattgaagatacagaccaggaacgttttgtagagggtgcactggatatcatttatcgtacattgaaagagaccgggctggttcatgatgagggtccggataaagatggcggggtaggaccgtatgtgcagagtgaacggaatgcacagggactttatttgaaatatgcagaacagctgatcgaacagggggatgcttactactgcttttgtgacaaagaacgtctggaatctttgaaaagcaaagtgtctgacgaggatggcggaacagagattgttgtatatgacaagcattgtctgcatttaagtaaagaagagattgaagcgaaccttgcagcaggaaaaccgcatgtaatccgttttaacatgccaacagaaggaactactacattccacgatgagatatatggcgatatcacagttccgaatgaagaactcgatgacctgattttgatcaaatcagatggatacccgacttacaacttcgcaaatgttgtcgatgatcatctgatgggaatcacacatgttgtacgtggtaatgagtatctgtcatctgcaccaaaatataacaagatttatgaagcattcggatgggatgtgccgatatatgtacattgcccgctgatcacagatgaaaaccataagaaactcagcaaacgctgtggacattcttcttatgaagatctgatcgagcagggatttgtgacagaggcagttgttaattatgtagcactgcttggttggtcgccggaaggcaatcaggagatattctcactggaagagctggtaaaggaatttgacttccaccgcatgaataaatcaccggctgtatttgatcttggcaaattaaaatggatgaacggtgaatatatcaaagctatggattttgataagttctatgaaagagcggaagggtatattcgcaaagttattacaaaagattatgacctgaagaaaatcgcagcattggtaaaatcacgaattgagatctttccggatattgcagagcagatcgacttttttgaagcaataccggaatatgatacagcaatgtattgccataagaagatgaaaaccaatgaagaaaattcactggaagtattaagagaagttcttccacttctggaagcacaggaagactatagtaatgatgcactgtttgcgcttcttaagagttatgttgacgagaagggtgtaaaagtcggttatgtaatgtggccaatccgtaccgctgtatcaggaaagcagagtacaccgggtggagccacagagattatggagattcttggaaaagaagaatctgtaaaacgaatcaaagacggaattgaattattaagcaagtaaggggattctatgagtttaaatcatgctcagacagaggcagtcgcccataatgaaggaccatgtatggttctcgccggccccggttcggggaaaactctaaccattgcaaagagaatagaatatctgatcatgaagtataaggtaaggccagaagaaattctggtcattacctttactaagtatgcagctcaggagatgaaagaaagaaccagacggatctgtggtccgtcttcttatgctgttacattcggaacgtttcacggaatctattacggaatcctgaaatgggcgtaccgtctggaaccatcgaatctccttacggatgaagaaaaataccggatgttaagaactcttctgccaaaagtcggatgggatcaggagccggaaacggatgaagaaaaagactatttgcaggaactggccgcagaaattggaaatgtaaagaataattgtatggctattgaagcctatgaaccggtaaaatatacaacagaaaaattccgtgcactatacaaagattatgaagaagaaaagaaaaaatgccggaagattgattttgaggatatgttgatccagtgcagggatctgttttttaattatccggatattctgaaaaaatggcaggataaatttcggtatattctggtagatgagttccaggatgtgaatcaggcacagtatgatgtggtccgtatgctggctgaaccgcagaataatctgtttgtagtgggggatgatgatcagtcggtatatggatttcgtggagcaaagccgggaatcatgatggaatttatgaaagattatccaaaggccaagagggtacttttggatattaattaccgcagcagtgcttatattgtcaatggtgctttaagagtgatcggtaataataaaatccggtttgaaaaaaagatcgaagcgtttcagaaagcagatgaaacagttcatgttcaggaagtaaaagaccctgtgcaggaggcagaatatgtgctgggaaaaataaaggaatgtcaggaaaaaggtattgcttatacagatatagctgtgttgtaccggacgaatgtagatgcaagggcaatgtcggaacttatgatggaatatcagattccgttcgtgatgaaagaacatctgaataatatttacgaacattttattgcacaggatatcagcagttattttcacctttcacagggggaatatagccggaaatattttttgcagatcgcaaaccggccaaacaggtttttctcaagggatagtatgaaaggcggaacagttacctatgattcgctcagagaatattaccgggataaaaactggatgagggacagagtggatcagctggaatgggacatgaagatgataaaagacaaaacaccatatgcagcaatccaatatatccggaaacatatgggttatgatgagtttttaaaagactatgcggcatatcggaagatttcagtggaagatctttttgcggtgttggaagagatatggcagaattccaaaggatatagaacgatcggtgactggtttgaacatgtagaacgatacggggaaatattaaaggagcagaattgtaaaaaaaatgcggcagagggtgtgaatctgatgacaatgcatgcggcaaaagggctggaatttgatacggtatttgtgatcgaggcagatgagggcagcagtccgtataagaaagcagtgacggatgaggaaatcgaagaagagagacggcttttttatgtagcaatgaccagagcgaagagaaaactgatcatcagttatgtaaaagaaaaaaacgggaaagatatgactccttcccgttttgtgtccgaattactcttcgacgtctgattcatcaaattcctgagaatccatccattcatcaaaagcatcagcggcaatttcgtattcgtcatcatcttcgatgttgccgagatctggttcgccgtcctcggtttcattgtattgatagagataaacatcaccggcttcattaggttcaagattctcatccagaggaagcagggcaatgtattctttgcctgcagcttcatatactgtgaggattgcacattcaatgatctcatcgttatcgagtgtaagctctacggttgtgtagctttcagtttcctttgtgtcgctcatatcatagtctcctttactaacattaaaacttatcttaactttaacaaagaaacggataaaaagcaagatgatagtagtcaaacaggtaaaaatgttgtagaatgtagctgtatgtaacgcaataataaggaggaataacaacatgatgaagaagagaatgttaggagtgattgcagtattactcgtatgcattttcgcattatctgcatgcaagaaagaggctggaaagccggtggataatgcagtcagtgagaatacaacagatgattcagaggatacggatcagacagaagacgcaggaaagtacaagtttgggttctctgtgattgatatgcagaatccatattttataacattggaagaagctgcacaacagatcgtagaaaaagaagaatgtaccatgttggtaaaagatccggcatctgatgcggatacacaggcagagcagatcagggagatgatcaatgaggggatcaatgcaattttcctttgcccggtcgattgggagaagattacaccttcgcttcaggcattgcaggacgcaggggtaaaaattattaatattgattcacaggtaaaagacacagattatattgatgcatatgtgggctctgataatacagaggcagggaagctttgtggcaatgatctgattgaaaagtatccggatggcggtacagttgcaatcctggaggctacgacacagaattcggtgaatgaccgtattacagggtttgagcaggcagttgccaaggcggaaaaagggtttgaagttgtagcgagagaagatacaaacggaacatttgacagtgcgctggaagcagccaagaagattttggaggaacaaccggatgtgacggcaatcatgtgtggaaacgaccagatggctgttgcagcaaagacagcactgaatcttgcgaataatgatcagactgttgtctacagtgtagatggttcgcctgatattaagaaggaattaatgaaagcggatagtcagatcgcagggacagtcgcacagtctccgatcaatatcgggaaaaaagcagtagatattgcattgaatgttcttgacggaaaagattttgaagcggagacggcaatagacgtatttatgattaataaagataatgttgaaatgtatggcgcagacggatggcaataggcgcagacgggcaacgggaaggacataacagagatgagagaggttcaaggatatccattaccactgggagtgcagataagtaaagacagggttaatttttccattgcagttccggcagataaggactgtcaactgttattataccgcacagggagaaagaaaccgtgcaggcagtttgatatgaaaccaatgatcggtgaagtgaggtgtatagcacttgaggatatcgagccgggagattatgaatacaattatctgatcaataaagaagttgtaactgatccgtacgtaaaagcaattgccggcaaagaacgctggggtgtaaaaaaggaactgtcagaacatgagatccggggacggctgcagatgagtgattatgactgggaaggagatcatacattacagataccatatcatcaggtaatagcgtacagtctgcatatacgcggatttacaagacatccatcatcaaaagtaaaggcgaaaggaacttttcagggagtaattgaaaaactggaatatctgaaagatcttgggattaaccagatccattgtatgccggtatatgaatttgaagaatgccagatatatagaaattactggggatacggtgcgggaagctattttgcacccaaaagcgcatattctgcagatggagacggagctagaggactgaaagatatggtgaaggcttgtcatcggtccggaatagaggtcgttctggagatgccattctgcacggctgcagataagatgatgatgttagaatgtctgaggtattatgttatggaataccatatagatggatttatattgaatccgtttgtggtttcgatggagagtgtgcatgcggatccgtttttgaaaaacaccaagattatggaacacgagttgggattccagacagtcatgcgaagatttctgaaaggtgacgaagggatgatccatgacgtgatctactggctgaaacaccattcaaaagagcagggaatctttaactacattactgatcagaatggatttaccctgaatgatctggtgtcttacgatgcgaaacacaatgaggagaatggtgaacataatcaggatggaccggattataattatagctggaactgcggggcggaaggaccgagcaggaaaaaggcagtaatggaactgcggaatcatcagatatttaatgcatttttcctgctctttctggcacagggaactccgtgtatgcttgcaggagatgagtttggaaattctcagaaaggtaataataatgtatactgtcaggataatccgataggatggacagattggcggggactggaaaagaagaaagaactgcatgattttgtaaaagaactgattgcattccgtaaatcgcatccgattctcacaccggagcgagaactgcaggggatagatcttagctgttgcggtgtgccggatgtatcttatcacggggaagaggcgtggcagataccgggggaggtgtcgagcaggcaattgggcgtatattacagtggagcacagacaaaaagcgaggactgttatgttgcatataatatgcattggctggaacatgtatttgcactgccggctttaccaaagggatatggctggtatgtgaaagcgacgacggaacgggggatgttagatgtgccggtgcttttgaaagatcagagaaaattagagttaaaagagcggtcggttacagtgcttacagcagaacggattgtggaggttgaaacgaagaaaaatgaaaacattacaacacttacagacgatcaatcatcataaatatcttgttatgaaggaatgctttaaagtaggactttacagacagggacttcttcatgacctgtccaaatattcaccgacagaatttttagttggatgcaggtattaccagggaaatagaagtccgaataatgctgaacgggaggcaacgggttattctaaggcatggttacatcataaaggacgtaacaaacatcattatgaatattggatcgattatagtgtagatccgggggaaggtatcataggccttaagatgccgcttcaatatgttgtggagatgttcatggatcgtattgcggcatctaagacatatcagggggacgcatacagagacagtcatccattggagtattatgagaagggagccgggcgacttggaaaaatgatccatccggatacagcaggccttctgcacgaattgttgaaaatgctggcagaagagggagaggaaaaaactttccggtatattaagagagtccttctgaaacagaagaaatattaacagtttatgcaatagttcaaaaaaataaaaaaattcaaaaaaactgttgacacaataacaatttcgatgtattatatatcttgtcttcgcgagagagcaaagatgaatgcggaagtgtcggaactggcagacgagcaagactaaggatcttgtaagcattgcgcttgtgtgggttcaagtcccatcttccgcattcatctaaaagatggaaacccttgatttgttttgggtttcttatttttttacatactaataattttttttgattaacgataaggaattttaataaaaaagagaaaaattaaaggaaatcaaaaagttttgtcgaataataataatgaggagattcaaaatgtattattctgatgagattatcgaagaagtaagatcaagaaatgatattgtagatgtaatatctacttatgtaaaactgcagaaaaaaggcagctcatattttggcctgtgtccgtttcacaatgaaaagtctccgtctttttctgtcagcaggcagaagcagatgtattattgttttggatgcggtgccggaggaaatgtatttacatttttgatggagtatgagaattatacatttgttgaggcactgaaatatctggcagacagagcaggggtagaacttccggaggaagaatactcgaaagaggcaaaagaacgtgcggatacaagggcaattcttttggaaatcaacaaagctgcagcacaatattattacgtgcagcttaagagcagtcaaggagccgtaggacttggatattttaagaaaagacagctcagtgacgagacgatcaaggcatttggtctgggttattcgaataagtacagtgatgatctgtaccgttacttgaagtcgaaaggatataaggatgacatgattgccaaagcaggactgatcagtattgatgaaaagaatggtgtgtatgataagttctggaaccgtgtgatgtttccgattatggatgtcaatagcagggtaatcggatttggtggtcgtgtgatgggagatgcaaaaccaaaatatctgaattcaccggaaacaatggtttttgataagagccggaatttgtatggattgaacagggcaagacgtaccaagaagccatatttccttttgtgtgaaggatatatggatgtgatttcacttcaccaggcagggttcaccaatgctgttgcgtcattgggaactgcgctgacaccgggacatgctgcactgatccgcagatatgtacaggaagtgtatctgacctatgacagtgacggagccggtacaagagcagcattaagagccatgccgattttaagagatgcagggattactgctaagatcataaggatggaaccgtataaagatccggatgaatttattaagaatttgggagcagagaaattcgaagaacggattgcaagtgcgagaaatgtatttatgtacagtctggaagtgctggagaaggagtatgatatgaattcgccagaaggaaagacagagtttatgaaagaaacggcgagaaggctgacacagtttgaagaagagattgaacgcaataactacatagaagcagtggcgaaagcctatcatgtcggatttgaagatctcaggaaactggttggaaagatggcggtacaggcaggacttgcaaaaccggttgaaagacccagggagatacagaataacaggaagaataaaaaagaagatggaattctggtatctcagaaaatactgctcacatggctgattgaaagtgaagatatctttcgacagattgaaaagtatattacaccggaagatttttcggaagggcttttccggcaagtggcagaacttttatatgaacaatatgaaaagcatgaggttaatccggctcagatcatgaatcactttacagatgaagaggaacatcggcaagtggcaggtctgttccatacgaagatcaaagaactgacaactgtgaaagaacaggaaaaggcattgcaggagacaattctacgggtcaaagattacagtattgaagaagcgacgaagaatctggatcctacagacattcagggactgcagcgcctgatgaatgaaaaaagaaaaatgcaggatctgcggacactgcatatttccattaattaaggataaaatataaacaagcaatgagaggatggacactacatggacgaaaatatcgtaaaattccaggaaaagttaagagaacttgtatcacttggaaagaagaaaaaaggaatcctggagattcaggaaatcaatgattttttctctgatatggaacttgattctgatcagatggaaaaagtattcgattacctggaagcaaataatgttgatgtgctcagaatcagtaatgatgacgatgatataccggatgatattgtgatgtcagacgaagatgatattgatgtggagaaaatcgacctttcggtgccggatggaatcagcattgaagatccggtccgtatgtacctgaaagagattggtaaagtaccgcttctgtcagcagatgaagaagtagaacttgccaagagaatggcagagggcgatgaagaagcaaagaaaagactggcggaagcgaatttgcgtctggttgtaagtattgcaaagcgttatgttggacgtggtatgttattcctggatctgattcaggaaggaaacctgggtctgattaaagcagtagaaaaatttgattatcacaaaggttttaaattcagtacttatgctacgtggtggatcagacaggctattacgagagcaatcgcagatcaggcaagaacaatccgtattccggttcatatggtagagacgatcaataaattgattcgtgtatccagacagttgttgcaggaattaggacgtgaacctacgccggaagagattgcggcagaattagatatgccggtagaaagagtaagagagattttgaaaatttcacaggaaccggtatcattggagactccgatcggtgaagaagaagacagtcatctcggagactttattcaggatgataacgtgccggtaccggcagaagcggcagctcagacacttttgaaagagcagttggatgaagttctggatactctgactgagagggaacagaaagtattgagattaagattcggtatgaacgatggacgtgcacgtacactggaggaagtaggaaaagaattcgatgttacccgtgaacgtatccgtcagattgaggcaaaagcacttcgcaagctgcgtcatccaagccggagcagaaaattaagagattatttagattaagaaaagaggcgcctatggaactatcaaagagactgcaggcagttgcagatctggtgacagagggcgcttctgttgcagatattggtacagatcacggctatattcctatttacctgatagaacatcatatagcggagaaagtgatcgcactggatatcaacagaggtcccttggagagagccagaatgcatatagtcggccatggactgaaagaaaagatagaaaccagactttcggacggattggaaaaagtccttccgggagaagtggatacgatgattgctgccggcatgggcggcggtctggtgataaaaatcctgatggaaggaagaacggtagcagatgcgctggatacaatgatcctgcagccacagtcggagattggaaaagtcagacgatttttgaatgaacatcggcttcagatcatagaggagaatatggtagaagaagatgggaaattttatccgatgatgaaagtcatacatggagaaaaagaagagtatactgtatgtgaatatacatatggaaaatgtctgctgaaacagaggcatccggtactcaagaaatatctggacagggagatggcaattaaggagcatgtattcgggcagctttttaaacatcagaacagtgaaagtgctgccagaagaatggaagaactgaaaaaggagatcatactgacgcaagaggcattgaagtattacgagtagaagaaagggagtatgtaagatgttgtgtagagatgtaatgaatgtaattgaaaaagaatatccgctgaattacgcactttcatgggataatgtcggacttctggtggggagagacgataaagaagtgaaaaaaatatatatcgcactggatgcaacagatgaagtaatagatgaagcggttaagaatggtgcagatatgctgattacacatcatccgatgatcttttcaccgatcaagaaaattcataatcttgattttgtaggaggtcgtattcttaaactgattcagaacgacatttcttattatgcaatgcatacgaattatgatgtactgggaatggcggaactttccggagacaagatgaatatgaaagacgctgagatactggaagtgacggcagaaggtgatatcggggaagaagatgagccggaagggatcggcagagtatcagatcttgagattcctatgacgctcagagagtgctgtgaggatgtaaaagatgcatttcatctgggaacagtaaaggtgttcggtaatctggaagacaaagtgaagcgtattgcaatctgtccgggttccgggaaaagtgtgatccaggcagccctggataaacatgcagatgtactgattaccggagatatcggtcatcatgaaggaattgatgcagtggcacaggggctggcaatcatagatggcggtcattatggaatcgagcacatttttattgaagatatgagacagtatctggaaaagaatctgaaagatgtggaagttattgcggctccgatcattcatccgtttctgcttgtgtaaagatgagaaagtctgtgagccagaggcaaaatgagatgaggaagttatgaaacggccaaagtaaaagtgtgaaaatgaggtgtgtctatgaatgatattttatatacggtccatgtagatggaacagacaaaaaattcaaaaaaggaacgacatatcaggagatagccagaacatatcagcaggaatatcagcatgatattgtgctggtatttgtggatggacgacttcaggaattgttcaagacactggaaactgattgtgagttgaaatttgtgacgactgcggatccgctgggttataaaagttaccggagaagtatgagcctgatgctcgtgaaagcaatttatgatgtggcagaacataagaatatcgataaagtcagaattcattattctgtaagtaagggttattattgcacgatagaaggaaatattgatcttacacaggaatttcttgatcgtgtagaaagccgtatgagagctatggtggaaatggatcttcctatcagaaaaaaaagcgtgcatacagatgatgcaattgcaatgttcggacagcatggcatgcacgataaagaacgtctgttccattaccggagagtgtctcgggtgaacatttacagtttgaatgaatttgaagattattattatggatatatggtaccgagtgccggatatctgaaatattttaaattgtacctgtacgatgagggatttgtgattcagatgccggtgatgaatgagccggaagcagtacctccgttcgaaccgcagaatcacttgttccgtgtgctgcaggaatcaaccaagtggggagatattcagggtatcgaaacagttggagacctgaacgacaagattacaaaaagtgatgtgaacgaattggtattggtgcaggaagcacttcaggaagaaaaaattgcacagatcgctgaacagatcaaagagcgttcggatgtccgctttgtattgattgcaggaccatcgtcttcgagtaagactactttttcacatcgactgtctgtgcagctgcgggctaatggattgtgtccgtatccgattgctgtggacaattattttaaagaacgtgaagagacaccaagagatgagaatggagaatttgattttgaaggacttggtgcggttgatgtggaattgttcaatcttcagcttcaggaacttctggagggaaaagaagtcgtaataccggagtttaactttgtaaccggtcataaggaatacaaaagaaggccaaagaaattaaaagaaaacgaagtgctggtaattgagggaattcattgcctgaatccggaactgaccagaaagcttccggatgaaaataagtttaagatttatatcagtgcacttacacagctgaatattgatgagcataatcgtatcccgacaacagatggacgtctgatccgcagaattgtacgcgatgcaagaaccagaggtacatcagcaaaggagacgatccgtatgtggccggcggtgagaaaaggagaagagaggaatatttttccttatcaggaagaggcagatgtgatgtttaattcagcattgatctatgaacttgcagtattgaaaccatacgtagaagctcaactctttggaattgaacgagactgtccggaatatttggaagcaaaacgtttattgaaatttcttgattattttgtcggaatcggaagtgagaatgtaccggcgaattcattacttagagagtttatagggggcgggtgttttcacgtgtgattttttggggatttaatttattaacgtagttggcctctcgatccttgaagaaaacagtataaagtggttctggttcagg

SEQ ID NO: 2918 - DNA, 336 bp, Unknown
  gut microbiota DNA sequence
gaaacgagtgttttactcagcatatattccgctgaatgaggatgatgcattgccggggcttggaacaccgacaccgcttttgcgtgaacaccgcctctatcaggcagattggctgcttagattttatggattccaggcagatgaattattgtcggaagaaaagccggatttcaatgaactgatcgatccaaagtgcgactgggcattacgccatctcgaacaatttcccgtggaagtagagactgcaagttatgcaagactgcttcgggtaccgggaatcggtccaaaatccgccagccggatcacatatgcaagacggtatggaagaatggattt

SEQ ID NO: 2919 - DNA, 481 bp, Unknown
  gut microbiota DNA sequence
tttaaatattttttggacatggctccagaagatgaagttataaatccaagttcattgacaaaatttcggaagttacgtttaaaggatatgaatcttttggatatgctgattgccaaaacagttcagttaacattagaaaaaggaattattaagtcaaaatacattattatggatgcaacgcatacaaaatcaaaatacaatcaaaagactcccccgtcaagtactccaggaacaatcaaaaaaactgcgccgtagcatctatgaaattgatgaaacaatgaaagaaaaatttcctgataaaaacacagatgattctttagaaaaagaactaaaatactgtaaacagcttattgatgttataaaaggaaatgaagaaatttgcagttatccaaaagtgcaggaaaaattaaaatctactagaagaatctgtcactgatgacatggaacatttagaaacttcaaaggatgaagatgcaaaaac

SEQ ID NO: 2920 - DNA, 235 bp, Unknown
  gut microbiota DNA sequence
aagtatggtgtcctggttcaacatttaagccagttgtagcaggaattgggttgaaaacggaaaccatagatccaaaagaggattttggaaatgaaggtctggaatggcagaaagattcgtcctggggatcttatcaagtgacaacacttcatgagtatgaaccggttattatgaagaatgcaattatttattctgataatatttactttgcaaaggctgctcttaaaattggaag

SEQ ID NO: 2921 - DNA, 478 bp, Unknown
  gut microbiota DNA sequence
aaattttttgtaactgctatcaatcgcaaatgccccaagcggtgcagtcagtacaattgcaagcactgctaccgtcagaaccacatcgccacacgcaaatccaagtgccaacgggattcctccgattgcagcctgtacggttgctttcggtgtgtatgccatcatcgtaaataatttttcttttccattcatatccgttccaagcagacatacaaagacccctgccattcggaagatcagtgcgccacagatcaaaacgactgccttgattcctacatgagacagatatccgatatttacagtcgcaccgaccagtacgaataagaatatctctgctgccacccataatttcccgcatttcacagatattctttttgccaccggttccctgtatttctgcagactgacaccaagaaacagcaccgcgatcaatgcggaaaatgtaatcgttgttgtcagtccatcttccagaccgacg

SEQ ID NO: 2922 - DNA, 3993 bp, Unknown
  gut microbiota DNA sequence
ttattaaaaaaatattctttttttatttttatctttttttagtatggacatattttcttttttatgcaatgattatgctatccgaacaattatcataaaaagcgaggtgatataataatgaagaaacgatttacaaaaaagcaactggatgttatgaaggttctgtgggaaagcgctacgccaatgattgcatccgatattgtcaggaaagacgatgcattgaatatcaataccgtacaggcatgtctccgctcactgattgcgaaccattctattaaagtggcagatatcgtctacagcggtacggtgcttaccagaagctatgcgccagtcatttcccgtgatgagtattttggcaatacttgtacagatatactcggagacgggcagaaatctgcgttaattgcttcattgatcgatactgaaacagacctggatgaattagagcatctggaagagatgatagcccagcgcaaacacattcttatcaacggaggaaattaaatatggcgctttcatttggacctttttttacttgctttattgtaacgctttttctcacggtgtacctgcatatcatcatgcaccacacatccgttttccacaaacgcacgatacaattttcgttaatcggtatacttgttattttaatccgcatgagtatacctttcaattttccttttacctattcgtttcagtcttatcaggtcctgccaaggatattagactttacaacacaaaatattgctggctgccgtctacgggtggatacgctgatattttcaatctggtttacggtcgcttttatcctgctgttgcggctcctggttcagtatatacggctgcaccatgcgctctctgcattttttgttgaaaaagaaggcgcatatgcatatctgtacgagtttttacaggaataccttgccaaaccgatacggattgcccttatcccggagccaatctctccggccatcactggattattacatccgattttgataatgcccgatgggcaaagcttttccgaaacggagcttaagtacatctgcctgcatgagattgcgcactataaagagcatcacctatggcttggatttctgatggaaattatctgccgcatacactggtggaatccttttgtacagcatttaaaaaaagaatttatgctctttctggagctttccaacgactttttcctgatacaatccaacccgaaattcagtgtcaccgattacgctgaactgattgtaaaaaccgcaaaaagaatacaaagcgccaggctcgcagagcccagccgcatgatgcactttgccgtaaatgatacctctgtactaagtacacgaatctactttatcttaaataatcaggaaaatacttcccgttttaagcgtgtacacgggtatctgtgccatacggccatatttgctgtggtcatattctctgttttctgcgtccctgaacctaattttcgggagctgtatccggtgacagacggcgcagtagagctccgtgaagataacgcttatatcattgatcacggaaccaaacaatataccatttattacgaaggaaggttctttgccgacatcgaccacctctctgaagacttaaaaagattgccacgctacaaggaaggggaaccaattcatgaaaacgactaaaacactatttatcactttaatctgcagctttatttttagtctgacaacgccatcatctatagcttttgctaatcatacgcttattacttcaaatgtttatgctgcttcgacggatgctacgcctccagaaatcagtccggcttcgcacactattgtttggaaatataaaaccttaaatggcgtcttgtataaatgtagatataatcaaacaacaaggaaatggattggcaaatggattaaagcttaatttttctaatataaggaaaagacatgtgaataatcaccagatgatgagagaaataatggaaaactgcattttaaagattattttattgtcattgacatctcaactcccctgctcccattttaagtagcaggggagttttctataatcgctgcttgtctctacacgttcttatctgacgcttatgttatagcgataaatgttttatcccgtgtttttataggtttctctctctgtatgaatcaaaatagtatcccgtgttttttgtgataaagttaaatttataacctgtttatacggaattcaagataaggtatttatcgctataaggggctgtcgcactaagcaattagtgcgcagcctcttttcgatgaaaaaatacagccgggcttcgaaaagtccggctgttggtgtaaaatataagtatgcgaaaacctatatttttacataagaattatactttgaatgaaggaggatatcaactaaaacttcctttaaatttggaaacaatcattccggaagatgattctgtgcgattactaagtcagtttgtggagggaatggatttgactgacctgtattctacctatgaaagaataaattcagtatcgccaaaaacacttctgaagattgtactttactcttacatgaacggggactattcttctcgttctatggaactgaattgcaaaagagatatcaatttcatgtttcttttggaaggtatcccagccccagatcatgcaacatttgcacggtttcgaagcatccatttcgcgccttgttccaagcgtattcttgctgaaatgtcaaatactctttatgatcttggtgaaatttcaggcgaaactatttttattgatggtacaaaaattgaagctagtgcaaataaatatacttttgtctggaagaaagcagtgacaaaaaatcaggcaaagctcttacaaaaacttgctgattttgtagctgagtgtgaacaactttatcatttgagaattgtttacggaaatacaattaagataaagcatgtgaaaaggttacgcaaaaaattgtatgcattaaaagaagcggaacaggtagtgtttgttcatggaattgggaaaagaaaaactccgcttcaaaaaagtattgagactctggaagattatctggagcggcttaaaaaatataatcaccagatacatatatgtggaaaacgcaacagctattccaagacagaccacgatgccacatttatgcggatgaaggaagatgctatgggaaatggacagccgaagccagcttacaatctccaacatggtgtagattccgaatacatcacatggcttactatcggcccacagcctacagatactacaaccctgattccatttttgaaagacgctcaggaacatttgaaattcaaatataaaaacataacggcagatgccggatatgaaagtgaagaaaactatctgtttttggaatcaaatggacagctgtcttatataaaacctgccaactacaaaatttctaaaactcgtaaatacaaaatgatattgggaaaattgaaaacatggagtatgattctgtggcggatacctatatctgccggaacgtaaagaagttagaggtggaatgtgtccgccatgcaaaaagcaaaaccggctatgtaagtgaaaaaacgatttataaatgtgaggactgtaatagatgtccttataagagtgaatgtatcaagggcaataactgtaaaacacctatggaagaaaggacaaaaacgcttcaggttgcgaaaacatttttgaaacaaagaaaagaagatttgaaacgaattctttccgaggaaggaattcttttcagaacaaatcggagtatacagactgagggatctttcggcgatttgaaacaggatatgcagtttcgaagatatttaagcaagggaacgtcgaatgtacttgcagaaagcacactacttgccatggcaagaaacataaataaacttcataataagattcaaaacgaaagaaccggaacacatttgtttccgataaaaagtgcctaaatttagacttgtatattttgaaaataattttatcaacaaagcat

SEQ ID NO: 2923 - DNA, 291 bp, Unknown
  gut microbiota DNA sequence
tctaattctgttccatactttttattctgttcatatcccttttcataaaataccaatctcaaattactggctgaactgccgagataaagactgccacctttactctgaaacacttcctctttcagttctcccgaatcgtgaaaatctatatcccttagttttgtggaaagcaatccctcttttgtccgtataatcaaatcgggaatactcaaatacggttttctatcatctatcgctaaatcaatccgaggaaaattgatgtgatactgacaaactctgtttaagaaatca

SEQ ID NO: 2924 - DNA, 772 bp, Unknown
  gut microbiota DNA sequence
tctggctagggtgcagtgatgaagaatacgagaacttcagaaagcagaagaaaccaaaaacagttatgtatgaggctttcggagagaaatttccaatacagttaaaggtggataagtattcaatgactggaaatctggcgattgagatggtgaactggaaacacaggtatccatcatcatgggctgctttgacagttgatttgaatgaggtgtgtgaaaaagattgttcttatgttgatacaaaccatcatggaagaaaaatattgtcatggattatagaaaatggattaggggaactgacaggacaaagaaataggagtggatactgtacttatgagaaaatacgtttttatccggaaaaattaaaggattgtgatcccgaaggttaccagagatataaaataaaatttgaagaaacataaaaaggctgcatagtagagatgttatcagagaacaggaggaatcaggatgagaaactatcaagatgaacagaataaaaattatgagaatacaaaacaaatgtttgaagcgtgtcgaaaagatgtaggcgattctaaaaaagcgagaagaaccatgccaatagttgatgatgagatttgctttgcagatattccggaaaatggagtgtgtattacgtcacaatttgaaaatgggctttgcggagagattatctggtgccgaagtggagaagatgtttatatgctgcacagcagtatccgtctggcagatcatactgtctggcttcagatggacaagaaaggtaacagcgagg

SEQ ID NO: 2925 - DNA, 3587 bp, Unknown
  gut microbiota DNA sequence
gggggggggtattttggtgcgcaaaaatatgtgcagagaagaaaaaatataatgaatttattcaaacttataagaaaccgataaaaaaagcagagaataaaggagtaaccaccagatgaaagaatgttacatagatatgcattgccacattctgccgggagtcgatgatggggcgaaagaccttgccgagacgaagaagatgcttgagatcgcatacgcagaaggaatccggtgtatcatagcaacccctcaccaccatccgcaccgcggaaaggcgccggcagagaagctccgtgaaagggcaaagcttgtgcgcgaagcagcacacgagatcgatgaacgcttccgggtataccttggaacggaagtctatttcggacaggatgttgcagataaattaaaagaaggaaagatcctttcgatgaaccgcagagagtatgtactggtagaattcccgccctcacagacatacagctacatcagacaggggatccagcagctgcagttcgcaggatacgaagtcatactggcgcacgtcgagcgatatcactgcatcgccgaagatgtagaacttgcggaagaactgtatgatatgggtgtgaacctgcaggtaaatgcagacagcatcatcgggggatccggccgtaagatcaggaaattcatcgaagaactgatgaaccgcgacctggtattctgcgtcggaaccgatgcacacgatacaaagcacagaccgccgaagatgaagaaggcggccgctcacgtagagaaacgatacggagaagattatacaaggaggatattctacagcaatgccaagagtatgctgaagaagagagattaagatgagccgagaaaattatggaatgatgaatcaggagattcaggatgacgaagttaccattgatctgatggaattattcagtgccttatgggcaaagaagacgataattattctgtctgcagtattcatggcactggtagcgttcgtcgggacgaagatgttcgtgacaccgaagtacacgtcagtaacgaagctatatgttatggcaaagaatgatgattcttctgccagtgcaacatattcggaattgcagtcaggaagcatgttgacgaaggattatatggaattggtaaaaagccgtccggtactggagaaggccatctctaagctgaagcttgatatggagccggaagaactggcagagatgatcaccacagagacaccgaccgacacacgtatcatgagcattagcgtgacggacgatgatccgaaagaagcaaaacagatcgcagacacactcagaaaatcagtcagcgtacagatcacagagatcatgaatgcggattctgtcaataccgtagaagaagggaaccttccgaccagcccgtcttccccgaacgtcaagaagaacatgatgctcggcgcactgctcggacttgtcatctcaatgggattcgttgtactgatcttcatcttagatgatacggtcaagactccggatgacgtagaaaagtacctcggactgaatgtactgacttccatcccgatccaggaaggaagcagcgcaccgaagagggcaaagcagcagagagaatcaagaaatgctgtaaaaagcagaagataggagaaggacatggcagagatagtattaaagaatctaacgaaagattaccggagcaacgaagcatacaagacacttcgtaccaacatcgaattctccggatcagataagaaagtgatcgtattcacaagctgtacaccgaacgaaggaaagagtaccgtgtcgatgggactcgcagcgtccctcgcagaaggcggcaaaagagtcctgttcgtagatgcagaccttcggaaatctgtcctggtgggacggcacagagtcacaggagaagtgaagggactgacacacttcctttccggacaggctgatgtaaaagaagtgatcttaagaacacaggaaccgaatctcttcgtgacattcgcaggaccggttccgccgaacccggcagaactgctcggcagcagaaggttcgaagcatttcttgatggtgcaagacaggcatatgattatgtgatcatcgatgcaccaccgctcggaaacgtcatcgatgcggcgatcattgcaaaaaattcagatgcatccgtgatggtcatctcagcgaaaacgatcagctacaagttcgccagagtggtaaaagaacagctggagaaggcagactgcccgatcctcggcgtggtattgaataaagtagatatgaaacagaacaagtattatggtaaatactacggtaattactatggtaattacggagaaaacggaaagaaatagagggtgagcgtatgaaccagcgcgtggttaccggcctgttgacggccggatgtatagcactggcgggtgcaggatatatgacttataagaatcaggaccgcactgcaccggagataaaagtagaccagagtaaaaagattgcttatacagaaggtgaagattacggaaagcttctggaaggcgtgacggcacaggacgataaagacggagacctgaccagtgaggtattcgtagaaaaggtcgtgccggtcagtaagaagaaggcagttgtctattacggtgtcacagataaggcgaaaaatgtaggaacagcaagccgggaagtgacctatcaggaaacagaaggcagcgatgcggcagaagagaccgcacaggatacggcttcggaagaggtatcggaagatacgacgcagaagacgaaaaagaaatccaaaaaagcaaaggctaagaagaccgctgaagacaagaaggcagaagagaccacacaggatgcagcggcagccgaacagcagagcgcagatcagcagagtggaaccctgcagccaaacggtacacgtccggcaatgaagcttgccgaagaagcgaagacgatagccagaggaacatcattcaatgcgctgaatgaagtgacagatgcagtggatgacaaagacgacagagacaccttgttccgcggacttcacatagacggtaattacaatgtgaaccaggcaggaacctatacattacagtattacgtacaggacagtgacggtaatacctcagatccgatcacatttacactgactgtacagtaacagacgaaggatgaatgatatgagacagagacttctggaaatggaaagaaagaacctgataggaaaactgatcacactgatccagcttctggtatcggtgatctgcatcgtgactgtggcaggcagcgggatgctgccgaagaagtacctgatcttcctgatcggggcactggcggtactctttggtgcgacacatattctgcagtatccgaagaataaggtgctgcgctatacggggatgatcatcagtctcctgatgacgatcatactggcggtgatcagcatgggaatgatgaagacggatgatgtacttaagaaagttggcggagccacctacaagacggataacatggtcgtggttgtgaagaaaggtgattcggctaagagcatcgaggatgccgaggattaccggttcggttatcagacggcagtggatcagaaaaataccgataagatgttt

SEQ ID NO: 2926 - DNA, 174 bp, Unknown
  gut microbiota DNA sequence
ttattccgtgtgtatcaaatgccttaagaattaaacagcaattgcgtaaccgtagtggcctccaccgggttatacttccaggcatttcatttattaatatctgctgccagtcacgacttgaaggaaacaatagataaggattattgtgaatgtggaatgccgttagaaacaatt

SEQ ID NO: 2927 - DNA, 154 bp, Unknown
  gut microbiota DNA sequence
tggcgggatagctcagttggctagagcacacggttcatacccgtggtgtcgctggttcaaatccagttcccgctactgattatggcgggatagctcagttggctagagcacacggttcatacccgtggtgtcgctggttcaaatccagttcccg

SEQ ID NO: 2928 - DNA, 508 bp, Unknown
  gut microbiota DNA sequence
attgattccggtacagccacaatattatgcggcagatggacttatggaattactgaaagtggtaaaaggaatccatcagaggtttaatccggaattgcagatagaaggtattttgttcacaatggataattgccgttacaataatgcaaagagaaacaaacaggcaattaaaactacatatggaaatgacattaagatttttgagcagacgattccgagaacggaaagtcttgcagaaacagcatctgaaggtgtaagtatatttgcttatgatggaaaaagcaaaggggcagacagttacagagaactggttcaggaggtgttgaaacatgcgtagaccgaaaaaagagattcagcttacctcttatgatgagttactgggattagaagaatcaccggaaaagagtatgaaccagattgtggaaatagaactggaaaagctctatccttttaaaaatcatccatttcgtgtgagcgatgatgaaaaaatggatgagacagtagagag

SEQ ID NO: 2929 - DNA, 392 bp, Unknown
  gut microbiota DNA sequence
aagccgaacagctttcgctaaagctcatgggaatctcacccctgcatggttctcatccagccgtaccctttgtcagcggtgctacatcatcacacagactaaggctgtacggaagtatcattatcacgatagaaaggtcatggcggcagcttttgcggtaagctgcttatggaacgctggcaggaatcgctatccggtttcatccctcctttggtgggtcacggcgtgccagcccaacggctctctttctatcgaaacgtattcggctgctttatgctgcgttgattagacgctttctttttcaaggaacaatccggctttgtcagcctgttaaagtgcactggtgataatgcactttaatagactggcaagctctgtctgggaagcatggg

SEQ ID NO: 2930 - DNA, 537 bp, Unknown
  gut microbiota DNA sequence
ataatggaccaaagctgcatgaatttctgcgtgaattaagcagggaaacatttcagaagggcgatatgatcactgtcggagaagcctggggagcaacaccggaaattgcaaagaaatatagcaatccggatggaagtgaattttccatggttttccagtttgagcatattatgcttgatcaggaagaaggaaaggaaaaatgggatactattccattgaatatggttaagctgaaaaaatgccttgcgaagtggcagaatactttatatcagacaggatggaacagcctgttcatgaataaccatgatcttcccagaatcgtgtcgcgctggggaaatgacggaaaatacagaaaagagtcggcaaaaatgctggcgacaatgcttcatggaatgcagggaactccttacatttaccagggagaagagctgggaatgacgaatgtgcagtttgacagcattgaggaatatgaagatattgagacattgaatatgtacaaagagcgtctggaaaaaggatatcagccagaagaaatca

SEQ ID NO: 2931 - DNA, 6996 bp, Unknown
  gut microbiota DNA sequence
tcagtatttgtggatggaaaatttgaacttcttctgccggaagatgagagaattttcgcctatacgagaacagatgagcatacaaagatgctggtatgtacgaactttacggatgaggaagttagctgcccattgcttgatgagtggaaagccggggaagtctggatccggaattatgaggatgacagagaaggaaatgtattgcgtccatatgaggcggtgataattggaactgctgtgaatattgtgaaagcaggatagttcccgtctgacagagcaattgaggagtacaacagagatatcaggtatctgtaagaggaggagaaagagatgaatagagctagtggggtacttttacctgtattttcacttccatcaaaatatggaatcggatgcatttcaaaagaagcgtatcaatttgttgaccagcttagagaagcgggtcagagttactggcagattctgccactcggaccaactggttacggggattcaccataccagtccttttctacatatgctgggaacccatattttatcgatttggagacgttaataaaagaaggacttttgacaaaaaaagaatgcaaagaatatgatttcggagataaggcagagtttattgattatgaaaaaatctattattctagatttaaagtactgaaaaaggcatttgagcgtttcgaaaaagatgaagcatatgataactttattaaagaaaatgcgtactggctggatgattatagcctctatatggcaatcaaggacagtaaaggtggaatcagttggaatgaatgggaagatgctctgaaaaaccgtgaagaaacagcacttgaaaatgcaagagaagaacttgcggaagagattgatttctataaatttcaacagtatgaatttgataaacagtggtcacagcttcacgcttatgcaaatgaacagggaattcagattgttggagatattccgatttatgtagcatttgacggtgcagatacatgggcatccccgaaattattccagtttgatgaagagaataatccggttgcagtagcagggtgtcctccggatgatttttctgcaacaggccagttgtggggcaatccgctgtataattgggaatatcataaaaagacaggatatggctggtggattaagagaatccgtcattgtctcaaattatatgatgtagtaagaattgatcatttccgtggatttgacgaatattattccattccttatggaaatgagacagcagtagatgggacatggatgcttggtccgggaatggatctgttccatacaattgaagaaagacttggcaaactgaatattattgcagaagaccttggattcctgacagaaagtgtactacagatgttgtctgacagtggatttccgggaatgaaagtagttcagtttgcatttgatccaaatggaggttcaacatatcttccgcacaattacccggagaatagtgttgtgtatacgggcactcatgacaacgatacaacaagaggttggtatcacagcacagataaagcaacaagagattttgcgaaagaatatatgaatgcacagcgcttggatgaagatgacctggcgtgggatttcattcgtcttgcaatgagcagcatggcgaatttttgtgtgacaccaatgcaggacttattgaacctggatggcaaggcgagaatcaacgtaccgtctacacttggcggaaattggacctggagaatggaaaagggacagtttgatgaaaaggcggtggagagattaaaacgtatgacatggttgtatgaacgtcttccagaaaaggaaaataaagtagtgtagaaagatgtcgcttattcacgtattgctgagtgtgaaattccggaagatatgtttgcatttgataaattataagttgtggaaagagtatatttgaaattcaaggatttcggctcggttgatatttcaaagtatttgcacaaagaaaaaggttacagttcaacaaaaactggggaaataatttcataatttcatatgtaaaaagcttcttgaacaaaatgaactttctgataaaattaaagagaatgaaaaccagaaaaagcagttgacttttttattaaaatcgaatattatatatagaatctctttgcactgaatatatccaatacggataagggataacagtacaaactgatcaggctacattcatttttttataaagataatatcgaaaagaatgatgtgcatgccgggccggtcgattaccggcagcagatgagacgatatatcatacatctgtgggacagtaagtagaaagttccacaggtgtatttttttgcaaaaaagcagtcttgtaaatagaataccgaggaacagtagtctcaccttaggtgccataggagacatgacattatgaaaaatggaggttatcttatgacaagtcaaaaacaacaattaaatgaacagaaaatgatcaatcatttatcaactgtgggaattcttggaaatgtcattctgacagcgttcaaactgctggcaggaattatcggacattcgggagccatgatatccgatgcggttcattcattatcggatgtgtttgccacattcattgcatttctcggggtaaaattatctaagaaatcggcggacagcgaacatccatacggtcatgacagattggaatgtgtagcatcgatggtgcttgcagccattcttcttgcaacgggtattggtattggaatgagtggtgtgaagacgatcatagccggtgattacagtcatttgcaggcaccgggaacgatcgcacttgtggcagctatcgtgtcgattcttacaaaagaagggatgttctggtataccagacattatgcgaagattctggattccgcagcattcatggcagatgcatggcatcacagatcagatgcattttcttccgttggttcactgattggtataggtggtgcaatgcttggatttcctgtgctggatccgctggcaagtgtagttatctgtatttttatcctgaaagtagcatttgatattttcaaagatgcactggataagatgctggatacttcatgcagtgaagaatatgaagagaaactggcagactatatcagaaagagccggggagtagaaagactggatctgttaagaacgagaatgttcggcaacaaggtgtatatcgatgcagagattgcagtagatggagcactttcgttgaaagatgcgcatgcaattgcagaggatgtgcacgacaatgtagaaaagaagtttccgaatacaaagcatattatgattcatgtaaatccggcataatggaaaaaataccgcagctttcaaattttgaaaaagctgtggtatttttttctttgttggtgttgtctgaaaaatttaatcctgctaatgaaagtatgttttcgtttgtgctatgagttataaccttttacgtatacaaagctgtctgtatcattgtcacgctgcattgtatagtgatgattgagcatggcttcgataagttcctgtccctggttttctacggcgaccagagtcatatctaatgcatcttccagttcctgtactgtcatatcgtccagaaatacctgttcgccgcttcttaacatattgcatgtgataagaagtgtgtcaccaagatcggtgccggaggctttcttttccagaagctggactttaagatcctgtccggtgatcagccctgatacggtaacagtctcgccaaagaaatcattgcggatcgcaaatacattgatcttaatatatggaaatgctttcatgatctcctctgcgaatccggcaagggtactgtaggcaagcttgcctgttgcaatggtaagtgtacggcaggtctcatttttccaggtctcatagttgtcattctgcttcagagcttccagagcatcatggaattctgtctttaaaagacgcatcatgccaactccgttttccagctggatatatccatcatagcgttcttcttccggaaaatcacgttcggcaagaatataccattcatcacttgcctgtatgaagtgcagaccatattcttcatagaattttggctgatagctttcaatcatatcaatgacttcaccggcttcttcttttgaaaagagttccagcggatagagaccttcacggtattttgtaagtccggcaggtacaacggatacacttctcataaaaggaagatagctggaaagatcctcaatagaacgttttaattcatctttgtcatttacgcctttacataatacgatctgaccgttcatctcaatatgtgcttcatacagatcctgcagaaattttagcttttctccggcaaaccggttatgcagcatcttacagcggagctccggattggttgtctgtacagagatattgatcggtgcgagctgcatatggatgatgcggtcaatatctgcctgcttcatatttgtcatggtgatataatttccctgcagaaatgaaagacgggagtcatcatccttaaaatacagagtctcacgcatgcccggaggcatctggtcgatgaagcagaacatacatttattactgcaggagcggtattcactcatcagtccattctcgaattcaactccaagttcatcgtcgtactctttatcgatttccaaaagccattcttccccggaaggcttgcggatcaggacttcgacatattcatctttcatcagataacgataatcaaagacatcctcaattttctgtccgtttatttttaacagtacatcgccgggttcgatttccagttcttcagcaatagaacccggatagacggtctgtatcaggtgttcctgttccttttttctcacaaatatattcctccgtataaacatttacccatatagacaaaatgatagcttattctcagtctgagtgcaaggtaagaattataaaatcagaacgtaatttttggataaattgatgaaaaaagaggaattgacgggattcatttttctacgggatgtgaaaaaatgtgatttctgacaaatatacgattgtaatcaaacgtttaacgtgacataataaaaaagaaaaggttaagaatattttaaaagaatgttaagtaagcgtaaaataagctgacaacaaaggagaaaattatggaaatattttctatggtattgtcattgttaagtggagtcgctttgtttctgttcggaatgtcccttatgggagatgggctgaaacaggttgccggtaataaactggaagcattcctttacaaaatgacaaacacaccgctcaaaggagtagcacttggaacaggagtgaccagtgtcattcagtcatcttccgcaacaaccgttatggtcatcggttttgttaactccggtatgatgaaactgaaacaggcgatcggtatcatcatgggagccaatatcggtaccagtatcaccggatggatcttatgtctttcctatattgaaggatcgaatggtattgcaaagattttatcttctgcaacgatagcggctgtcgtggcggtaattggtacgatcatgcggatgatctgtaaaagaacgacacacaagaacatcggtaatatcatgcttggttttgcaattctgatgacaggcatgcagacaatgagtggtgcggttacaccattaagagagagtaaagtatttattgatatgctgacgatgttctcgaatccaatcgcaggtatcctggtaggtattgcatttacggccgtcctgcagagcgcatctgctaccgttggtgtattgcaggctttatcggtaacaggaatccttacattttccagtgcatttccgattattcttggtatcggtgtaggagcatcctgtccggtactggtctcagcgatcggagcaaataagaatggtaagagaaccgcacttgtgtatttattaaatgataccttcggaatgttgatctggtcgatcggattctatacgatcaatgcatttgtccattttgattttctggacaatattatgtcgccggtatcgattgccctgttgaacaccgtgttccgtctggtaacggtatgtgttctgtttccgtttattaataaacttgagaagctggtatgctggctggtaaaagacagcgcagaagaactggaagatgaagcagactttgatcttctggaagagcgtcttcttgcgtatccggcacttgcgatcggtcagtgccacagagcaatgagcggtatggcgaaaaagcttcgtaagaatgttaaccgtgcaatgaatcttctgaatgagtaccagcagagtaagttcgacaaggttcagaaaaaggaagatctgatcgataagtatgaaagccgtctgggcgattatctgatcaagcttacaaagcatgagatgaacacggcacagacaaggcaggtttcactttatctgcatacgatcaatgactttgaacgtatcggagatcatgcttcttatattgcatatatgtccagtgatatgcatgagaataagacacaattctcggaagatgcctgggatgaactgaatgttgtcatggaagcggtacgtgaggagatcaatcttacatgcaaggcgttccttgagaatgataaagaaatggcacagagagtagcaccgcttggtatggtcattacaacactgtgtgatgaactgaagatgcgccatgtggaacgtatgagcaatggtggatgtggtctggaagaaggaacagtatttacagatatcctgaacagctttaaccgtattgcggcgcactgtgcaagtgcgatggttgcacttatgaacagtgataaagagaatatggatacacatatccatgattcgaaggtatatccttccgacagcactgaatataaaacttatctgaatgaatataatcagaaatatgagatcaaaaaagacggggaacatatgagaagtatggaaccggaagaggttgagtaagattttcataagagtgtataaaaaagaacatcgcctgagagggtaatat

SEQ ID NO: 2932 - DNA, 68124 bp, Unknown
  gut microbiota DNA sequence
ttgtttactgacggttccgatattccctcggtgacatctgatattcttttttgaataaacggttaaaataagacaggttattgaatcctgtgcgttccgagatggacagaatactgtcatcttccgtgagcagaagtctggcggcaatggtaagacggtagctattcagataactggtgaacgttgtgtgcaggtgctgcttaaagaatttcataaaatgtgattcggagaatcccatatagtctgctgcgctttgaacggtaatcggttctgtataatgtgattcaatgtaggaaacaatctgttttaccttatccagagatttgctgcggctgaaagtgacaggtgatccctgggaggagaataacaggtaaaagaagtgaaagagatgtccttttactgataattcataatagtccggacgcttagcgcagaggtcatcgattgcatcaatacaggaagaaagttcttcatgggaggaacaggtatcgtcaaagagccatggaagtttatattccagtgtaaaatacggctggaaatatccgactgtccggggatcggaatcagcagaatataaaagactgctctgaaacaggatgttttcatattccatactgtctttttcatgctgggaaatggagtgaagctgccccgggcggaccaggatgatgtcaccggctttcacagctctgggctcggtatcaacggaaatgataccacagcctttttttattacaatgatctccacgtcattatgccagtgaagcggaacctgtgtgaagtccaatggaatggagcacagataggtgttgtatggaaactgggagctgacgtgtttttttacttcgtggaggttttcataggtgagtgtgttcataatcagatactggagtcctttctactgtcaaaaagttgtttgtttgatagtattgtattactttttactactatgatgcaagagattatggttataatctgattataatatcagtgtaaagcaaacggaaactgataaacaaagaatttatagaaatgaatcagacacagattcaggataatgatgcggcagtgcagattcaggaggttaattatgaatttctcagaaaaattacagcagacacttggtaaatcaatcaaagatgcggcaaatgaagagatctacgcagcacttctttcaacagtaaaagaagctgcggcagataaaggaagaaatatttcggaaatcggaaggaaagtatattatatatcagcagaattcctgatcggaaaactgttatccaataacctgatcaaccttggggtatacgatgaagtaagagaacttctcgcagcaaatggaaaggatatctgtgagattgaagaagtagagccggaaccgtcactgggtaacggaggacttggaagactggcagcctgcttcctggattccattgcaacacttggtctggaaggagacggaatcgggcttaactatcatcttggactgttcaaacaggtatttgaaaatcacaaacagaaagagactccaaacccatggatccagaatacaagctggcttactgatacaggaatcggattcgatgtaccgttcaaagatttcagcctgcattctaaattatatgatattgatgtaaccggatatgaaaacggaacaaataagctccatttattcgacattgaatctgtaaatgagaatatcgtaggagatggaatcacatttgacaaaaatgatatccgcgaaaatctgacactgttcctctatccggatgacagtgacaaacagggagaactgctcagaatctatcagcagtacttcatggttagtaatggtgcacagttcatattgaaggaatgtgaagaaaaaggatatgcactggaagaacttgacaaacatgtagtgatccagattaatgatacacatccttctatggtaattccggagctgatccgtcttctgacagcaagaggaatctctatggataaggcaattgagattgtgacaaacacctgtgcatataccaaccataccatccttgcagaagcactggagaaatggccggttgattatctggaggcagttgttccacacttaatgccgatcatccgtgaactggcggcaagagtagcggcaaaatataataacaaagatgtacagatcatcgacgagtggaaccgcgtgcatatggcgagaatggatatgcattatggattcagtgttaacggtgttgcggcactgcatacagaaatattgaaagacgtagaattaaagccgttctatgatatttatccggagaaattcaataataagacaaatggtatcacatttagaagatggctgatgcactgtgataagaaactggtagaatggatggataaatatggagtcggggaattccgtaaagatgcttcaaagctggaaggacttcttgcacagattaacaatgaagaagctctgaacgcacttctggatgttaaacagcagaataagactgcattaaaagaatatctggaaaaagaatccggagtagtattaaatgataatgcaatctttgatatccagatcaaacgtcttcacgagtacaagagacagcagatgaacgtcctgtatattatttataaatatctagatattaaagccggaaataaaccaaagagaccgatcacaatgatcttcggtgccaaggcagcacctgcatacattattgcaaaagacatcattcatgtaatcctgtgtctgcaggaactgatcaagaacgatccggaagtgtcaccatatctgcaggttgtaatggtagagaactacaacgtaacaatggcagaaaaactgattcctgcatgtgaagtatctgaacagatttcactggcatcaaaggaagcaagtggaacaggtaacatgaagtttatgttgaacggtgcagtaacactcggaacagaagacggtgcaaacgtagagatccatcagcttgtcggagatgagaatatctatatctttggtgagagcagtgatcaggtaattgagcactatgcaaaatcagactatgtggcagcagattactatatcaatgatgcagatatccgcaagtgggtagatttcatcatcagccctgagatgatgaagatcggtgatgtacgtacacttcttgagattcatgcagaactgattcagaaagactggtttatgacacttttggatgtaaaggattatgttcagacaaaagaaagagtatttgcagattacgaagaccgtatgtcatgggcgaagaagatgatcgtgaacattgccaaagcaggattcttctcatcagaccgtacgatcgcagagtacaacagagatatctggcatgtgtaaaatgtaagattctttcagaagcttcattcaaattaaaacagaagaaaaaagtaacaaaaaaggatgcatgcacgtgcatcctttttttgagagaataatgaatgaggcttttcttttacgatatgccacttcacttctataataacatatctgatctgaatgtacagatatgtgaagattccttaacaccttcttaacggtgcagagtccgcagcttacatctcattttcatcttcacacatccggtagccgacaccgacctcggtgaataagaactgtggctgggatggattgcgttcaatcttccgccggatattcgccatgtttacgcgcaggatacgattgttgctatccgtgaacggtccccatacattttccatgacagaagcataggtcataacctttccggagttctttgaaagataggctacaatcttgtattcgaccggagtcagatgtatttctttcccatccagagtaaccatacgtttttcaaaatccagcatcagtccctggcatttgtatggccggataaaaagaggagaattggaagccatacggttactgtgacgcagagaagtacggatacgtgccagtagttcggacgtaccgaaaggttttgtaatgtaatcatcggcaccgagatccaaagcggcaactttatcctgttctccggctcttgcagagattacgatgatcggacagcttgtccatttccggacggatgaaatgatgtcattgccatccatatccgggagaccaagatccagaaggataagatccgggcattgggagttgatgatagaaagtccggattgtccggtttcagaggtgatggttttgtaaccattggatcttaaagttcttgccataaaatccagtatgtttttttcatcttctataatcagaatggaataactgtcagtcataattaaatatcccctttcggtagtgtgaataaaaattccgcaccatgtgcatggttatgagcggaaatctgtccgccatgagcctgaatgatcgtattacagatggagaggccgattcccataccacggtgtgtatccgatgttttgggaacatgatattccccttttaatatcagaggaatggtctgttcatcaattccctttccgtaatcaatgacatggaatgtaatggtatcagattcttctgatatttgcaactcaaccggccggttagtttcggaatggacaaaagcattttccataaggttcataagcacctgctcaatcagcagaggatccattggaatgatcagtatgttatcgggcgcagttacgcagatctcaatatccggaatccgcttttttatacgggtgatcgcttcagctactacttcttctaccagttcatcttcttttcggactcttccggtatctccctggatccgggtaatagacaacagattttctaccatattcaaaagccagtgtgaatcctcgttaatggaggagacgagatctaacttttcctgatcggaaagggctgcataattctcagtaaaagaatcagaagatccgatgatggatgtaaggggggtacgcagatcatgtgaaatagcccgcagaagattggcacggatacgttctttgtcggcttcattgattgcacgctcccggtcaaggatcattttatcctgtttttttaatcgtgtagtcagggtagagacgatcatggagatggtaagaagaaatacaaatgttacaggatatccgctgatcgcaaaacttacttcaaaataagggtaggtaaaacaccagttgataaatattacgcaaaaaaaagcagaaataattccgaaaaaatagccggtagtgatccttgcgattatgatcagtgcaagaatatagatcaatgcgatattggcaggatcactttgcgtgatatgaaaaaaagaaaatgccagtatggttgcaatggccagtatgattatagtagatacgatattgtgccataatgtcctggactcaagtgtagttgtcggtgcggtatgtttcaaaagaactcctttctgcaaatgtctgcgatataaaatataagatataatatgttcattgtaccataaaaatacaaaaaggagacatcagaaagaatataataagtggaaaacgttattagaactatgctatactgaaattgtaatcagaaatgaatgttttataatattgtatgaaatttaatgcgtaaactttaaaagtttgtgcgttaatatgctaaaaaatatgatattatgtgacgggaagcgtatagataaaaggagtaaacggatgaagcgttaaatgaggctaagagacagggacggaatacctatgtaatctatcatcaggaaaaagaaaacctgagtcattaaaaaaataaaaacaggaaattgacaggaggaatcaatcatgcaatgtacaagaaatgtaacagatcatatcatctgggtaggagcaaatgacagaagagtaaatttattcgagaatttatttccgattccgagaggggtatcttataatgcttatctgatcaaagacgagaagaatactctgatggatactgtagatgcatctgcatccgggcagtttatcgaaaatgtggcttatgcattaaacggagaaagcttagattatctggtcgtacagcacatggaaccagatcactgtgccaatatccagagaatcctggaattatatccggaagcaaaagtagtcggaaatgcgaagaccatgcagatgatcggacagtttttcgatgtggatctggaagacaggaaggttgtagtaaaagaaggagatacactggaacttggaagccatacgcttcattttgtaatggcaccgatggtacactggccggaggttatggtctcttatgaagattcggagaagatactgttttctgcggatgcattcggaacattcggggctctgaacggtaacctgttcaatgatgacgtggactttgaaaaagactggatcgatgatgcgagaagatattttaccaatatcgttggaaaatacggtatgcaggtacaggcacttctgaagaaagcagccgggctggatatccagatgatctgttcgcttcacggaccggtatggagaagcaatctgaattactttatcgagaaacatgacaagtggagtaagtatgagccggaagagcaggcagttgccattatctatggctcgatttacggcaatacagagcaggcagctgatgcgctggcagtaaagctcggtgcaaaaggtgtgaaaaatattgcagtttacgatgcatcaaagacagatgtgtcggaaatgatcgcagaaatcttccgggtaagccatctggtaatcgcatgcccgacatacaacggagggatctatccaccgattgaaaatctacttgcacatatgaaagcactggcggtgcagaacagaacggttgcggttatggataacggaacctgggctgccacagcaggaaagcagatcgtaaaacagttagaagagatgaaaaatatgacagtactcgatcagaagttatctattaaatcgacattaaaagcagatcaggaagagatcctggatgcatttgcacagcagattatcgatgcaatgtaagaagtcatgacacataaaagatgtatatcgagtggaggccggtagaatgaataattatacaagagaagatatattaagaatggtagaagaagaggatgtaggatttatccgtctgcagtttacagacattttcggaactatgaaaaacattgcaattaccacaagccagttagacaaagccctgaataatgaaattatgtttgacggttcggcgattgaaggatttgcgagagtggaagaatcggatatgtatctgcatccggatctgaatacatttgagatatttccgtggagaccacagcagggaaaggttgcaagactgatctgtgatgtctataaaccggatggaacgccatatgaaagtgatccgagatatattctgaaaaaggttatggccgaagcaaaagagatggggtatgaattcaatgtaggaccagagctggagttctttttattccatacagacgatgacgggcttccgactacgctttctcatgaaagtgccggatactttgatcttgggcctttggatctgggtgagaatgcaagacgtgatatggttctgacgctggaggatatgggattcgagatcgaatcttcacatcacgaggcggcaccggcacagcatgaaattgatttccgttatgatgaggcgctgacaacggcagataatattatgacattcaagctggttgtgaagacaattgccaagcgccatggattacatgcgacatttatgccaaagccgaagttcggtatcaatggttccggcatgcatttgaatatgtcggtcagcagggatggaatcaatgtattccaggatgcgaaggatgagtatggactcagtaaagaagcgtattgttttatcggcggaatcatgaaacatatgaaagcgctgacgtttatcacgaatccaagtatcaattcttacaaacgtctgatcccgggatatgaggcaccggtatacatcgcatggtctgcaaagaaccgtacaccgctgatccggattccgggaagccgcggagagtatacaagagtagaacttcgtaatccggatccttcagcgaatccttatctggcgttggcggtatgtcttgcggcgggtcttgacgggatcaaacagggcttgatgcctccgaaagcagttaaccgcaacgtatatgagatgacggatgaagaacgtaaaatcttcggaattgagaaactgccgggaagtctgagagaggcagcaatagaattccagaaggatacctttatccaggagatattaggggaagatctttccaaaaaatacatcgaagcaaagaacggcgagtattatgagtatagaatccagatcacagactgggaacttgaaaaatatctgcacttactgtaatacgattttgcacttaacagaaatgcgcaaaagagtatctgacaggaggtggcagagtgacagggattattgttgtattcccgaataaagataatgcaacaaatatcagaaatctgcttgtcaggggcggtatggatgtaataggcgtgtgttccaccggtgcacaggctatgcactatgcagataccgtggatgatgggatcgtggtctgcggttaccgcatgaaagacatgatgtacacacagctgcgggaatatttaccggattcgtttgaaatgctcctgatcgcatcgcaggataagtggagcagcggagatgtagaaggagttgtagggctttctaccccgatcaaggtatacgaccttatgaataccatgaacatgatgcttcagtccatggacagaaaacgaaaaaaacggaagaaagaagcaaagaatcgtgatccaaagcagcaagagacgatccgcagggcaaaggaactcctgatggaacgtaataatatgtctgaaggagaagcacaccgctatcttcagaagagcagtatggacagtggaacgaatatggtagagacagcagagatggtactgagcattatggcagagtaagggatgaaagagtaaacatatatatagaaaccggacgtaggaaaggcaggaagaacagatgaaatttacaaagatgcatggactgggcaatgattatgtctacgtcaactgttttgaagaaaagattgacaatccgccggcagtggcaagattcgtcagtgacagacatttcggtattggttctgacggactgattatgatcaatccgtccaaaacagccgatttcgagatggagatgtacaatgcagatggttcccgcggcgagatgtgcggcaacggaatccgttgtgtggcgaaatatgtttatgattacgggctgaccgataagacacagatttccgtggaaacacttggaggaataaaatatctggatcttaccgtagaagacgggaaagtgtcactggtaaaagtagacatgggaaaaccggaacttgaggctgatctgattccaatcatatcagagcgggaacaggtgatcgacgaaccgattgaggtggatggaaaagagtaccatatgacaggagtatctatgggaaatccgcatacagttatctatgtggatgatgtaaagggactggatctggaaaaaatcggaccaaaattcgagaatcatgaaagatttccgaagcgcatcaatacagagttcgtacactgcatcgacagacagacggtagagatgcgtgtgtgggaacgcggttcgggtgagacccttgcatgtggaaccggagcatgtgccgtagctgtatccagtatattaaataacttgacagatacacaagttacggtaaaattattaggtggagacttgcagatcgaatgggacagagaaaaggatcgtgtatttatgacaggacctgcaacagttgtattcgacggcgtgatagacattacagagatgaaggagtaagaagatgtttaaagtaaaccaggattatttgaagttaccaggaagctatctgttctcgacagtagcgagaaaacagcgtgaatatcaggcagcacatccggaagccgagatcattaagctgagtatcggcgatgtaacacagcctctggcacctgcaattgttgaggctcttcacggggcagttgatgagatggcacatgcagagacatttcatggatatgcaccggatcttggatatgagttcttaagaagcgcaatggcgaagaatgattatcaggcaaaaggatgcgacatcaaagcggatgagatcttcatttccgatggggcaaaagaagactgcggtaatattcaggagattttctcgaaagacagcaagatcgctgtgtgcgacccagtatatccggtttatgtagatacaaacgttatggcaggacgtacaggtacatatgatgctgcagcaggaacatggagcaatgtcatctatatgccttgtacaaaagagacgaactttgcaccggagcttccaaaagagacaccggacatcatttatctgtgtttcccgaacaacccaacaggatctacggtaacaaaagaacagcttcagacatgggttgattatgcaaataaaacaggcgcagtgatcatctatgatgctgcttacgaagcatatatttcagaaaaagaagtgccgcattctatctatgagtgcgagggcgcaagaacatgtgcgatcgagatcagaagtttttctaagaatgctggatttacaggagtacgtctgagtgcaacagtaattccaaaagatatcaagtcaggagatgttatgttacattctctgtgggcaagacgtcacggaacaaagttcaatggaacttcttatatcatccagaaagcaggagaggctgtatactctgatgcgggaaaagaacagttgagtgcacaggttgcttattacatgaacaatgccaaagtaatcaaagaaggactcaaagatgccggatacaatgtatcaggcggtgtcaatgcaccatatatctggcttgagacaccaaagggaatgacatcatgggatttcttcgattatctgcttgataaggctaatgtagtaggtactcctggatcaggattcggaccaagtggagaaggatatttccgcctgactgcattcggaacctatgagagtacagttgcagcgattgagagaattaagaagatgtaataaaaaaacggccggtattcctatgctgaaaaaagtacgggataccggtttttttagcgttatgtgttccgcagatggcgccacaacaaatgcagagagaggcggatcagaatctcgaatatattcttagctgaagttctgtaatatgttcgcggatatctgctgattgatgattgtctacccagatcagttccagaataggtccatcaggaacaagaccatgaccatctgcatagttgagaagttccggaatataagtggtgttctgacggtaatcacctgcataggtgaaggtaagataagtaccgccgcggagacaatactctcccgaattatcaatgataaatactccggaataattttcatactgtcctttctttatttcttctaacggaagaaaagatccgatgttatggttgctgataatataaagattttctgtatttttattcaacaactgttttaccagaagatccatttcttcgtctgtgtggtagggaatatgcaaggtatggcaataacggtcgggaaacgtctgcagacggattttaagcagtgcctggtcttccgcaccggataatgtcagaagccgttcttctacatttttctgaagacggtttaattcctgaatctgctgatggatgacatccagttcttctgtgagcagcttacgcgtgttctcaacgcttcgattgtccatgtatttacggattttttccataggaaatcccagacgtctcagatcacgtatgatattcagacgccacagatcatcaagcgtatagagccggtaattatttttcccgcgttttggagccaaaagtcccagcttctcataatagcggagagaatccggtccgatgttgtatagtttggatatttcgttgatcttaaaaaactgtttcatatattcacctgttgaaaacaaaattctgttgatacataatacttgaccttagtattataccagggtttagactataaatgaaagaaaaacaggtaaaagaaatgaggttttaatatgaaactcgaaggaaagtctttgaagagtgattttttgcgttttatcatcccgtcaattatcgcccagtgggtattctcgctttataccatggtagatggtatctttgtggcaagaggggtatcggaagtggcactgacagcggtgaatatctccatgccgtttacaacaggactgttttctgtctccatcctgtttgcagtcggaaattcgacgattgtggcaatctttctaggacagggggaaaaacagaaggcgaacgaagtctttacgcagaatgtggtcttattatgtatcctgtcggtgttgattacaatactggttatgatatttctggatccatttgcaagattccttggagcaacggatcatattcttccatatgcgagaacatatattggaacgatcgcaccattttctgtagtatatatcctatcttattcatttgagacgctgatcaagacagatggctatccaaagcttgcgacaatctatgtgacatccggggctgtgctgaactgtatactggattatattctggtcatggtgctgcataaaggcgtctggggtgcggcatttgctaccgggatctcgcaggcagcagtgatcctcttgtatctgtggcattttctgggatcgaaaggaacaataagattctcgaagttccatctgatgccatcggaaatcgggaggcagattcgtaacggcatgtcttccgggataacagaattctcaagtgggattatcatcttcttttttaaccaggcaatcctgaaatatataggagaatatgcattggtaagttatacgatcatctcatatgtgaatacgatcgttgtcatgtccatggcaggcattgcgcagggaacccagccactgatcagttactactatggaaaaaacgaatcggaaaaatataagaagcttctgaagtatggaatggtggcagctgcggcaggttccgtggcggctgtactcatatgttatgttggggcagaaagtattgtgggattgttcttaaaagagagtgaagcatctctgagtatatattcggtgcgggtgctccgcatctttatcctgtcatttctgcttgcgggactcaatgtggtcctgggaggatattttacctctgtggaaaaggctggattcgcaacgatgatctcacttaccagaagtctgattgcactggtgatcagtctggtatttctgacagctgtgtttggaggagaagctatctggtgggcaccgctgatcgcggagagctgctgtctggtgttatcagccgggttatatcagtggtacagaaaaaaataattttttttaaaatatctattgacttttctctgcaaacgagtataattaatattcgctggacaacttaaggacagcagagaaaagtcttattgatgcggattggtgtaatggcagcacagcagactctgactctgttagtagaggttcgagtcctctatccgtagttatgatgccgggtacttcattaagaagtatccggtttttcgtttgcagaaaaatccgaaaaaatccaaaatacctattgactttttagagaaagctggtataataatatttgttcgctgaacaatgcagaacatcacactgatgcggattggtgtaatggcagcacagcagactctgactctgttagtagaggttcgagtcctctatccgtagttccttggcaggggcgccggatactttttagaaggtgtccggttacttttaaaaattgtatatatcggagtgtggctcagcttggtagagcgctacgttcgggacgtagaggtcgcgtgttcgaatcacgtcactccgattttacccccattttatgggggtttttcattttttaggtgttgaaaaagttggttggctttggttgggattatccagtgtgtgccagattcttaaatttggcatttcgctcttggataatctttttcttttcggcaaggtttgaagtgtcataggtataatacttctcgttgacctcggtagtatgtcctaacatacttgcgaccactgattttggtgtgcctttagcttgtaagtcggaactggttgttttccgtagcttagtgataccaccaccgtttaatttgttttcccggcataaccgtgtcatgcagtcagttatgtttcttgcatgggtataacttccattgccatccgtgaaaatccattcacataaaattccatgttcttcttgtactcgcttgatgcgtgccaataagtgattaatctgtccgtcaaccggataggctcttgatttcttggttttagtcttaccaacagaaaattcattttttaaccgattgtgttttgcagatttattgatactgatgcagatatcattgatatcagaccatttcaaggttgatagctcactaaccctcatacccgtgtacattgctaattctatggcataaggcggcatatataaagggttctccctataatatccatgcaaggcttttaagataatagcaagttcagtatcggtatagtatttatcgcagtcagatacttcaatttctccacaatgttttgtaaagtccttaggctcaagaaattccactggattatctgtgataattttttcaattcttgcgtatctaatcacgttttttatatagctgaaaaacttacgtgtggtttctttgcacaattcaagtcgcttgatggtttccaacataaaaacttttattgtgttctcattaatctgattaataggcatctcagcaaagtctgtaccaacaaagaaacgtttgcagtcagtattaaacttatagattgagttatcgtctaattctaaatccttaatacttcgccacatgtaatagacttctaggaaagtagggcaagtcttttcctgcttttttcgggattcctcaatgacataatactctatgattttactattcaatttttcctcgttgacactctcaatctgctttccctttggcggttcaaccccctcttttggtaaatagctgtaccacttaccattttttccttgccagtagttatacatttttttgtgtaaatcaagaacttgttttttattcatatcaacctgttcttgtatatccgttagcgaaagtataccagtttttaattcttgatacaatatctttattgaatctgctctcgacataatggctttctcatattgcaggatttcaagggcgttcagtttagccagtacaatcacgcccctttttaattttcagatatgtaacactgctgtctttaaggggtgagccgtttgtaatgatagattttgtatcatacacctgtctggtatattctttctgaaagacgacattctcttgtgttaaatcctgtagaatatcatctgtaagcattaacttttgttcaattggcattttaaggttttgagatttgaaaaatgccttttttttgtgttcctttaactctaggtctttaccaaaatatttgcttaaataacgtcctctgttctccatgctgtctacatcaatgcggtttattttgataaatccatacgtccataaatcttgtagtttttcctttgccacaaacggaaaatcaaagaaaataacatggtagtggattgctccacgtttctgtttctcccacgttgcaatatatttcaatgtctggactttggtttgatacagatagtaatttaatcgttgtataaaatacttaaattccttgttggttatagtgatgtcttgaatattctctcggaatgtcagcgttaaaaatttggtcttgttatcaaaattgcagtcaacaatacgggcaatctcccaacgggtttgctcatagtgtttttgcttgcgctttaaactgtcatattgcttatgagccgacatttcatcaaatactttacgtttatgtgcttgtgtattacttgtttttgaatctgaatttgaatggctgtaaattggagtttcatagaaatacacttctttcgtagtaggagtttcaatgattttcgtattgtatacaaaacattgttttgctttgcccacgaaattcacctcgtatcctattttgtatgtgcttgtttctactccgatttttcggaagatgttgttttatatatcaagtaaagatagaacgatatctgtttccttaaatggtgcagatagtcagcaccttatgacgttgtccggcactgactatctgccccctttagggaactattttgttccggcttttctgatattggcagcttctgctttgacggataagcgtccattataaagactcgcccatgtatgtagtccctcaaatgaaacggtcacttgtcctctttgctccaattcttcattagacacaagctgattggcatttttaacgccaactttgattttctcaaatttcagctttggaaaaagaacagtgtagtagaagcctagtttctctttggtgttgtagtcaatccattcagatacttcgactaattgaaattgttcctccagtttgtccgggtttaaaatgaaatcagttcctctaatcaataaatatgacctccttaaaatatttgattatctgatattcagatatttattataatacagcacagaataagcgatgtcaagagaaatatcttaatatccgataaaaagattgacagagtgaaaacattgaaatataatgagcataaacaaggaggattgcgatgaataaaataaaagaattgagaaaagaaaataacatcacagttgcggaattggcaaaagagttgggaatttcacaaagtatgctgactaactatgaaaatgggaatggaactccaagggatgattctatatgggataggttatcacaactgtttggcgtaagcaaaagtcatgttatgggattgactacagatattgatgtggttcacagaaagaaaaaatttaaagcggttgtggatatgtcagaacccatatcaatacaagtggaaaatcaaacagacattgatatcttgactaagttggacctactggatgatgaagatacaaacaaggtattagactttattaacaatcttcttactataaagaaatatgagggaattgaagatagtccaatcgaatatgtgacgaaatagcagaagtaatctaaggcgtccacttgcccagccgacccgccgccctgttaggaaccgtcgctctgggcatccttcggaacgttggtttttgaaagaacacgaacaagaaagaactagatgtggaaagtatacagagaatagcagacagcacgattgcgaaagtgttgtctgttattctttttcttagtcatattcaaaaacaacggttttaaagggtttctctccataacgaatcagccatgcagaataatagagattgatttcaagggtagtaggagtgccgttaatcttgttgtgttctgtttcgattttacgaatagtctcatcaattccccaatatttgtaaacaataacagttagctccgtgtctcgtgtgccttgattactgaatgacatgctgttacggacatggtaatcgggcagactgatgtaatagcagattccggcaattagacagaacaataaaaatgtagttatgacttttattttcatgtgtatgcacctctctttcttaaatccctaaggggataactatatagtacctcgctgtatagtgaattactacataaagatttattaaatatactttgtgtaggggtgatgtatatgaattatggacatttagagttaaggatagaagaactgttgaaagaacgggatatcagtaagaataccatttgcaaagagttggatattccgaggtcaaattttaacagatattgcagaaatgaatttcaaaggctggatgcaaatttgatttgtaagttatgtgattattttgattgtgaagttggcgaattgatttgttatgtaaaagaataacgagctgttgctgttattggcatggaatggataaaagggtatgcggaggtgtgaaagtctctcatacctttttacttgtgtattttataaaatcgaattatactgtgagtagtgaaagttaagcaaatagaatttgtaaatctggacaaatccgatttattatatgaaaggaaattatattatgaaaattgatgtatgttcaaagaaagaacaggattatattattgaaagactggtggaatataatctatctcaggttgaggctaaacagaaagaaaatttcatagatttaagcaagaaaatcggtaaggatgataagattgttgctggtattgtagcaaggatgtattgttggaatgtagtttatgttgatacattgtgggtcgattctagttatagagggaaaaaacttggtagcttacttttagaagaagttgaaaatgatgctaaatcaaaaggtgctaaacttattcatcttgatacatttgattttcaagccaaagaattttatgagaagcaagggtatattgtatttggtatattagaaaattgtccagaaaagcattatagatattatttgaaaaaagtcttatagttcttaaatcaaacttttggtcaatatataaaactcgacaacttccagtttgtcaaaattaagtacataatcttgcttggcacaatggcggaaattagccacagggaacacctatggctagtgttttttagctaatctattgaatttaataaacttttagaacaaacggatatacaagttttcctttctgaccgtttaggtcgcttgtttatatttgtcattggttggcttttggttgggattcttaaataccccttacaaagcccgtaaatacgttgttcgttgaccgtagaggtcgcgtgttcgaatcacgtcactccgattgaatgatacagtatctgatatgggtactgtattttttatgtcaaagagtgtaattcttggtatttgtaaaaacgtcagcgatatatggtttatagatgctttaattgctatagcttaaagctatagcaacacacaagttatatgtattatacaaatcctccaaatcatgctactctatatccagacaaaaacaacaggaagaaaagcacaggaggatatagaaaatgagcaaataccagacaccatacagatatgattttgtgggaagttttttaagaccacaggaagtaaaacaggcaaaagcagattacagtgaaggaaagatcacaaaagaagaatgtgatgctattgttgataaggcagtcacagaagtagttgcaaagcagaaagagttgggattccacatcattacagacggagaattccgaagaacttactggcatctggacttcatgtggggatttgaaggcgtttgtcatgagcagacaggagcaggtgtccagttcaatgcagagatggcagcagtagaagatacttacctgataggaaaagtaaaggcaaaagcacatccatttgtagaaggattcaaattcttaaaacagtttgaagatgaaaatacagttgcaaaatatacgattccggcaccggcgcagatgttccagcagatgatcgttccggcaaattttgaaaatacaagaaaatattatgcaacaaatgaagaactgatccgggatatcgggaaggcttatcaggaagtcattaagcagttttacgaggcaggatgccgcaaccttcagctggatgactgtacatggggagcaattgtaggtgatgctgcaaaacagagatataagaatcttggacaggatctggacgaagtaaaaggacagctgctggaagtaaataaccttgcattagaaggaaaaccggcagatatggtgatcacttcacatatctgtagaggtaactatcactcaacattctttacaagtggtccatatgattccgtagcagactatgtatttgcaaaggaaaatgtagacgcattattcctggaatatgatgatgcaagatcaggaggatttgcaccgcttgcaaaagtttcagaggataagaaagtcgttctgggactggtcacaactaagtcaccggaacttgaagacaaagaaaccgtgatcaaaagaatccatgaagcagaaaagtatattccgcttgagagattgtatttaagcccgcagtgtggatttgcatcctgcgaaatcggtaataaactgacagaagaagagcagtgggcaaaattaaaactggtaaaagagatcgctgaagaagtgtggaaggacgcataagataatacataataaaaaataaagaatcagaaaaatggtttgtgagaaaaaagtcgtgatgaatgtcacggcttttttgcataccaaagtatgcaagagaagttgccagtggcaagttctctgtataaaatcatacattgtcaaaaatatgtctgtgggcactatgcacaaaaaaacattagtgatatactgaaaccaatacaaaatacacaaagaggaggaatatggatgttagatgcatcatactacgaaaaagcggatgaaattatcgcacagtacagctgtgaagagaggtctctgataccgatcgttcagggaattcaggaagaataccgttatcttccgccggaacttttgacatatgttgccggaaagctggggatttcggaagcaaaagcgtacagtgtagcgagcttttatgagaatttctcatttgaagcaaaaggaaagtatgtcattaaggtatgtgacggaacggcctgtcatgtaagaaaatccgtgccgatcctggaaagcctgtacaaagaacttgggcttggaaagaaaaagcacacgacagatgatcagttatttaccgtagagacggtatcatgcctgggcgcatgcggacttgcgccggcagttatggtaaatgacgaggtccatccaaagatgacaccggagaagatgagcgaactgatcggaaagctgcgaggtgaagaacaggtatgagaatagagaacagattacagcttcagctgtggagagaagaatgtaaggaaaagcatcagaaagaaaagtgccggattctggtatgtggtggaaccggatgtctggcagggggatcggataagatttatgcacgttttaaagaaatgtcggaaggtatggatcatgtcacggttaaaatcggagaagagattgcacatccgggagtaaagatgagcgggtgtcatggattctgtgagatgggcccattagtaagaattgaaccatacaattacctgtatctgaaagtaaaattagaagactgcgaggaaatttttgaaaagacgatcctgcgcggagaaccggtagaacggctgatgtatcatgatgatcacaaagtatatgagacacaggaagagattccgttctatgccgagcagacacgactggtcctgaaaaactgtggacatatcgatgcggaacatatcgaggaagcaattgcagccggtgcatatgaatcatttgaaaaagcggtgttcgagatgacgccggaggctgttataaagagcgtattagattccggactccggggacgcgggggtgcaggattcccgaccggaagaaaatggtcacaggtagctggacagaaagaaaaagtcagatatgttgtctgtaacggtgatgaaggagatccgggagcgttcatggacagaagtgtgatggaaggtgacccgcaccgtatgatcgaaggcatgatgattgcagcctatgcagtacaggcacatgagggatacatttatgtaagggcagaatacccgctggcagtcagaagactgaagattgcgattgaacaggcagaagagaaaggactgctcggagataatatactgggaaccggattcagtttccatcttcatattaacagaggtgcgggagcatttgtctgtggcgaaggttcggctcttacggcatctatcgaaggaaagagaggaatgccgagagtaaaaccgcctagaactgtagaacagggactgtgggcgaaaccgactgtattaaataacgtagagacatatgcgaatgtcccgatgatcatcaaaaacggtgcagactggttttgcaggatcggtacgaaagaaagtccgggaacaaaagcatttgccctgacgggaaatgtaaagaacacaggactgatcgaagtaccgatgggaattacgctccgggagattatctttgatatcggcggcggaattaagaataataagaaattcaaagccgttcagatcggaggcccgtccggaggctgtctggtcgagtcacagcttgacagtaagatggattttgattcactgacaaagatcggtgcaatgatcggctcgggcggcctggtagttatggatgaagacacttgtatggtagaggtggccagattcttcatgaattttacacagagagaaagctgtggaaaatgtgtgccatgccgggaaggaaccaaacgtatgctggaaattctggaacggattgtagagggcaatggaaagctgagtgatctggatgaactggaagaactggcagatatgatcgaaagcacggcactgtgcggacttggaaagagtgcaccaaagccggttatcagtacgatccatgcgttcagagaggaatacgaagagcatatcttaaagaaacactgcaaagcaggcgtctgttcaaatctccgtacatataagattgatttggaaaaatgtaaaggctgctcgaaatgtgcaagaaactgcccggtgaatgcaatcacaggcaagatcaagacaccatttgtgatagacaatgagaaatgtatcaagtgcggtacctgtaaagataactgtgcatttggtgcaatctatacggaataggaggggatattatgggaatcatgacaatcgatgggcagcgtgtggaattcacggacgaaccgaatgtgctgtctgtgatcagaaaggccggaattgatattccaacattgtgctatcactcagaattatcgatttacggagcttgccgtctgtgtacggtggaaaatgagagaggaaagacatttgcttcctgttcggaaaaaccaagagacggaatggtgatctatacaaatacgcctagacttatgcattatagaaagctgatcctggagttactgcttgcggcacattgcagagactgtacaacttgtatcaaaagcggggaatgtcaccttcaggaactggcacatagactcggtgtacacgaagtgcgatttgaaaatgtcagggaaatgcagccgatcgataccagttctccggccatcataagagatccgaataaatgtatcttatgcggagactgtgtacgtatgtgtgacaatatccagaatatcaatgccattgactttgcttatcgtggaaccgatgcactggtaacacctgcatttaataagaagatagcagagacagactgtgtaggctgcggacaatgcagagttgtctgtccgacaggtgcgatcagtattcatacgaatattgatccggtatgggaagcgctggcagataagaatacgaaggtgatcgcacagatcgcaccggcagtacgtgtggcagtcggcgatcagtttggctatgcaaagggtgaaaatgtcatgggcaaactggtaggtgttctgcaccggctgggattcgatgaagtatatgatacatcttacggagcagaccttactgtaatagaggagtcaaaagaatttatcgaaagattcacagcaggagaaaagctgccgttatttacatcctgttgtccggcatgggtcaaacactgcgagaccaaatatccggaactggcagaaaacttatcgacctgcagatctccgcagcagatgttcggagctgtagtgcgggagtactataaggatccggaaaagaatgaaggaaagagactggtatccgtatcgatcatgccgtgtacggcaaagaaagaagaaatcctgcgtccggagtctatgacaaatggaaaacaggacgtagactatgtactgacaaccacagagatcatccgaatgatcaaaaaatccggtattgtattcgataaagtagagattgaagcagcggatgtaccatttggaattggatcaggaagtggtgtgatattcggtgtgacaggcggtgtgacagaagcagttcttagaagattacagcaggggcataaccgtgtggacatggaagcaattaagacaagcggtgtccgtggtgatgaaggtatcaaagaactgacgtataattataacggacgggaaatcaaagctgctgttgtaagtggacttgccaatgcagataaagtaatagagcggattaaaaataacgaggtacattatgattttgtagaagtgatggcatgcagaagaggctgcatcatgggcggcggacagccggtcaatgcaggccctagaacgaagagggccagaatgaaggggctgtatgatacagatgtcaatacacagatcaagaaatcaaatgaaaatccgatgatcctgtcactttatgactccttgctgaaaggaaaagaacacgaattacttcaccggaactttacgaaataatttatggtatgtaaaaagaggaatcccgaagatcacattgatccggggttcctcttttgttcttgttattcatttaatctacataatacacataattttctttacgaggctttgccttcggcacatctctggccggatatccgagcacgcagtgtccgatgccttcataatcaccttccacgccccattttttcaaaagagccttaccttcttccgatgcaaagacttctttcgcccggtggatccagcagcttccgattccaagagaagcggcagcattcatcagattgcccatgacaaggcttccgtcatatacacatgtcggtctgttcttatcggccaataccaccagaacaaccggtgctccgtagaacggatccgtatcggttcccataacggctgcattcattttggaaagctggtcacgggtatctttatccctaacagcaacaatcaccggtgactgcattcccatgccggttgcagcataagtacctgcttcaagaatcagatccagatcttctttcgggatcatgtccgatttgtaaccgcgtacactgcggcgttcgatcatgttcttaatgctttcgttcataaatcaagactcctttaaatataaagtgaaaaataaaatctcataatataaaagaaaataaaacgaaacgaatgagttgcattcttacacttctttgttctcgtatacatgtctcttgatcgcttcgaaactttctgtactgatcacatgctccatcttacatgcatcggcagcagcgacatccgcaggtacgccgagatgtatcagccaggatgataaaagggtgtgacgttcgtaaatcatatttgcaatctccagaccggatggtgtcaaatggataaatccctgatcatctactttaatatgttctttttcacgaagattcttcatagcaacactgacactggactttttaaaaccaagttcgttggcaatatctacggaacgcacgacaggcagtttctggcttaaaattagaattgtttcaagatagttctcggcagattcatttaatacattgctcataataagtcattccttcctttatacgttagcattgagtttagtataacacagttggtcatgcctggcaaacggaagaaaaaacttattgagaaaaaataatcaataaaatgaaataaagtggttgacagctaacaaacgttagcatatactaactattgcaagggataatgaaaacatttatcattatcaaaatccttgggaaattacatggaaagatgtaaaaaatactacataaagaaaatgaggtgttattatgccacttacaatggccggtatcggtgaaacaaacacaatctcacgtattggtggaaatgaagagacaagacgttttctggcaaatcttggatttgttgcaggagcggaagttgttgtactgtcgaagatcggaggcaatgtgatcgtaaatgtcaaagactccagagtggcagtaaatgaggatatggcgcggcacatcatggtttagtaccggggtgtctgctgtattatagatactaacaatctaaggaaaggagaaacagcaatgactttaggtgatgcaaaagttggaagtacagttgttgtaacgaagattgaaggggacagcgcatacaagcgccgtattatggacatgggaatcacaaaaggcagtgaactgtatatcagaaaagtagctcctctcggagatcctgtagagattacagtcagaggctatgaactttcagtaagaaaagacgatgcccagtgtgttcaggtaaaataagacttaccgaaggaactgacagatacatattgtcgcattagaatttacacgttcaaggaggtaaataggaatgggaattaagatcgcacttgcgggaaacccaaactgtggtaagaccacaatgtttaatgccttaacgggtgccaaccagtatgttggtaactggccgggggttacagtagagaaaaaagaaggaaaattaaaaggaaagagaaagaatgataacattgttgtaacagaccttccgggtatctattctctttcaccgtacacattggaagaagtagtcagccgtgattatatcttaaatgataatccggatgttattattgatcttgtagatgcaacgaatattgaacgtaacctgtatcttacaacacagctgatcgagacaggtgttcctgtagttatcgcattgaacatgacagaccttttggagaagagaggaatcaagatcgatacaaagagactttctatgttgttagattgcccgatcgttgagacttctgccctgaaacagacaggactggatgcgctggttgagacagcaatcaaagtggctaataaaaaagaagttgatcttccaagagaaatcttctctaaagaaatggaagcagcagttgcagatgtgaaaggggttctcccggatacaatctcagaaggcaagaagagatggtatgcagtgaaattccttgagaacgacagcaaggttgtagaaagcatgaatctttctgcagcagcaaaagcagcagttgataaagacagaaaagaacttgagacaaaacatgacgatgatatggaaagtatcgtaacagatgaacgttacaaattcatccagaagatcgttgagacaacagttaaaaaaggaaaagacaaattaacaacatccgataagatcgaccggatcgttacaaaccgtattcttggtattccgatcttcatcgcagttatgtttgttgtctactacatttctgtaacaacaatcggtacaatcgttacagactggacaaatgatacattcgtagttgcaattcaggatatcgcttcgaaaggactggaagcagctggtgtaagcagtgtgatcgaaggactggtagttgacggtatcattggtggtatcggagccgtacttggattcgttcctcagatggcaatcctgttcctcttcctttctattctagaagactgcggatacatggtacgtattgcattcgttatggaccgtgtattcagacacttcggactgtccggtaagagtttcatcccgcttctgatctcatcaggttgtggtatccctggaatcatggcttctaagaccattgaacaggacaatgacagacgtctgacaattatgacagcaacatttatcccttgcggagcgaaattaccggttatcgcactgatgggtggtattatgacaagctacgcaacaggaagttatacagcaggtggatttatggcaccgatcatgtactttgtcggtattgtagccgtattagtagcagcgatcatcctgaagaagacaaaaccattctcaggaaaaccggcaccattcgttatggagcttccacagtatcatattccacaggctaagacagttcttcttcatgtatgggagagactgaaaggctttatcatcaaagccggaaccatcctgttccttgcttgtgtagtaatgtggttccttggtggattcggatttacaaatggcggattcggacttgtagatgacagcgcagacagcttacttgcagtgatcggtggatttatcgcaccaatctttgcaccacttggatttggagagtggcagccggtagcggcttctctttccggattcacagcaaaagaagcaatcgtttcaacaatgggagtacttgcgaacgtagcagagagcaagtcagaagataccgtaacagttgcacaggcaatccagtcatggttcccgagtgcagtagcagcattctcattcctgttatttaacctgttagattctccttgcctggcagcgatcgcaacaatggcacagcagatgcagtccagaaaatggttctggtttgcaatcctgttccagaatgtattcgcatatctcgtaacactttgtgtataccagatcggtacattagtaaccggcggcggatttggagttggtacagcagtggcatttgtggtagtagcagtcatgctgttcctgttattcagacctgatccgtataaagatcagaaagtttattccaaacgttctgtaaatgcataagtagagcggaccggacgtaactcatttacgtccggatttccctttgaaggaggcagttttcatggtagccattttagcagatatcattattttagcattaatattagggtattgcgcatacctggtatacggaattgtgaagagatttaaaaatggagtcatccagggatgtggcggcagctgtgccggatgcagtggatgcggtggtggatgctgcagttcggatcctgatgaagtgaaaaaaatgatcgaaaatatgtatggtaaataaaggagttggcagtcatgggcaattcgacaggctctatgttctacctgttcgtgatcgtgatcgtcctttacattgtcggtgcttctatctatcaggcatttctctggttcaggaaatggcaggagaaaaaaagagacgaaaagttcagcatggataatgaggagaacaaagaatagagggatagagatatggcagatattatagttgtattaatcgtgatcgttcttcttggatttgcattaagaggagcaatcaggcattttaaaggtgacagtccctgctgtggcggcggaaccggtatcatcaaaactgacgataaagaactgaagaatccggtgatcggaaagaagacagttcatatcgaaggtatgacctgtgagcactgcgtacagtcagtaaagaaagcgttaaatgagatagaaggtgtttcggcaagagtggacttacagaagaaagaagcagtggtgtcttatgaccgtgagattgaaaatgatgttttgaaaaaaacagttgaaaaagcaggatttcaggttgtttctataacagagtagatacgataggaggatgacaggtggataaggcaaaagaagcgattgtacagaaactaaaagccagtggatgcaggatcaccaagcagagactgatgcttctggatattatactggaagaaaactgttcctgttgcaaagaaatctattaccgcgcatcccggatcgatccaagtatcggaacagcaaccgtataccggatgatcaacaagctggaggaaatcggagcgatcaaccgcaggaacatgtataaagtagcatgtgatccggactgtgacctgcagaatgcatgtacggttgaactggacgatgatacgatcaagcatctgtctgcaaagaactggaatgctgtgatacaggcaggcttgaaagcatgtggttatgtagaagatcagaaagtacggaacataacagtgcagtcataaagatgctattgaaaaaatttatcaatagcatgaaaaatatttgaaaaggacattctttggtgttataatttgcagaaacaaaaatgactgccggacacaaatgaagggatgtcctttttgttataacgtttatagtacttaattaataaatatacaatggagggaatacatatgttaaatttaaaagacattaattggaaaaaaccaggactttttgcagcaggagtagctttcggaacagcaggaatcaagattctgacaagtgatgatgccaagaaattatatacaaactgtacagcagccgtattaagagcaaaatcttgtgtgatgaagactgcaacaagcgttcaggagaatgcaggagatattttagcagaagcaaagcagatcaatgaagatagagcagcagaggcagaagcagaagttgtagatgatttttgcgagacagaagagacagcagaagatactgctgaagcaacagaagaataaaaatccggcactgaagataaagaaaagttgccggaaatacatagacacaggcacctgcggaacatctgcaggtgcttttgtaagactagcaagaggtgacaagagtgaaatttaagattaagcatgagataagaggaagaatccgtatccacatggagcagaaacgcatgactcatgaacaggcggacattcttctcttttatctgcagaatatagacggcgtattccgcgcagatgtctatgacagaacggcggacgcaacaattcattataagggaaacagagaaacaatcatcgaaggactccgcagattccgttatgaggaagtagaagtgccgaatggcctgttagagacatccggaagagcaatgaatgcagagtatcaggagaaactggtggataagattctgttccattatggaagaaaattcttactgccatatccgatctcagcagcatatacaaccattatgtctgcaaaatatatctggaaaggtattaagacactgatggaaagaaaactggaagtccctgtactggacgctacggcgatcggtgtctctatcttaagaagtgactttgatactgcgggatctgtgatgttcttacttggaatcggagaacttctggaagagtggacacataagaaatcagtcgatgatctggcaaggaccatgtcattgaatgtcggaaaagtatggctgaagacagaagaccaggccgtccttgttccgtcaagtaagattaaagccggtgatcaggtggtagtccatatgggaaatgtaattccatttgacggtgaagttgtggacggagaagcaatgatcaatcaggcttccctgacaggagaatctgtgccggtaagaagaacaattggaaattatgtatatgcaggaactgttgtggaagaaggagaggtcacaattaatgtaaaggctgtcggtggatccagccgttacgaaaagattgcggctatgatagaagattctgaaaaattgaaatcaggtctggaaagcagggcagaacatctggcagacaaactggttccgtattctcttggaggaacagcacttacctggctgcttacaagaaatacgacaaaagcattgtctattctgatggtagatttctcctgtgctttaaaacttgcgatgccaatctccgtactctctgcgatccgcgaagcaggtatgtataagattacagtaaaaggtggaaaatatctggaagcagttgccgaagcagataccatcgtatttgataagacgggaacactgacaaaagcaaaaccgacagtggcaaaagtggtatcattcaatgaaatgaatgaagatgaactgctccgtattgctgcatgcctggaggaacatttcccgcattctatggcaaaagcagttgtcagtgcagcaaaggcaaaacatctggatcatgaggagatgcattcaaaagtggaatacatcgtagcccatggaatttccacacagatcgaaggaaagaaagctgttatcggaagctatcattttgtattcgaagatgaaaaggtaatcattccagatggtaagaaagaacagtttgataatctgccggaagaatattcgcatttgtatatggcgattgaaggaaaacttgcagcagtgatctgcatcgaagatccgttacgtgaagaagcagcagaggtaataaaggaacttcgtgaagcgggattaagtaagattgttatgatgaccggtgacagtgaacgtaccgcaaaagcaattgcaaaacgcgtaggcgtggatgaatactatgcggaagtactgccggaagataaggcaagtttttgtgataaagaaaaagcagcagggcgtaaggttattatgatcggtgatggcatcaacgactcgccggcactttcagcggccaatgtaggtattgctatcagtgatggcgcagaacttgcaagagagatcgcagatattaccgttggtgcagataatttaagagaactggtaactttaaagaagatcagtaatggcctgatcaagcggatcagccataattatcacacgattgttggattcaatgcgggactgatcgcacttggtgtatgtggtgtgatcatgccgacgacttcagcattgttacataatacatcgacgctgttgatcggacttaagagtatgcagaatcttttagatgaataaaatatctttataaataaaaacgaaataacagataagaaaacaaaaagaagcttgatgaaataaattttcatcaagcttcttttttgcacataattcttgacagtctggaaagaatgatatagtattcaaatatagattgttagatagctctaacattcgttaggaggaactaagatggcgaacagatatctgatcgaaaaatgtctggtggagcattgctcggcaacacttgcatcaatgaaatcagcaaatttattcaatatgacatttgttgatgatacggatatagaagaacagattgagttttggaatcagtgcatgaaagaaaaaggtatccgtctctatatattacggagacaggagaaccgcgtattggtttatgtctatcgtaaaaaacagctcgaggtcagtctgaaccggccgggagtagcaaagttcctcaaaaaatacggctatggaagcacggatgtggaatatgcactgaaccggttaaaatcaagaatcggtgaaaacaatgaattcccgcatgaaatcggagtttttctcgattatccactgggagatgtgatcggctttattacaaatgaagggcgcaacttcaagtgtgcaggatgctggaaggtatattgtgatgagtgtgcatgccggaaaacatttgaaaaatataaaaaatgcagagatgtctatgtacgtctctggcagcagggaagaagtgttttgcagcttacagtggctgcctgacatataaaaatatcaatgaaagaggtagaaaacaatgagtaaaattgcagtagtatattggagcggaacaggtaacacagaggcaatggccaatgaagtagcagagggagcaaaagctgcaggagcagaagtggatgtattaacagcttcagaattcggtgcagacaagatggacgcttacgatgcggtagcattcggctgcccggctatgggagcagaagaactggaagacagcgaattcgagccaatgttctctgactgcgaaggcaaacttggcggaaagaagatcgcactcttcggatcttacggatggggagacggagaatggatgcgtacatgggaagagacatgcaaagctgacggagcggttcttgcatgcgagagtgtacttgcgaacgaagcaccggatgatgaagcagtagcagcctgccaggcacttggaaaggcactttgctagccaggggggacgtgaaaagtggttttttgtttgtcccaggtggcttggtttcagaaatgaaacgtccgacatacagatatatcctttgggcggtaatcagaagaggttctggttgccgcttttttccatgcattcgaaagcagaaaatgtcttcggtcaatgttctatcggttaattttctcatttttaattaaaaaaattccttgatttacccaaaaatgttatgatatgctaatgatagttaggaagacctaacttatgtgtgaataaatcatggcagactccttctgtctcgtccctgagcaagagagacagaagtggttccatgggaaaggatcttgacatggagaattttttagcaattgagaaagttattggaagagagattattgattcgagaggtaatccgacggtagaggcagaagtatatcttctggatggaactgtaggaagaggtacagcaccaagcggcgcatctacaggagaatttgaagcactggaactgcgtgacggagataaatcccgtttcggcggaaaaggtgtaaccagggccgtagagaatattaatacagtgatcaacgatgcactgaaaggcgtagacgcatccgatatctacgcagtagatgcagcaatgagcgcagcagatggaacaaaagacaaatcaaacttaggtgcaaatgcaatccttgcagtatcaatcgcaagtgcacgtgcggcggcaaatgcactggagattccgctttaccgtttcctcggtggagtcaatggtaacagacttccggtacctatgatgaatatattaaatgggggcgcacatgcagccaatacagtagatgtacaggaatttatgatcatgcctgtaggagcaccaagcttcaaagaagcactccgctggtgcgcagaagtcttccatgcactggcagcattattaaaatcaaaaggacttgcaacatctgtaggggatgaaggtgggtttgcaccggatcttgcatccgatgaagaagcaatccagtacatcttagacgcagtaaaagatgctggatatgagcctggaaaagactttatgattgctatggatgcagcatcttctgagtggaaaggtgagaggaagggcgaatatgtacttccaaaggcaggtacaaaatttacttccgaagaactcatcgagcactggaagaaactggtagacaagtatccgatcatctctatcgaagatgcattagacgaagaagactgggaaggatggcagaaactgacagctgaacttggagacaaagtacagttagtcggagacgatctgttcgtaacgaatacggaaagactttccaaaggtatcgaacttggatgcggtaactcaatccttatcaagttaaaccagatcggatctgtatcagagacactggaagcaatcaagatggctcataaggccggctacacagcaatctcatctcaccgttctggagagacagaagatacaacaattgcagaccttgcagtagcattgaatacctgccagatcaaaacaggagcaccttcaagatcagaacgagttgcaaaatacaatcagttactgagaatcgaggaagagcttggagcaagtgctgtatatcctggaaaagcagcatttaatgtgaagaacagataagccaatggggacggggaaaatggttttttccccgtccccgctggcttttttcgtgttgttatttgaaagctattttgaaaaagtcagaaaataaaattattttggcctgaattgtgataaaataatggtgagattaaagaccagaggggacagaaaaaaggccgggaaaccccgtccccactggctcgaaaggaaggatcggtatgaaaaattattcagaagatataagcagacagtatcatattcaggttgccaaaggtgaagtcggacgttatgtgatcatgccgggagacccgggaagatgtgaaaagatagcggaatatctggaaaatccggttctggttgcaagtaaccgggagtttacgacttatacggggatgctggatggtgagaaagtcagtgtgacatcgacaggaattggaggaccgtcggcagcaattgcactggaagaactggtacgctgcggagcagatacatttgtccggatcggaacctgcggtggaatgcagccggaagtaaaaagcggtgatattgtgatcgcaaccggttcaatccgcatggaagggacaagcaaagaatatgcaccaatcgaatatccggcagttgccagtctggaggtaacgaatgcattggtgcaggctgcaaaagaagatggctgcatttggcatacaggggtggtacaatcaaaggatgcattctatggacagcatgagccggaagcaatgcctgtcggctatgaactgctgaacaaatgggaagcatggaagaagatgggatgtctggcttccgagatggaatcagcggcacttttcatagtggccggtaaattgtgtgtcagagcaggggcatgctttctggttatggcaaatcaggaaagagagaagctcggcctggaaaatccggtggtacatgatactaatatggcagtccggacagcagtagatgcagtgagaaatctgatccggtgtgataaagaaaaagaataacagaagaagggaaataagatggggaagacagagaacagaaacaagccgaggtataatccaaaacaactgatcgaaatttcaataggacagttaaagtattcttacacaccttattcaggattcaaagtcggagttgcattattggcgaaaaatggaagcgtatatacgggatgcaatattgaaaatgcagcatatacaccgacaaattgtgcagaaaggacagcattttttaaggcagtaagtgaaggcgtgaaggaattcgatgcaatctgtattgtaggaggaaaagatggggtcttgacagaatatgcaccgccgtgcggagtgtgcagacaggtaatgatggaattctgtgatcctgaaacatttcagatcattcttgcaacagatctggaagattatgatatctatacgttaaatgagttattaccgttgggattcggacctgggaatctgaaaaaagagtaaggggggaaatcatgacagcagaagaattaaaagcattgccaaaggtcgagctgcactgtcatttggacggatcgctgagccacacatttatagaaaaaagactgggacggaaagtgtcacaaagtgagctcagtgtatctgaagattgtagaagcctgaatgaatatctgcagaaatttgatcttccggggaaatgtatcatgaatgaagccggactgcaagaagctggctatgatgtattaagaagtatgaaacaggaaaatgtctgctatgcagagatccgttttgcaccgcttctgtctgagacgcaggatatgaactgtaacaaagttatcgaagcattgcttaacggactggaaagaggaaagaaagatttcggtatagagtatggagtaattacatgtgccatgcgtcatcacagtgaagaagagaatgccaggatgatccggactgcaagagcatatctgggatatggagtatgcgcggcagatcttgcaggagcagaaagcctgtatccgatgtcagagttcatggaactgttcaaaaagacgaaagcacttggcatgccatttaccttacatgcaggcgaatgtgggagcgtacagaatatcctcgattcagtagaagccggagccggaagaatcggacacggaattgccatgagagggcatgccgatatacagaaagaattgcagaaaaaaggcatcggtatcgagatgtgtccgatcagcaatctgcagacaaaagcggtagaaagcacaaaggattatccgatgcgggagttcctgaatgccgggttaaaggtaacggcaaataccgataaccgtacagtcagcaatacgacattgacaaaagaactggaatttatccagaagaattatggaatcaccgatgaagagattcatcttatgatgaggaacgcagtggatgtggcatttgcggatgatgcagtgaaagaaaggatgttgaagtatgtataaaaaactggaaaaatgtttaaaaagcataagaaaaaagacggatttcaaaccagaaaaagcagtcatcttaggatccggtctcggagattatgccgagaagatccagatagaaaagatcgtaaaatatacagacatcgaagactttccggtatcgaccgttcaggggcataaaggtcagtttgtcttcggatatgtgaaagatgttccggtcgtactgatgcagggaagagtgcattattatgaaggttacccgatgcaggacgttgtactcccgaccagactgatggggatgatgggagcaaagaagattcttctgactaatgctgcaggcggagtcaatccatcattcagaccgggtgactttatgctgatcacagatcacattacaacagcagtgccaagtccgttgatcggaccgaatatcgaagaactcggaaccagattcccggatatgagtgaggtatacagtaaaaatcttcagaaaatcatccgtaaaagtgcaaaagactgcggaataccacttcaggaaggtgtatacgtacagctgaccgggccgaattacgagacaccggcagaaatccgaatggtcagaagctggggcgcagacgcagtcggtatgagtactgcatgcgaagccatggcagccagacatatggaaatggaagtgtgcggaatctcctgcattacgaatatggcagcaggcgtcagtaatgcaaggcttaaccacgccgaagttcaggagacggcggacagggtggcgaaagattttgaaaaactggtgacagatgtgataatttctatttaatgcattatggcggctgtcaccgatcggaataaacttacaaggtcctatcttgtgctgactccaacatggggaaattctaaagcaaacggtcaacttttttacttaagaattaccaaccatgagtccgtatgcacaggataggaccttttattacggttcggggatctggcttagtgaattaaagtagaaactccctctaaaaaacggtataatggtataaaaagcagggagggcacaaacatcatgaaatctttctttgtatccagcacattctgtgacatgcaggcggaacgggatatcctgcatcagagagtatttccaagaatcagaaaacaattagaaccatacggagaagatatagaaggtctggacttgcgctggggcgtcgatacttcgaacatgtcagaaaaagaaagtggcaagcatgtggttaagatctgcattgatacgattgatcgctgcaaaccatatatgatcatactgatcggagagcggtacggatggatttacgagatattccaatgtcagtgcagccgattatcataagatacgggtacatatgatgaattgacgaaagaagaaaaggaaaaagataaggataatatccgtatgctgcagaagttgtttgcagaaagttaaaaaaacaggataacatttttgtgtagaaacaccaccccgaaaggagtggtgtttcttgtgtaataaacatattgagaaatgttctcaacatatcctcttcctatttttacaaaaatcatgtatcatactagttagataaagctaaccaatgtgcataaaaggaggaaatacatgagtatagtaatcgtaggcggacacgacagaatggttcatcaatataaaaaaatctgtaaagaatacaagtgcaaagcgaaagtattcacacagatgtctggaaatttaagtgaaaagatcggaagtcctgatttgttgatcctatttaccaacacagtatctcataagatggtacactgtgcagtgacagaagcagaaaaatgcaatgcacagattgtaagatgccatacaagcagtggaaatgcattaaatgagattcttcagaatgcctgtacagcataagtatctggaatgtgggaaagcccacgtcagatgctgacacctttccttgatcttttttaatctaaaaactccataaggataatccttgcatttggctgataatatgcgatataataaaaaacgcttgacttaaaacaaagagaggtttatggaatgaagagagagacatttggatcaagactgggcttcatccttgtatccgcagggtgtgctgttggcatcggaaatgtgtggaaattcccatatatgtgtggacagttcggtggagctgcatttattctgatatatctggtattccttctgatcatgggaattccggttatggtatgtgaatttggtgtcggacgtgcgagcagacacagcgttgccgccgcatatgagacactggaaccccagggaacaaagtggcatattacaaaatggatcggtatcattggatgctattttctgatgatgttctatactacggttggtggatggatgctgtattattgtgtcagaagcttcagtggagatttcgtaggtgcggatatggagacggtatcggctggatttagtgatatgcttggaaatatgcctcttatgacattttggacgattctgatctgtatcattggattcggtgtatgtgcatttggaatccagaaaggtatcgaaaaagtatccaagttcatgatgacagcattgcttttgatcatgatcgtacttgcgatccactctgtgatgatgaaaggtgccggagcgggaatccgcttttatctgattcctgatttcagacagatggcagagatcggaatcggaaacgtgattttcggggctatgagccaggcattctttacattatcaattggaatcggagcgatgttgatctttggaagttatatggaaaaagatcagcgtttattcggagaggctgtgaatattaccgtgcttgacacggtcgtagcgctgatggcaggtttcattattattccagcatgctttgcatacggaattgaaccgggagcgggtccgagccttatatttatcacaatcccgaatattttcgcgcaggtggcaggcgggcgtgtatggggaggattattcttcctgttcttaagctttgctgcatttacgacactggttgcggtatttgaaaatattatttcttttgatatggatttattcggatggtcaagaaagaagagtacactggtaagtctgattctgatcattatcttaagtatgccttgtgttatgggattcaatgtattggccggattcactccacttggagaaggatcgacaatcatggatctggaggacttcatcgtatcgaataacctgcttccgcttggaagtctgggatatgtattgttctgtacaaagaagaatggctggggatggaatcatttcctcgaagagatcaaccagggagaaggatggaagttcccgtcaggaatcaagggatatatgtcttatggattaccgcttctgatcatcatcatttacctgaagggatactatgataagttccagccgatgggaacaaaggtactggtcggatggatgatcgtggcaatactgttccttacatttgtgatcggatgttcctgtggaaaaagtaacgcagaaaaagtggataagtaaagtgaaaaagtaaaaagatgtggaaaaaggataagttctttcatgaagagagaaagaacttatcctttttttcgccatgcgttcgaaagaagatgccaatggcaagtcctataggtggcaaagtatgtaagtgaatttaatttttcgtctcgtatgctgcctggcgtacatccgggattgcgatcagtaccggatataatacagcagagataataagtccgccgactccctggataatattagcagggatacttgcagcagcgccgcttccatacaggaagaactcgcagataaaatatccaccggcgacgaatacgatatctgtaatacctccaaggataactgcgacgtaacggttcttaccgtaacggcacatcttttggtaaatcagtccggataccagtgcgacaagccccttgatcaccagtgtgatcggaacgtatacaaaatatccaccgatcaggtcagatagtgcagaaccgataccaccggcaagcataccgtatacaggaccaagaatgatacctgcaaggattacgatcgcatcacccggatggatataaccgccggttccaggtgtcggaatgcggatggacatcgtagcaacacaggccaatgcagcaaataatgctgtcataattatttttttcagattggaattcataacaaaaaccctctttcctttcgtaattgtcattactttacaatagtagtggcatgagataaagagccagttatgagaaaaaacaccataccagtttgaaagcacatcacttaatcagcggaagatgactgggctgcatgttttttatactgactgggtgacatgcccatgtaacgcttgaaaatctgaccataatatgccggtgaggaaaatcctacaagtccggcaatcgtagtaatattctccccgtccataagaaatggaatactgttctgaatccgtgtagacagcaggtaatcgaagatggtcatccgcatatattttttgaaaaagcggcagcattcgcttttgcacagtccggcgtgggcggcgatatcttcgagactgagttcttcggaagcatgctcctgaagataagaaagaatgtctttcaaacgctgtaaatgcttctgtggatgcggagtatcctgggcaatttggacataatgcagataaagccggtgccagatctcacagagcaggagatgaatacggaattcatagtcaggaagttccggctgttccgctatgccttcatatccgggaatgaaggcatcggaagaagattgaacctggcaggttaatgtatatatttcttttatgtattcgataatttcattttgccatggaatttccggttttaatacaagtgaagaccagaattcgttggaagtaataaaatcgacatatttggtctgcaggatactgttctcgtagccatagatgaatttgggatgaaatgtgacagagatataattacagtcctggttatcaatcatatatccggcatgtaaagcattactgttgcagaatatcccttcgccttctgagataatataacgctggtcattgacgacgtattccatctgtccggatacgaaccatgtaagttcgatctccggatgccagtgccacatgaaggaatgctgttcataagactgtattgcctccggggatacctgaacggggaaggtgtaacttccgtgttcttttacttcttttttgtttttttctgtaagaatctgaatacctttcatatcatcctccgtatataaaagtcaaaaacaaataaaatctcaatattcttataaaatatgccaatattcttattgtgagaatttgcatatctcattatgattatattatagcaataacagaagacagtcaactataaaaaagtatgtaagtggatatcaaagaaggatagaaacttaaggtatgaaagaaaaaatgataaaaatggaggtaatgaaatgcagaaagaacaattaattgcaaaatttcaggaattatacggagaaggcggggagatccgtacctattttgcaccgggacgagtgaatctgatcggagaacataccgattataacggaggacatgtatttccatgtgcgctgacaatggggacgtgggccgtagtaagaaacagagcggacagaaaattaggtttttattcattgaattttgaaaagcttggaattatcgaaacgagtcttgatgaattggttccgaataaagatgccggatggacaaattatccgaagggagtaatgtgggcattcgaaaagagagggtatgaactgacacatggaatggatatcctgatctatgggaatattccgaatggttccggactttcttcttccgcatcattggaagtactgacaggactgatgttaaaagatacatttggatttgaagatctctccatgatcgatcttgcattgatcggacagtattcagagaataacttcaatggctgtaactgtggaattatggatcagttcgcaagtgcgatgggtaagaaagatcatgcaatctttctggataccaatacattaaaatacgaatatgcaccggtcgttcttgaaaatgcgaagatcgtgatcatcaacagtaaggtaaagcacagtctggttgattctgcttacaatgacagaagaaatgaatgtgagactgcattaaaggaacttcagaaggttacagatataaagacacttggagatcttacagaggacggattcgaacagtacaaggatgcgatcaaagatccggtcagacagaaacgtgcaaaacatgcagtatatgaaaaccagcggacaatccgtgcggtagaagcactccgtaacaatgatgtgaaattattcggacaacttatgaatgcatcccatgagtcacttcgtcatgattatgaagtatcctgcgaagagatcgacatcttagtggatctggcgcaggctatgccgggagttattggttcgcgtatcaccggaggcggattcggcggatgtacggtcagcattgttgaagatgcaacagtggacagatttatcgaagagattggaaagacatataaagaaaaagtcggacatgaagcagaattctatgtagtagagattggtgacggagcaaagattgtataaattcacaggatagaaaaaggaacggaaggatcataatatgttgtatgaaaatattaagaaactggtagaatatggcattcagaccggactgacaccggaatgtgagagaatctacacaacaaatttattgttggaattatttcaggaagattcatacgaagatgtagaaatcgacagaagctctatcgaactggaaacagttctggaaggattactggatgaggcagtaaaaagaggaatcatcgaagacagtatcggattccgtgatctttttgatacaaagatcatgaattgcctggtgccaaggccggcccaggtacagaagacatttgcagaaaaatacgaagaatcgccggaaactgcaacagaatatttctacaaattaagtcaggatagtaattatatccgcagataccgtgtgaagaaagatatgaagtggaaagtggattccccatacggtgagattgacatcacaatcaatctttctaagccggaaaaggatccaaaggcgatcgcagcggcaagaaatgcaaagaatacagcatatccgaaatgtcagctttgtatggaaaatgaaggatatgcaggacggctggatcatccggcaagagaaaaccacagaatcattccgattgagattgcgggaggaaaatggggattccagtattcaccctatgtgtactataacgagcattgtattgtatttaacggacagcatattccgatgaagattgataagaaagcgtttgagaaattatttgatttcgtaaagttattcccacactattttctgggatccaatgcagatcttccgatcgttggaggctctatcttaagtcatgatcacttccaggggggacattatacatttgcaatggcaaaagcaccgattgagatcggattcaagattccgggatatgaagatgttgaggccggaattgtaaaatggccgttatctgtcatccgtatccgtcataaagatgaaaaacgtctgatcgaactggcagatcacattctcggatgctggagaggctataccgatgaagaggccttcatctatgcaaatacagacggggaaccacacaataccattacaccgattgcaagaaaacgtgatggattgtttgaactggatctgactcttcggaataatattacaaccgaagaacatccacttggcgtttatcatccacatgcagagtatcatcatattaaaaaggaaaatatcggactgatcgaagttatgggacttgcggtgcttccatccagattaaaagaagagctggagattcttgcggattatctggttcagaaaaaagatatcagaagtaatgaaaagattgcaaagcatgcggactgggcagatatattttgtaaaaaatatgatgggattacagaagaaaatgtaatggatatattgaaaaaagaagtcggtgaagtatttgtacatgtacttgaggatgccggagtgtataaatgtacagaaaagggaagagaagcatttttaagatttgtaaaaacattataagatgttagaaaaacgtcaaaaatcagaagggatgaaaagcctggaagatttttggcgttttgtcatgtttgagttgttatggtgaaaatgtaataaaattttacgtaaatataaagtgctgattgtgaatagagatagtagatgctataatgtaaatatagtttttcgggaaaaagtatattaaaagaaaaataaaatttcaggaggaaatttatatgagatatgaaatcaaaggagacacattaccggtagttatctgctatctggagggcggagagaagatgatcacagaaggaggcggaatgtcttggatgtcaccgaatatgaagatggagacgaccacgaatggaggaatcggcaaggcatttggaagaatgttttccggtgagcatatattccagaatatttataccgcacaagctggcaaggggatgattgcatttgcatcgtgctttcctggatccatcaaagcatttgaaatcggaccggggcgcgagatggtattccagaaaagtgcattccttgcaagcgaagcaggggtagaattgtctgtgttctttaataagaagttcagctctggattatttggcggagagggatttatcatgcagaaggtatctggtcagggaactgtatttgctgagtttgacggacatgtagtggagtatgaattgaacgccggacaggaaattgtcgtagatactggacatctggctgcaatggatgcttcatgccagatagagataaagagtgttcctggagtaaaaaatatgctgtttggaggagagggaatctttaataccgtggttcgtggaccaggaagggtatggcttcagacaatgccgatttcaaatgtagcaggagcactcggaccatatattacaacatccggtaaataatgcctgaaaggacaggaagtatgagaacaagaagtattcataaagctgcactgacggatgcggttacatcactggaagagtctggaaagaaactggcatataaagcggcagtcgagggaatcgttcttttagaaaatgacggaagtctgccattgaaggcaggaaagatagctttgtacggcgctggtgcgaagaagacgattaagggtggaacaggatcaggagaagtaaatgagcgccatgcagtctctgcttttgaaggactggaacaatcaggatttacagttactactatgcggtggatcgaagattatgaccaggcattcgaagagggtgaacaggaatatgcagaagaattcaggaaaaaactaagtccaaagaacttgtcagattttatgaacctgatgagcagtccatatagatatccttatggccgtgccatacaggagaaggatatagaagagtcggatacagacagttgtatttatgtggtatccagacaggctggtgaaggggcagacagaaaactggataaaaatgaatatgggctatcagagatagagcggatcaatattgcattctgcgcagaaagatataagaaactgatcgtagtgatcaatgtaggtggagtatttgatctgaatttcttaaatgaaatatccggaattaatacagttatttttatgggagagctaggtacaatgggaggtctggcactagcagatgttatttcaggaaaacagacgccatcagggaaacttacagatacctgggcaaaacattaccgggatcttccgtttgcagatgagtacagttatttgaatggtaatctggatgaggaatattatagagaaggtatctatgtaggataccgctattttgatacatttcatgtgacaccaagatatccgtttggctatggaatgtcgtatactaattttgcaatacggtttgaacagatgcagatggaaggcacgaagattcatgtgtatacagaagtggaaaataccggaagaatttatgatggtaaagaagttgtgcagatctatgtaagctgtccgaacggagagcttaaaaaggaagcacagcggctgactgcatttcataagacgaagttattaaagccgggagaaaaggaaaaacttatacttagttttgatctccgggatatgaccagctacagggaaaaagatgcagcaacggtccttgaaaaaggagaatatgtaatccgtctcggtaattccagcaggaataccagagtatgcggaatcttgagattatccagtgaaatcataacagaaaaacactcgcatatctgcaaaatcccaatgcatgtgacagaactggaacaaaaggaagaagatatccttcatgcaacctgtgactgcagacaaaactggggaagaggatgcgagattattattgaaaatatggaaaaaattcgaagcattccggtagaagaggataagataacagaagttgtgcatgaatatggtccggttaaaatatattcttcagaagagacagatgccgtgatggagcgtttaacactcagagacatggcagaactgtctgtgggcggaggtatgactggatcaagattctttgaagcgccaggtgcagccggggttacgtgcacaacactggaacaaaaaggaattccaaatgtagtaatggcagatggaccggcagggcttcggctgaacaaggtttcatcggtgtcattcaccggaaaggtaaaagggatagagccgaatatttcatgtatgaaatatcttccggagccggttaaaaaaatcatgcttggaaatccggatagcccgaatctgctctatcagtttactacggcatttccaagcgggatttcactggcatcgagctggaatctggaactggcggaagaagtgggaaatgcagttggaaaagagatggaatgttatggtgtaacctattggctggcaccaggacttaatattcacagaaatccactttgtggacgcaattttgaatactattcggaggatccactggtttcaggaaaatttgcagctgccattacaaaaggtgtgcagaagaatcgtgggtgttatgtgacgttgaagcatttctgctgcaataatcaggaggataatcgcaataagaccaatgtgaatgtcaatgaacgagcgcttagagaaatctatctgaagggtttcgagattgcggtaaaggaagcgggtccgggagccattatgagcagttataacaaagtaaatggtaaatatgtcaataacagttaccgacttctgacacaggtgcttcgaaatgaatggggatttgatggttttgtaatgacggactggtttgcaaccgggcgtaaatatggaaattcggcacatgcgattgcatccgggaatgatctgattatgccgggaagtgcaggtgcggtggatgagattgtgaaagcggtgtccaagggagtgatactggaagaggatgtaaaaagaagtgcagcgaatgtattgcgtggagtgttatccagcaggatatatcagggatttacaagaatgtatatgaaaaagtaaaaaggtgagaagtaagcgtgagactagataagaaaaaaatgattgctgccgcaattgtggcatgcacaacacttttcatagcaataggaatacatgaaaaaaaagatacacgaaaacaattaaaatttggggctacttatatgacaatgaataatccatattttgttaatatggatgaaaatattgaagagtcagtgcaggcaaagggggatatcttaattacaagagatcccctgcaggatcagaaaaaacaaaatgaacagataaaagatatgataaatgaagggattgatgtactttttctgcaacctgtagatcgaaataaagttcggcctgcacttgaactatgtaaaaaaaagcatatacctgtagttgttattgattctgaagtgtcggatacagaagcggttgtatccacgattgtttcggataactatgatgcgggggttcaatgtgcaaaagatatgatgaagaaaaaaacaagtgcaaatataataattgtaaatcagaaagcattgaattcaattaatgagagagtgaaaggttttagggatactattaaagggcatccacaatataagatagtagaagaaaaagagagtgccgcagagtttgaaattgcaatgaaagttatggagaaaattatttatgaaaagaaaaattatgatgttgtaatgggcggaaatgatccaattgctttagggtgcatagcagcgatgcaaatgactgataagacggatcaggttatggtttatggtgtggatggttcgccagatggaaaagcaatgataaaggcaggatttttagaaggaacagcggcacaatcaccaattaaaataggtgaaaaggcagttcagacagcatacagctatttggcaggggaaactgtaaaaaaacatgttacaataccggtcgaattaattacagcagataacttaaagttttacgacatgacaggatggcaataatgaaaaaaaattatagtttaattttgagaaagataatatttgcttttaatagtatatcagtgattggaattgcaatatttattttgtatacaacaagaaaaatatgtgatgcatatgttgcaagtgatttcttagaaaaagtcaatgcgattccggcaaatccttctgcattagtaggagaaattttggtattagtagctataatgggaatttcttttatatgcagagaaaaatttgttagggaaaatacaggagtatattatttgactttacttatagatttttgtgcaagtttttttattgtttatagattagattttaattataatgggatatttttgtgggtttttgcgaatctcattgcacatattaaagacatggaaggaaaatatgcattagcagtgatatcattactaagctatataggaaccaatcacggtattatctcggtaagtacgaaaatattttctgttagtgattatataaatgtatatgatattggaatccaaaaagtattatattggctatataatttgcttacatcattaaatattattttattttttgttttttgtgtattcattattattgaacagagtggaacgatagatgaggtaaaaaaattatattttaaattatcgcaaacaaatgaagagctacaacaggcaaatgaaaaattacaggaatatgctgtaatgaaagaaaaaatgggagaaacaaaggagcgcaaccggttggctagagaaattcatgatacattagggcatacgctaacgggtatatcagcgggggtagatgcttgtatagcgatgattgatagttcacctgaggtgacgaaaggacaattggagcttatttcaaaagttacaagggatggaataaaagaagtaagaaggtcagtaagtgaattaagacccgattctctggaacgtttaaacttggaaccggcaattcgtaagatggtaaatgaaacaaattcaataacaaatacaaaaatacattttgaatgtgatgtcgaaaaattgaaatttgatgaagatgaagaaaatgcgatatatcgtgttgttcaggaaagtatgacgaattctgtacgacatagtcatgcaaaaaatgtttatattactataaaaaagaaatattccgatatttatatttcaatcaaagatgatggaattggatgtactgatatgaagaaaggatttggtacaagacatattgttgagcggataaagttattaaatgggacagtagagtttgatggaagtgatggatttacaacaaatgttgtaattcctataagatggggtgaagaatatgattaaagtactgattgcagatgatcaggaattgattaggcaaagtttgtcaattgtattaaatacaaaggaaggaatagaagtaacagatacagttgcaaatggacaagaagtaattgcaagtgtacgaaaaaatagaccggatgttattttaatggatattcgaatgcctaaaatggatggcgtacagtgtacgaaaataataaaaggtaattattcagaaataaaaattattatactcacaactttcgatgatgatgagtatgtatataatgcattaaaatggggagcaagtggatatcttttaaaaggagtatcgatggacggattgactaatgcaatacgtactgtatatagtggacaggcaatgataaatccagatattgctacaaaagttgtaagattgttttcacagatggcaaaggctgattatgtagttgatgtagatcaaaagagaacagaaaatctgactaaaacagaatggaaaattattaatgaagttggacggggaagttcgaacaaagaaatagcggaaaatttgaatctttcagaaggtactgtacggaattatttgagtgggatattaaacaaattagagttcagagacagaacgcaattggcaatctgggcagtacagaataaagtagcaacaaaaataacggggcaatagtaaatgaaaaagaaaagtatatacggattagttgtttgctttttgagcataatattaataatacttgcatggaactatagacaaaaaaataaaccaattgtattggaatttggcatgtttgctgagagtaattgggatgttaagaatgcgaatgcatatgtaataatagatgatgcaataaaaaaatttgaaaaagaacatccaggtgttaaagttcattatgagacagggattagaaaggaagattattcagaatggttagatagaaaaatattagaaggagaaacaccagatgtatttatggtgttgtctgatgatttttataaatatgtgtcattaaatgttatatctgatttagataatcagattgctaatgataggaattttaaaaaggagtatttttttgatacagtattagatattggaaaatatcatgaaagtcagtatgcgttaccatatgaggtagtaccgactttgatgttcgtaaataaaacattgttggaacaagaaggaatagaagtcccaaatgaaaattggacatggagtacaatggagcaaattgttgatcagattacaaaggataaaaacggtgatggtgtgatcgatcaatttgggacatataattatacttggaaagaagctgtatattcaaatggtgcagagctttttgataaagatgggaaaaaagcttttttttcgggaacaaaagtgaatgaagcagttaaatttgtgaaaaagttaaatgaaatgaatggaggccgtgaagtaacacaaaatgattttgattcgggaaatgtggcatttatgccgttagcgttttctgagtacaggacatataaaacttatccgtataaaataaaaaaatatacaagttttcaatgggattgcacaagcatgccggcaggcccaggaggtcataatacttcagaagtagatgcacttttgatgactattggaaataaaagtaaacataaggaattagcatgggaatttctgaaaatgttaacttcggattcttcaattcaaagagaaatatttgaatattcgcaaggtgcatcagtattgaaatatgtaactggatcaagatatgcagaaagcatgattcggaaggatatggatgtagatgagagggttattgataatcgtttgttaagtgatgcgatagagaatggacggataaatccaaaattctcgaaatattcagaggctatggcattagcagagaatgaaatagatgatatttacaaaaatgaaaagaatattgatagttcgcttaaggtatttcagagaagtattactaaatttttaaatcaataagaaaagcattacatttgtcacatttttttgtgagaaatgtaatgcttttttagttacaaaatacaggtgtacaggaaaaggaaaattagtaatattaagacaacaaataacaagcaaggaggaaaagaaatgaaaagaaaattagtgagcgtgttattgagtgtttcattagttgcagcaatggcaatggggtgcagcaacggtgacggggacaagaaatctagttcgacgaaaactgaatcgacatcaaacaaaaagggaggtcacaagtttgggtatacttgtatggacggaacgaacccattctttgtaacattggaagatgaaatcagaaagaaagtcgaagcaaatggggacgagcttgtatctgtagatccggcaaatgatgtaagccttcaggtacagcaggtagaggatttgatttcacagggaattgatgcaatgttcctgaatccagcagaagctgaaggaattcttccagctttggatgctttaaaagaagcaaacattccaatcgttaactttgatacagaagttgccgatatgtcgtatgtaacaagttatgttggatctgataactacaatgcaggtaaagtttgtggagaagatttagttaagaaatgcccgaagggtggagatattattgttcttgattcaccgactatgaattcaattgtagatcgtacaaaaggatttacagatgcaatcaaaggaaaaggatttaacattgttgcacagcaggatgcaaaaggaaatcttgaaacgtcaatgggaattgcagaagatttattacaggcacatggagatgtagttgcaatctttggtggaaatgatcctacagcgcttggtgcattagcagcagcaaacgcagcaggaattaaggattgcaaaatttacggagtagatggttcaccggatgttaaatcagagcttgcaaaaggtgattctttaatggaaggaacaggagcacagtctccagtaggtattgctgataagtctgtagaggttatgtataaaatcttagatggcaagaaagtgaaagacaaatatccagtagaaacattcctgattacagcagataatgttaacgattatggtacagatggttggcagtaaacgatagtcattaacaaaaatatgaaaaggtgctttattcaaatgaactggataaagcacctttttgcataaaagaaagatataagagggtgatattttgagtggtacagcattgctagaaatgaaacatatacacaaaaaattcccaggtgtatatgcattaaaagatattaatttcgaacttcggacgggggaagttcatgcattactaggtgaaaatggagccggaaagtctacgcttatcaaagtgttaggcggaatttatacagcagatgaaggcgagataattataaacggtaaaaaagtaaatatagatggtgtaaaggctgcacaggctaatggagtagcgattattcatcaagaattggttttggttccgtatatgactgtagctgaaaacatttttttgggacgagaaccgatgagttccggatttgttgataaaaagaaaatgaatcatgatgcgcaaaaattgttagatgactatcaaatgggaatacaagctaatcagttaattaaagaattaacgatagcacagcagcagatggttgaaattgtaaaagcaatttcgtataattcaaaaattttagttatggatgaaccaacttcttcgatttcagataaagaggtagcatttttgtttaagacaatgaggagtcttacttccaagggagtaggtattatatatatttctcataagatgagtgaattggaagaaatttgcgatagagtaactgttatgcgagatggagaatatgtaggtactgaagttgtaaaaaacactacaaaagatgcattaattgcaatgatggttggaagagagttgactaattactatacaagagattttgaagaacatgaagaagttattatgcgatgcgaaggaatctcagatggtgagctggcagaaaacgtaagttttgaacttagaaaaggtgaaatattaggctttgccggattggttggagctggaagaagtgaagtaatgaaaagtatatttgggcttatgccaaaaagtacaggagatatatatctggagggtaaaaaagttactattaattcaccaattgatgctatgaaaaatggcattgcacttgttccggaaaatcgtaaactcgaaggtttatatttggtacaaagtgtcaggtttaattcaacgatagaagttttaaacgagttcattaaaggtatttttgtagacaattctaaagaaagagaaattacacaagaatatattgataaaatggcaaccaaaacaccttcacaggaacaagctataggtaatctgtcaggaggaaatcaacaaaaggtattaattggtcgttggcttgcaacacatccgaaaattttaattcttgatgagcctacaagaggtgtagatgtaggtgcaaaatcagaaatatatgcaattatgaataaattagcaaaacagggaatgtcaattattatgatatcttctgagttgccagaaattttaggaatgagtgatcgaatctatataatggcacatggaaagatgagaggctgtattagtcataaagaagcaacgcaggaaagcgttatgatgctggcagctgaataggatgggcataataaaggaggaaaaaaacaaatggaagaaaaaacaaaaaaaacaacagcgacagctggagttggaaatgctgttaaaatatattttaaagaaaatcttggtataatcgtagccttcttggtattatgtgtatttttatcagtttttccaaaaacaagtggatcattttttacaagacagaatatatttaatgtattaagacagatttctacgaacctgttcctggcatgtggtatgacaatggtaattattcttggtggaatcgatttgtctgttggatcaatcattgcattatcaggttgtatttcggcaggatgtgtagcaagatataatctcccattaccgatagcattacttatgggacttttagttggacttttagttggtatgtttaatggtgctgtaatcagtaaaactacaattccagcatttatcgtaacactggctacaatgaatatagcaaaaggacttgcatatgtatatactggcggttcgcctgtacgagtagtaacaaaagaatggcaatttttaggagctggttatgttggaatttttcctacaccagttgtaattttagtaattgttcttattattacagcaatcattatgaataagacgaaaatgggacgtcatatgtatgctgtcggaggaaatcaacaggcggccgagttttcaggaattaaagtggaaaaagtaaaattctttgtacatgcattttctggattgatggcaggtcttgctggaattgttttggcttcacgtatgtattccggacagcctacagccggtgatggagctgaaatggatgctatcgcagcagttgttgttggtggaacttcaatggctggtggtagtggtaaaattggtggaactattataggtggtttgattataggtgttttaaataacggattaaatcttttgaatgtaaactcattctggcagtatgtagtaaaaggagttgtgattttactggctgtattccttgattactttagaaataaaggaaagaaataagataaaaggagaaagattatgttagtttcattaaagccgttgatggaagatgcaatgaaaaaaggatatgcagttggagcatttaattgtccgaatatggaatcagtaatggctatcatacaggctgcagaggaaacaaattcaccagttatattaaactatgcagaggtacatggaaatttgatatccatggaagatatcgcaccagttatgcttcaatttgcaaaaaaagcctctgttccagtttgtgtacatttggatcatggtgagtctattgaaagttgtattaaagcaatacagttaggttttagctctgtgatgattgatgcatcaggcagtgattatgaagaaaatataagaataactgcagaagtggtgaggttggctcatgcagtcgatgttacagttgaagcagaacttggacatattttctcatctgacaaaggattaggagatacagaagaaattgaaacagcggacagtttttcaaacttagatgatgtgtatacaagtccagatatggcaaaagattttgttgaaaaaaccggagtggatgtgttggcaattgctttcggaacaagtcatgggatttatacacagaagcctgttttggatttgaatcgtattacagaaattaaaaacaaaattgatatcccattcgtaatgcatggtggctcaggacttagtaaagaggagtttcagacagctgtaaaaaatggaatacgtaaaattaattattacacgtatatgacattggctggtggaaaagcagtcaaagctgcattggataaaaaaagtgtagaagaaaatattttctatcatgacattccgttaattgctatggaagctatgaaagaaaatgtgaaagtggcaattgaaacatttgcactaaaaaattagggagtgtgaaagatgaaaagatcagagattaacaaagctttgaaggatatgcatgatttgattaaaaaatttcatgtatcacttcctccattttgtgaatggacaccagaagagtggaaaacaaaagggaaagaatacgatgaaattagagataatatgcttggctgggatataacagattttggactcggagattttgaacatacaggattttcgttaattacgttaagaaatggaaatataaaaaacgataagtatgataaaccatatgcagaaaagttattgatgctccatgaaggtcagcatgcggaaatgcattatcatgcatataaaatggaagacattattaatcgcggaggtggaaatgtactaattcgtgtatataattcgacggaagatggaaaaatggcagatacagatgtcattgtacatagcgatggatgtgtttatacagtgaaggcgggaactcagataagactaacgccaggagaaagtattactgtgacaagaggattgtaccatgacttttctgtagaagaaggaaaaggatccgttttgttgggagaagtttctatgtgcaatgacgataatacggataattatttctataataaaaaagtaggacgttttcctgctatagatgaagatgaagaaccataccgtttattatgcaatgaatacccagaggttttgtaggaggaagacctatgaataaagaaggaataacggttgcaggaaatcttattgcagatgtagtatacacaatagatgtatatcctcaaaaaggcaatttaacatggatgagaaatccggttgcccataccggaggtattaacaacttaattattgatttggcaaggttagattctaaaataccaataaaagtatcgggagttgtgggtgatgatgaaaatggtcaatttatagtagattctttaagagagtatccgaatataaacattgaagggattgtaaaaaaaggaagaacagctgttacatttgcaatgacagaaaaagaaagcaagcagagaacattcttttttgatccaggaagcagtttggaattccatgaaaagcagatagattttaagaaaataaaggcggatatttttcatttagaatatttacttttattaggaacgctggatcaaccggatgaagactatggaactaaagccgcaaaggtattagcaactgcacaaaaatatgaaatggaaacttcaatagatatggtttcagaagaaggaaatcgataccagaaagttgtatggcctgcattgaagtatacagattattgtgtggtaaatgaagtagaaggaaccggtgtgactggaattcaattatatgataaggatggaataaaagaagaaaatatgagaaaggggttggaaaaattaaaagaattgggagtaaaaaagtgggctataatacattcacctgcatgtggatatggtttgaattgtcaaacaggagaatttgtaaaagttccaagttttaaactcccaaaaggatttataaaaggaacgactggggcaggtgatgcattttgctcgggcgttttatatgcagcgtatcaaagagaaagtatagagaaggcattatattatggtgctattacagctgcatgttcactctctaaagaagatagtacctcaggtgttatggacttgaaagaaatgaaattatttatgaagacaaacatatagaaaagttgctaaagatagaaagaattttggagattataagattatgtttataaaatctggaattctttctatttttttgtttagccgatgaactttctttcacagaataaacataaattttccacatacttttcaaatagcccccttatattgttaacagattgagtttaacaggaggaaggaaatttgatagaagtaaagaatcttaccaaacgttattgcaaccatctggcggtagatcatctgaatttcaccgtagaatccggtaaaatctatggattcttaggaccaaacggtgcaggaaaatctacgaccatgaacattatgaccggttacctgggagctacagagggacaggtgctgatcgatggacacgacattttaaaggagccggaagaagccaagaagaatatcggttatctgccggaaattccgccgttatatatggaaatgacggtgcgggaatatctggaattcgctgcagaattaaaaggaattaaaaaagaaaaaagagagccgcagatagaagaagttataagacttgcaaagctgagagacgtagaaaaccggctgatccagaacctgtcaaaaggttataagcagagagtcggacttgcacaggcagttctgggattcccggagatcattatcctggatgagccgacagtaggccttgacccgaagcagatcatcgaaatccgtgaactgatcaggaagcttgcgaagaaacataccgtgatcttaagttctcacattcttgcggaagtaagggaagtctgtgattatatcatgatcatatccggagggaagctggtcgccagtgatacgaccgagaatctggagaatatgatgagtggcaaaggtcagatcgaggtggaagcaaaggcttccagggatgagatggatcatattatccgccggacaggaaagattaaagaagtaaaataccgcaccagtgcgagcggcattacaactgcgcagattatagcaaaaggcggggaagatatcagagaagagttattccttgcattttcccatgcagatgtaccgatgcttaccctgaatcagagtaagacaacactggaagagatattcctggagctgacacaagggtcaggcaatagaatgataaaggaggagaagtaagatgagagccatctataaaagagagttaagatcctattttcattctatgataggatatgtatttatcgctttcctggtagcttatacgggaatctatttcctggcgtataacctgaactatggatatccgtacttttcttatgtattgtcagggattctgttcgtatatctggtagcaattccgatcctgacgatgcgctgctttgcagaagataagaagaataagacggatcagatgttactgacagcaccggtcagtctgttcaagatcgtgcttggaaaataccttgcaatggtaacgattatggcagtgccatgtgtgatttatctgatctttcctctgatcattaaggcacagggaacggcatacattaaggtagactatttggcaatccttgtgttcttcttactcggatgcgtatatatttccattggaatgtttgtctcttcattgacagaaagtgtgatcattgcggcaatcggcgcattcggtatcctgcttctgacttatctctggagcggcatcctgaactttatcccttcggcagcatgggcaaatgcattggcagttgcggtgttgttgacgctgatcgtacttgcagtctggaatatgacgaaaaatgtcgtgatcagcggggtactggagctgatcgtactggcaggaacactgattacttactttgtaaagaaaacagtgtttgaaagtctgctttccacagtacttggcaaactggaactgacagaagtattttccaatattgccgataaccatcttctggatgtgagcgggattatattgtacctgtcactgatcgtcttgttcttctttttgacgatgcagatgattcagaagagacgttggagttaggaggagcataatgttagaaaaaatcaagaagtcattccggagtgcatcatcaaaaaacggaagttacagtgtgggaatgatcgcacttgtgatctgcatggtgatcgttgtcaatctgatcgcaggtcagcttccggagaatgttaagagcatagatatcagtgataacaacatttacggagtatcaaagaccagtaaaaaggtattgaacaaactggataaaaaagtaacatttaaaatctatgcagaaaaagattcgacagatacaaggatcaaatcattcatcaagaaatatacggcattgtctgataagctcagtgtaacatggatcgatccggtcctgcatccggcagcacttacgaaagcaggagtagagaaagatacgattgtaatctcctgcaaagataccggaaaaacgaaatctctttcttttgatgatattttagtttcggattcttattcctactatacgacaggaagcagttctgcatctgaattcgacggagaaggtcagtttacaagtgcgatcaattcggttacaagtgaacagacagagaagatgtattatacaacaggacacggagaagcaacattttcagattctgtgacaaaactgttcagtaagaataatctgacgacagatgaagtgaatctgatgatgacaggtgaaattcctgatgattgtgatctgttattcatggatgctccatcaaaagacatttccgatgatgagaaaacattacttctgaattacctgaaaaagggcggaaaggtatttatcattcttggagatcctgaggatgagacaccgaatctggatgaagtgctgaaagaatatggtatgcaggaagcggacggttacatcgcagatatgcagagaagctaccagggcaactattattatatcttcccggagattacagcaacagacgatctggccaataatctggaatccgagatggttcttatgatcaatgcacatggtctgactacaacagatccggcaagagatacgatcacaacaacggcgtttatgcagacatcagataattcctatgcagtgacagaggataagcaggaagagggaacctatacattaggagcagttgcgactgagcagattacatctgatgattcatccgacagcagctcatccaaaaccagccgtctgacggtaatttcttcagaaagcatgatcaattcacagattacagatacttacacaacactggagaacctggatctgttcatgaatgcggtgacagctaactttgacaagacaaaaaatatagcaatcaaggcgaagagcctggaggtaagcaacaacacgatgcagcatgcgggaatcatcagcatcctgacaatcttcggaattccgcttgtaatcctgatctatggattcatgcgctggtggaagagaagaaaagcgtaaattaagaacatttatggacagaaaaggggaactttgatgaaacagaaaaagacaatgctcatcatggtagtggtgcttgcggtactgctggcactgtacggaggcctgaaagcctggaacagtcacagtgagaagcagaagaaggcaaaagaagacaaagaaaaagtcagcctggtggatgtaaaaagtctgaagacatttgcctatgaaagcggcggaagcaagatgagctttaccaaaaatgatggcgaatgggtatacgatgaggatgacggggtacgtctgaatcagagtacgatcaagagcacggcaaaagagattactggactgacagcggtccgcaagctgagtgatccggatgaaaaagcagattatggactggacagttcggattacactgttacctatacagcaaaggatggaaccaggggaacgattgaaatcggcgatgcagcaggagacaattattatgcgatgatccaggattcggatgcagtatataccatttcaagtacgttggtatcggatctggtattcgatctgtcatccctgacggagaacgacacactgccatcgatcagcagtggtaatctgaagaaggtcgaagttacacaaaatggagagaccacgacttataagaaaaagaagcaacgcagtgaacttgccggtggctggggaaccatctcgcttacccagtgtgcagactataatgtcaaagatcttgcaaaatatggtctggatgaagtaaaccggatcacggtgacggcaacttataaagacagtacttccggagataagaagacctgtaccgtttatattgggaatgaaaatggtgataaccgctatgtacagctcaaagattccaatatggtatatgaggttggaagttcgatcgtagaaaatatgatgtcggtagataaataaaacatatcgatagaaagaaaaaagacgggagcggcacagaaaatgtgtcttccgcctttttctgatttttgagaaaaatgacgaaaagttttcacataatatacaatacatttattgcctgaaagtataaaaaatggtatattattaataggtttattgtgaaaatatacaaaaaacccggaaaagaaataggtaggagtgataaaaaatgtatcaggaagaatacaaacgctggcttgcagcagatcttgaagatgcagatctgaagccggaattgtcaaaaattgagggaaatgacgatgaaattaaggaacgttttgcagtagcactgaaattcggaacagccggacttcgtggggtgctcggagcaggaacgaaccgtatgaatatttatgtagtacgtcaggctacacagggactggctaactgggtaaaaacacaggggggaacacagactgtagcgatcagttatgacagccgtttaaagagcgatgtatttgccaagacagcagccggtgtactcgcagcgaacggaatcaaagtaagaatctacgatgcactgatgccggtaccggcactttcatttgcaacacgttattataactgtaatgcaggtattatggtaacagcttctcataaccctgcaaaatacaatggatacaaagcatacggaccggacggatgccagatgacagacgatgcggccgcaatcgtatacgaggagattcagaagacagacgttctgaccggagcaaaatatatgtcatttgcagaaggtgtagaagaaggattgatcagatttgtaggagatgactgtaagagagcactttatgatgcgattgaatcccgtcaggttcgtccgggactgtgtaagacagccggattaaaactggtatacagcccattaaatggatcaggtcttgttcctgtaacacaggtattaaaagatatcggaatcacagatatcacaatcgttccggagcaggaatatccaaatggatactttacaacatgcagctatccaaacccagagatttttgaggcactggagcttggactgaaccttgcaaaagagtcagatgcagaccttatgcttgcaactgacccagatgcagaccgtgtaggtatcgctatgaagtgcccggatggatcttatgaattagtaagcggtaacgaagtcggagtacttcttctggattacatatgtgcaggacgtatcgagaaaggtacaatgcctgaaaaagcagtagcagtcaaatctctcgtatctacaccacttgctgatgcagtagcagctcattacggagtagaattaagaaacgtactgacaggattcaaatggatcggagaccagatcgcacagttagaggcagcaggcgaagtagacagattcatctttggatttgaggaaagctacggataccttgcaggaccatatgtacgtgacaaagatgccgttatcgcatctatgctgatctgtgagatggcagcttactacagaagtatcggaagctctctgaaacagagactggaagagatctatgcagagtacggacgttacctcaacaagatcgacagctttgaattccctggactcagtggaatggacaagatgtctggaatcatgcagaacctgcgtgagaatgcaccggcagagattgctggatacaaggtaacagaagtaacagattatactaagacagaagaaacaggacttcctgcagcaaatgtattagtttataaactggagaataacgagaccgtgattgttcgcccatcaggtacagagcctaagatcaagatttactacacaacacttggtaaagatcttgctgaggcacaggctgagaaggacaaacttgctgaggcagtgaagccgattatggcataggagtttttaaatttaaaaataagtgtacagttcttttggaaaaaggattgtacacttattttttataccagagtatgcagttaattattaatattattctttttttcggaaagtctttcttttaatcgctgtcgtcttgtcgggcgggtaaatgcaactctctgtgccgtaaaaattgaattgttaaagttaaagataaaggacacaaagcataccacagagaagaaaggaagcattgaatatccaaaactttccacaccgaccagaatcgcagcaagcagtgtattggatccactacagaacacagaggcgaatccaagcgcagcaccgaacatcggatcaaatccaaataccggtcccaggacatatcctaagcaggaaccgatggaaaacagaggtgcaacttcaccgccgatgaatccggaggaaagtgtcagaatcgtaagagccatcttaagaatccagtcataagcatatatatcatctgtaataccgtcaaagcacagagcaaccagattagagccggttccggagtatcttccctgatgaaagaccatcataagaactgcgataacagcccccatgatcagaaccttttttacaggcgaagaaaaacgaaaggcgaatttcaaacgcagatatcggagaatcagtgcaaataaagaaccaacgataccgaagcatagtcccatagctgccagttttaaaagaaaaacagcgttgtatgtagaaggatgatagttcagggtttccagtatattaatatggaatttccgaagtccgagtgcccgtgatgtaaaagctgcactgatggaagctactgttgctgggatcaaagcatgatattccagctttccggcaaccaatacctccagtgcaaaaaagattgcagcaagcggagtacagaaaagtccggaaaatccggcagccataccagtgatcaggaacatcttccggctgttttcgatatcaatagtcttatcgaccagacgcccaacgttgttggaaacagcagccccgatctgtacggcaacgccttctcgtcctgcacttccgccgaacagatgcgttgtccaggttccgatcacggcaagcggcaccatgcggatcggaagcttattgttcttaccaagtcctacatggaataccatcttcatgccgttcgcgacagatttaccgaactggtgatagatgaaccagacgaacaccccgccaagaggcaggaaccagatcagataccagaagtatttcgtccggatagcggtacaggcattaagccccagcccgaatgctgcatcgatgattccgacgagaacaccgatgactactccggcaatagccaggataaaagtatctttatagtatttgtaaatgtgtttgaacaaagctttaatcataataacccccaaagataaattctctcgtatttattataacttgtatggcggaatctgcaagcaaatatattttttactcgacaatttatatactgtgtgatacaatcgggttaagcattataattctatattttcattggcatatacgccctatcaagaacttatgcatttcgcattctatgaattttcaatgcttgtaacccagagagattttatacaggcagagaggaattgtagattcatgctaatgtacagataataaaggatagtgctgaaatggaggcagagtttatgaaaacagaggaaaggaaatcatattgtcagcagctatttgaaataaggtgacagtggatgttaaaggcatataaatatagaatatatccaaataatgagcagaaaatacagattgc

SEQ ID NO: 2933 - DNA, 1618 bp, Unknown
  gut microbiota DNA sequence
gtttttcactggtgaaaaatgcaggtaagaatgttttcatacttacctgtttttttattttatgccctaagaaattatgttatgatgttaataaatagagatttaaccataagacattaataggagaagaggaaatatgcagaatccagaaatcctgattataggagcggcaatcatagatgtactggccagaccggtgaataccaaggtatttgatacaggttcctaccctgtcgaagatattcatatgacaacaggaggggatgcgctgaatgaagcaacgattcttgcaaagacaggacataaagttcaattagaaacagtaattggagaggacgaagccggaaaattcatattaaatcactgtcgggaatgcggtatggtcatcagaaatgaaagtgtaaggaatgaacagataaccgggatgaatgtggtgcttgtggacgaaaacggatcaagaagttttttgacgaatccatatgggacactcaggagtcttagaaaggagtatatccggatgccgtttccggatagtgtgaagattgtatgttttgcaagcatttttgtgtttcctgagatcggaccggttgaattaaaggatatatttaggatcgcaaagagacaggggaagattgtctgtgctgatatgacaaaacgtaagaaagacgagacaataaaagacatggcagatgctttttcatatatagattatttattcccgaacgacgaagaggctatgcttttgacaaaaaccagaaatgtagaagaggctgcagaacagatcaaacatactggtgtgggaaatgtaattattaaatgtggaaagcgtggctgttatgtaaggacagatgaggatgaatattggattccggcactagaagatgtggaatgtatagatactacaggggcaggagatagctttgcagcaggattcatgagtgcattgctggccggcagaagtgtaatagaatgtgcagaagaaggcaatagatatggagcaaaagcagttcaatatgtaggatcaacagaatggttaagacatgaaatattagatggtaaatagcatatttggatgtttatttagcctgtgaaaccgtctatttaacatgcgtgtgtttttctatgtcaaaatatatgcatttctgtctgttagtatcaatcatgtagagtattttaaaggaaagtacggaatgctttacacagaaaatatccttagaaaaggagttcagatttttcagaaatctacaaaagaggatgtgaagatctgcagggtatcagagaatattttttacttctggttgatggaatcggtagaattagagatctacatacaacaactaaaagaggcattcagaaaaaaaggggaagaagaggatttgccattttccttctcgaatggtatcgtaatttaagacacttcaagagacatttcttaatgaatctgatatactgtaaacactacagaaagaaggattattattatgtctcgaacaagaagaaatttcttcgccaaattcaaatcagaattagtgattgaactgctcagaggagaaaaagacttaaatacaatcgcaaccgaaaacaatattcagccgaatcttctccgcaactggaagaa

SEQ ID NO: 2934 - DNA, 5849 bp, Unknown
  gut microbiota DNA sequence
ctgccaaattcaaatcagaattagtgattgaactgctcaaaggagaaaaagacttaaatacaatcgcaaccgaaaacaatattcagccgaatcttctccgcaactggaagaaggagttcctcgataaagcatccgcggtttttgatgaaacacgagaggagaatctgaaagaaaaactcgctttagagcgtaaggaaaaagctgaatatgcgaaaaaagttggccagttcactatgcaggtggattggttgaaaaaaatctgaagaaacacttggacctgactacgagagtaaatttagtccaaaaccttttgaagactaaagaacttccagttaaaacaggagctgcgcttcctgatatcaattgtaccagtgtttattacaagggcacgcccatatctcaggaggagttagattacacacggataacccggcctggggagcacgacaactgtctgctcaactgaagaagcgagagtatcaggttggccgccggaaaacgcgctgttatatgaatgaaatggggattgatccaatttatcccaaaatgaagctttctaaacgtatgcaacaggctaaagtctgcccgtatctgctacgtaacgccgttattgaccgtcgacattacatacatctccattaagcgtggattcttgtatctgaccgctgtgattgactggtacagccgctgtatcgttggctgggaagtcgatgatactctggataccagaatggtcataactgcgttaaaaaaggcgtttatagtggcaaaacctgttatcctgaattcagatcagggctgtcagtttacaagcaatgagtacatgaatttcctcaaagagaaccagatccgtcaaagcatggatggtaaaagccggtgggctgacaatatcatgattgaacgatggttccgaagcttcaagtacgaggaagcatatctgacccaatataacaatatcagagaagcacggaaggcaatcggtaaatatgtgcacacttacaactttgaacgttgtcattcttcactcaataatcagacaccagcatcctgttattatccgattctgttactggatgatcatgcagcctaatgggggatttcctcccatacccagttatacatatcagttcattataaaaagtttagaattttgtcttgacaactgaaccactataaagtaagatgtccgacagagaatccgtggggataacaacagacttgtaacgtgtaataagtagtaaaaagtgattatggaggtaaaggatgttatacataggtgtagatcttggaacgtcagcagtaaaacttctggtgatggatgagaccggagacattaaaaagattgtttcgaaagaatatccgctcttcttcccgcatccgggatggtcagagcagaaaccggaagactggtttgaaaaatcgatggagggaatcaaagaactgacggcagagtgtgataagtcacaggtagcaggaatcagcttcggaggacagatgcatggattggttgcgttggataaagatgacaaagtcattcgtccggcaattctatggaatgacggaagaacaggagaagagacggagtatctgaatgaagtgatcggaaaagagaaattgtctgagtatacggcgaacattgcatttgccggatttacagcaccaaagattctctggatgaagaaacatgagccggagaattttgcaaagatcacaaaaatcatgctgccgaaagattatctggcttataagctatccggttctttctgtacggatgtatcggatgcttccggtatgttgcttatggatgtgaagaatcgctgctggtcaaaagagatgatggacatctgcgggattacagaagataaactgccaaaattatacgaaagttttgaagtagttggaacgctgaaaaaagaagttgcagatgagcttggattttcagagaatgtaaaagtaattgccggtgcaggagataatgctgcggcagcagtgggaaccggaacagtcggggatggaatgtgcaatatttccctcggaacatccggaacaatctttatatccagtaacaagttcggagtagacgagaataatgcactgcattcatttgcacatgcggacgggcactatcatctgatgggatgtatgttgagtgctgcatcctgcaacaaatggtggaacgaagagatcctgaagacaaaagattttgcggcggaacaggacggaattataaagcttggcgaaaatcgtgtattctatctgccgtatctgatgggagagagatctccgcataataatccggatgcgagagcaatgtttatcggaatgtccatggatactacccgtaaagatatgacacaggcagtattggaaggggttgcatttggcctgcgtgattcactggaagttgcaagaaggcttggaattaagattgagagaaccaggatctgcggcggaggggcgaagagcccgctatggaagaagatgatcgccaatatcatgaatctgaaggtggatgtggtagagagcgaagaagggccggcgcttggcggagcaatgctggcagcagtaggatgcggagaatatccggatgtagaggctgcggctgccaagattgtaaaggtcgtagatacagtagaaccggatacggaactgacaacaaagtatgaagaacgataccagcagttcaggaaaatctatccgactgtaaaatgcttatatgaaaaatgttgatttcacttccgtggataaggcggatatgttaaaataacttgaagagtgaaatcttagataaagaggtatgagatgcgtaattctcatacctcttttttaagacaaaggaaaaagaggaggaaaatgaactatggaaagtcataagattatccaggtagaagaaaaagtaccattgaaactattgctgccacttagtatccagcatatgtttgcgatgtttggggcatcggtgctggttccgttcatattcggaatcaatccagcgatcgtactttttatgaacggtgtgggaacactgctctttattgtggtgacaaaagcgaagtcaccggcgtatctaggatccagctttgcattccttgcaccggctggtgtcgtgatcagtaagatggggtatccgtatgcactgggaggatttgtagcagttggattctgcggatgtatcctgtcctttattatttacaaatgtggaacgaagtggatcgatattgtgcttccaccggcagctatggggccggtggttgcgctgattggactggaattatcaagttctgccgcaaataacgcaggcttgttggaggataagatcgatccaaagaatgtacttgtatttgcagtgacgctgggggttgcggtatttggaaatattttattcagaggatttttatcagttatcccgatcctgatcgcagtagtcgcaggatatctgacagcgttggcatgcggaatcctggattttacacaggtagtagaagcttcatggtttgcaatcccgaattttcaggcgccaaagttcgatatgggtgcaatccttatgatccttccggtactgttggttatcacatccgagcatatcggacatcaggttgtaacaagcaaaattatcggaagagatttgttaacagacccgggacttcacagatccctgttcggggataatttctcgacaatggtatccggactgatcggatcagtaccgacaactacgtatggagaaaatattggagttatggcagtgacaaaagtatacagcgtccgcgtaatcggcggggctgcagtcctgtctattatctgttcatttgttgggaaattgtcgatgatgatccagacaattcctgggccggttatcggaggaatctcgttccttttgtatggtatgatcggagcatctggtcttcgtattctggtagactccagagtagattacggaagatccagaaacctgatgttaacatccattgtatttgtaaccggtctgtccggaatatctgtgaatatcggaaccgtgtcattaacaggaatggttctggcatgtgttgttgccatggcacttagcctgatattctatatcttagataaattaaagcttaccaatgatcgtgaagcgtaagatcttctttcctcatggcgagtgaagcaccagggacggagaagtttggcatgttgtaaccatccgggtgaaacaaaatacagtaatcttcgtttcaaacatggtgtgaaaaatatgataagtaaattgtattagtagtgttctgataagttcctcgtatgaggacggaaatgggcaatataagttgcaggcggatttgataaaagttgctgtttgcacctcgtattaatcattttgagtagtgtgtgttataccgcaggtaattcatcaataatctgttgcaaaaccttctcaacagaattcgtgacatgggttgcatatttctcaatcccgggggcggcattagccatagcatagctggtgccggcggtcttgagcatttcaacatcgttgtactgatcaccgaatacaacacagtcctttgcatcgatatgcagatgatcgagcagatttttcagtgcacttcctttgttggcagtcggacagataaaatcaacccagaggttaccggaagtaaccactttaatgtcggaagaaaacatttcttttaaatgtttttcgcatgcatcggttccgttgtaatcgcagaccgcaatcttaaggatcggttccggaatctcgctttttggatcatcaataaatttcatatgattcttgatgacatttaccatgtgattatagaatttaggatttttcgaggtgctgtagcagacacgttcaccggagataatgcaattgtattgtggatatctggaaacttcatccaggatactgtaagcaagatcttgttcgatgatccctttggaaatagtctcttcgttgtatatgcaaagagaaccattttcggctatatatgcgatatcatcctgaaccggagtgaacagcctgcgcaggttcagatactggcgtccgctggctgctgcgaacaggattccgtgttcttttaatgtacggatttggtcgaaaacgatgggatttacatcacgtgcgccgttttgaagtaatgtgccgtcgaggtcactggcgattaatttaaccataaataactccttagataaaacatttctgaaaacattgatatttatttcgctactaattataatataaatgagtaaaatatgaaagacaaaggtaggaacaaggatatgaagatagggattgcaaacgatcattcggcagtagacatgaaaaatgagattgtagaatatctgaaaagcctgggatatgaagttgtgaattatggaacagatacttatgaaagctgtaattatccggagtatggtgaaaagattggtaatgcggtggcaagcggtgaagtagagcagggaattgcaatctgcggaaccggtgcgggaatctcacttgcagcgaataaagtgaatggtatccgtgcagtagtatgcagcgatccatatacagcaagaatggcgaaagaacacaacgatgcgaatataattgcattcggagcacgtgtgatcggtattgaaacagcgaaatgtatcgttgatgaatggctgaacgcgaagtttgaaggcggaagacatgccgcgagagtggacatgatcatggatattgaaaagagaaatcacaatctctagaagaacatatgtgatatgtagttatgaaaaagaacatgaagtaagacatgtgaaaagcccggatgaaaaatccgggcttttcgtatgataataattggagaaatgaaaaaatgataatatctgccttttgt

SEQ ID NO: 2935 - DNA, 399 bp, Unknown
  gut microbiota DNA sequence
gacatgaattgttggagcgttgtccgataatacgggaatatagtgaatttatagaaataatccgtagatatcagaagaaaaaagatgtagagccatataaacatgcaattgaagaatgtatagaaaaaggaattcttgcagactatctgaaaagaaaaggaagcgaggttgtaaatatgttaacggctgagtatgattatgagacagatattgaagtacagagaggcgaagcatatgatgagggaagagaagagggaaaattagaaggaaaattagaaggaaaattagaaggaaaattagaaggtaaattggaagaaagaaaaaatcttacaaaaaaactatatgaagaaaaatttacagttgctgagatttcaaaactgttgaaaatgaaagaggatg

SEQ ID NO: 2936 - DNA, 516 bp, Unknown
  gut microbiota DNA sequence
gatgcgatccagacaggaatgcctctggttgagcgtgttgcaacagtaacaggcgagaagatcaagaatcctggaaacttcgttatcaagatcggtacaagcgtaagagagctgatcgattactgcggcggatttacagatgacgatgttctggttaagatgggcggaccaatgatgggattccctctgaacacactggatgtaccgatgatgaaaggctccaatggtattattgccgttgaaccggatgagacaaaagaacagccgtgtatcaagtgcggacgctgcgtagatgtatgtccgatggaactttcacctctgtatttcgtgaaatatgcgaaagatgagaactggcagggcatgaaagacatgaacgttatggattgtgttgagtgcagatgctgtcagtatatctgttcttccaagattccgatcattaacagtatcaaagccggaaaaaatgcagtaagggggatgaagtaatatgttgattacccagttaaaagcaaaagaagc

SEQ ID NO: 2937 - DNA, 392 bp, Unknown
  gut microbiota DNA sequence
aggaagcagatctggttctggtattctcctgcggtgttggtgtacagaccgtttcagaatatctggaagataagatggtctgtgcagcctgcgatacatacccggtaccaggtttccagggcgtgacaccgttagagtacaaatgtgaccagtgcggtgaatgctacctgaacctgacaggcggaatctgcccgatcacagcatgttcaaagagccttgtgaatggccagtgcggcggttccaagaacggtaaatgtgaagtggacagcgaaatggaatgtggatgggaacgcatctacagacgtctgaaagagatcggacgccttgacgcgctgaaatgtccgacacagattcataactttgcaacagacgatgaattaaaatagattata

SEQ ID NO: 2938 - DNA, 554 bp, Unknown
  gut microbiota DNA sequence
ccgtatgaaaaaacatcgtgatattccagaaaaatattgcctgaaatctgtaacaataagtatggaaccatctggaaagtattatgcaagtctattatatgaaaaaactgactgtgaaaaccaagcagaagaattagattatgaagacgcaaagatactaggaattgattatgcaatgcatggaatggctgtgttttctgaagatatacagaaggaaaatgaaggatacttcagaaaaagtgaggagcggctggcaagggaacaaagaaagttatcccattgcgtgaaaggaagcaataattattaccgacagaaaaaacgtgttgcattatgtcatgaaaaaatccgaaaccagaggaaagatttcttacataagctgagtcatgaaatggtagaggcatatgatgttgttgcagtagaagatattgatatgaaagcaatgagtcagtgtatgcattttggaaaaagtgtcatggataacagttacggaaagtttcgggaattgctggaatataagctgacatggagaggaaagaaattggtacgtgtagacc

SEQ ID NO: 2939 - DNA, 433 bp, Unknown
  gut microbiota DNA sequence
tcagaggaaagatttcttacataagctgagtcatgaaatggcagagacatatgatgttgttgcagtagaagatattgatatgaaagcaatgagccagtgtatgcattttgggaaaagtgtcatggataacggttacggaaagtttcgggaattgctggaatataagctgacatggagaggaaagaaattggtacgtgtagaccgttttttcccttccagtaaaaaatgctgtaaatgtggcagtgtaaagaaagaactgaaactttcggacagagtatatctttgtacatgtggaaatcggatagatcgtgatctgaatgcagcaatcaatatacgtgaagaagcacgccgcatgttgtgtgcaggataaatgggaagtgtctgtatccagacaatgaaaatatcccataactgggtaaaaatgaatcgcggg

SEQ ID NO: 2940 - DNA, 7701 bp, Unknown
  gut microbiota DNA sequence
tagtgtaaagaaagaactgaaactttcggacagagtatatttttgtacatgtggaaatcggatagaccgggatctgaatgcggcaatcaatatacgtgaagaagcacgccgcatgttgttagcaggataaatgggaagtgtctgtatccagacaatgaaaatatcccataactgggtaaaaatgaatcgcggggcacgcgaggatagcttgtagatacttggctcagtagagccattgagcaagaagccctcacttcaaaatctgtgatttaagtggtgggagcatgtcaccctaaaatggaattattatgatgagtaattatatgaggaacaaaaatgaacatacaaattttcggaaccaagaaaagcttcgacagcaaaaaagctgaacgatttttcaaagagcgcggaattaagtaccagttcgtagatatgaaagaaaaaggtctgagtaaaggtgaattcaattcggtatgccaggctgtcggaggatatgaaaaactgatcgatcaggagtgcaaggataaagatctgcttgcgttgattacttatcttgcagaggaagataaagcagaaaagattctggaaaatcaaaaggtgatcaagacaccgattgtgcgtaacgggaaacaggcaacagtaggatatcagccagatatctggaaaaactggaaataaaagagtataaagaaagtaaaaaaggaactcaaaaataataacaaataaatttgagattaaggaaagaatactgagtgagaagatgatagattacaaccgagaagaccaattcctgcggcagcgcctgcagaaagaaatcccgattttacgggcattaatacaaaatctatatgaagaaatggacagaaaactccatttaaacggggcaaaagtaccgataacatttggatatgatacggacacactgggatcttacactagacgaagtgcacatgaaaaagagcattttcatttttcgctgttgtttattgcatatggtgtgaagaatccgctgtccaaagaagaccgcatagatctgtttaagcatgagtatgcccattacatgcagtacaatatgcagattcccgaaaagtataaatggcaggcgggaacgcacggaagtgcgtggaaatactgctgttctcttatcggagcggcgccgacgccgtattataaggcgggagaagcgcttatgaatcatgactacgataaggtattaaagaacaggattcatgataagtccgtgccggtccgggatacttatcagcaactgaagactgcacagaagaaaaaggatgaagtggtacagtataagcttggcgatgcggtgacacatccgaaattcggacatggaattgtggagaagattaatcagagatctggcggggtgcatttacatatccggtttgatggggaagtgaagtgtattgatcagaaatggttgtcgcggaagaagtatatgtgaaaagattcagtaaaaacaaataagcaaggtagtgaagtatctgaagaggataaacgtacacgaagaacgttagaagatgagatgacatttttcgtgtgcgtaaatttgtatattgacatactatcaaagtgatactatcataaagataataatataggacggaaaaagaaagaggtagtaatcatgcggaaaaaatcagaaatgcaaaaggctaacgaagaatttgtaaagacttacgatgattcaaaatatccaaaaccatccgtgactgcagacattgtcattttcggaatctttgataaagaagaagataattatagaaaaatagcggagaaagagttaaaggtacttttaatccagagaggtgcggcaccatatgaaggctgttatgcccttcccggtggattcgttggtccgaaggaaaccatcggcgaagccgcagaacgtgaattaaaagaagagacaaactgcaactgtaatttcctggaacagttcggtacctacagcaatccaaaccgtgatccgagaagatgggtgatcagcaatggatacatggcacttgtcaatgctggacaggaaataatccaggcaggagatgatgcttcggatgcaaagtggtttgatgtgtcatttcaggaagaagccggtatatggaatctgtgtctgacacatggggatgagaagcttcatgcaagattagaagagacaacttcgaagtgggatgtaaagaagaaatttaagactatagaaagcgatgaccttgcatttgaccacgagctgattcttgcagatgcaatcgtacagcttcgcaagtggattacggagacgcatatagcgttccggcttttaccggagaagtttacactgagagaattgcagcagattcatgagacggtgctggatacgaagcttctggttccggcgtttcgaagaaaagtggctgatctggtagaagataccggggagatgacgggggatgccgggcatagaccggcgaagttgtatcaagagaaaagataaactttagtaagaagaaagggctgtgcatactaatgataaaatttttattcttgatacttttcataatttgggaaaaaagaacatttagagcaactgtggcattgccggcaggcattgttacagccgggtatatggaagagattaataaagatgaatctttgtaatttaggagaattgcagatggaaaataaagagaaaaagcaaatgcttacaacggagctaacaaaagaaaagagcggcgggagtgccgggatgattcaggatatgtcaataaacggaatcaaactacatctcgctcagaacggaaccggcggcccggtcatcttctggggcatgtatccacatcagcagaacgaagtagaacatctgtgggaatctctactggaacttgtgccggaacaaaatttcctgctcgtcgcatttcaggtggaagactggaatcgggatttttcgccttgggaagcagcggctgtattcggaaaggaaggcttcgccggacaaggtctgaagacgctgagatggctgacagaggaatgtgtgccacatattgaccggacttttggtgtgaaagacagggaacattggctgatgggttattcgcttgccggattattcgcgctatgggcagcttatgaaagtgacgtgttttctggaattgtatgctgttcgggttcgttgtggttcccggactgggatcattatgtgaggaatcatgtgattcagagtaaatgtagcgtatatctgagtcttggcgggaaagaagagaagacgaagaacaaagtaatggcagcggtcggtgacaggaccagggcgcaggaaaggctgttacaggaggattcgctggtggaatccgtggttttagagtggaatgcgggagggcattttgcagatgcggggaaaaggctggctaagggcgtgaaatggatgtttggagtgaaaagtggcttataatataagttgagggtgttaaggtttcatggtatcataatcagtatagaagtagattagaaggtgtaatatatgggaagatttgtgaatccggataacagtgcatttcaagtagcactgaattcaaaaatctatatagataaaacaggcttaattgcctgcatgaatgatgtactggactcaacagacggatatatttgcaatagtcgtccacgtcggtttggaaaatcatatgcggcgaatatgcttgcagcatactatagcaaaggtgcagattcggaagagatgttttttgatcttgagataggaaaaacagaagattttaagaagcatcttaataaatatgatgtgatccatatagatgtacaatggtttctgaccaattgtgaagaagcagaaaatgttgtagcatatattaccaggatagtattggatgaattgagggaaatttatccggaaattttgtctgaggatgtaagatctttgccggatgggctttcacgggttaaggataagacaggacagaaatttattattatcattgatgaatgggatgtgcttatccgggatgagtcggcaaataagaaagtacaggatgaatatatccgtttcctgagaagtatgttcaagggaacggaacctacgaaatatatccagctcgcctatcttacaggaattttaccgataaaaaaagaaagaacacaatcggcacttaataatttccgtgaatattcgatgctgaatgcgggaccactggcctcttatattggattcacagaggaagaagtaaaagaactttgtgaggaatataaaaaggatttttcagaggtgaagcgctggtatgatggctatcaattaggaaaatatcatgtctataatccaaacgcagtcgtaaatctgatgaccgatggaaattttcagagttactggtctggaacggcttcctatgattcgatcgttccattgattaatatggattttgatggattaaagactgcaattattgaaatgttgtcgggggcagcggtcgaagtggacgttgcttcatttcagaatgacattgcaaatattgtgaataaggacgatgtcctgacgtatctgattcatatgggttacttgggatattcgggtgcttccaggatggcgtttgtaccgaacgaggagatccggcaggaactgattcgtgcgacgcggagaaaacgatggaacgagatgttacttttccagcaggaatccgaattgttattagatgcaacgttagatatggatggtgaagcggttgcagaacggatagaaaaaatacatgaggaatatgcatcaacaattcaatacaataatgaaaattcacttagcagtgtgttggcattggcatatctgagtgcgatgcaatattattttaaaccagttcgagaattaccgacaggacgaggctttgcggattttgtgtttattccaaaaccggaatataagagtgattatccggcgcttgttgtggaattgaaatggaataaaagtgctgtgagtgcattgcagcagataaaggatagaaaatatccggattctattcaagattatacaggtgatattttgctggttgggattaattatagtaaaaaagataagaaacatgagtgtgttattaaggcgtataagaaaaaataacagtgtttcgtcaggcatataagtgaaatgaaagcatagtagaggtgaataaaatgctcccggcaagaaaaatacattttgaagcaaaaaagaaagaaaaagagaacttaagattccgaagcttcttaaaatgcaatgcggatgaagaagaactggaccagcaatttttacaactgcacaaagaattatttgaaaacttcgattgcggcaaatgccgtaactgttgtaaagagtactgtgcggaacttacgacagatgaagtgaaggaagtggcagagtatcttaagatggaagagccgcaatttgttcagatatatctggaaaaagatgagacggaagggacttatttaacgaaaaataaaccatgtgattttcttcaaaagaatggagaatgtcttttagaggagtgcaagccggatggctgtaagaagtatccatatacggatcaaccgggacgtttggggagtttgtatggtatgcttgatgcgatagcggtgtgtcctgtagcatatgagatctgggaacggttaaagaaaatatataactttcattgatgataatgtaaatggaatgataaagaggtaattacaaccggaggtgaaaatcaatgaacaaagcagacaaagcggaatctctcttccgtacaggctacaactgtagccagtcagtctacgcagcatttgcggaagagctgggaataacagtggaagaggcagcaaaaaaagcaagcccgttcggagcgggatttggcaagctgcgtgaggtatgcggagccgtgacaggaatggtcatggtaatcggtgatctgtacggatatgacgatccgaaagatgcggcggggaaaaagcagctttatgtacttgtgcagaagctttgtggatcctttgaagcttcggaaggaagcctgatctgccgggaacttctcgggctggagaagggcgaagatctggaagagcctgcggtcagaacggaagtgtattatcagagcagaccttgtgtgaaagcatgcagaagggcagcagagattctggaagagtatgtgaaagagcaaaaaagaaaatgagcgaatacattacgacctacacaggaaaacattttaaaccaacagaaccggatccggagttatttgacatagcagatattgcacatgcgctgtccctgatatgcagaggaaatggtcatgtgaagacgttctggtcggtcggggaacattgcatttgctgtgcaaaagaggcaaaggcgagaggtctgtcggataggatggtgcttgcatgcctgcttcacgatgcaagcgagtgttatatgtcggatgttccgtcgccttttaagagggaactgccggaatataatgaacgcgaagaacgtatgctttctatgatttatgaaaaatttttcggttcggacctgacaccggaagagaagatgcagttgaatgcgattgataaggcaatgctatggtatgatctgacgtttcttctgggagagaaacaggagagcgaggcacccgaattgcatattgatctgaggtatgaggtcagagcatttggtgaggtggaagaggaataccggaggatttttgaagaacagcttataaccgtacagaataaaagaatctaaaatcgtacggataagatagaaaaggaggaatacattatgttacacgaagtatcttttgcgtcctacaacggacgtgaccaggtccagggatggatctatgttccggcttgcaaaccgaagggaattgtccaggtgatccacggatttggggaacattccagacgttatctgcatatgatatctgccttcatggatgcgggttatatcgtggcagcagacgatcatgtaggacatgggaagacagcaatggtcaataatgtgtggggcgactggggagacaaaggaccgcatacaatgatggaagacgagcatacattgaaaggaatcgtgtgtgaaaaatatccggatctgccatatttcttattcggacacagcatgggatcttttatcacaagagatttcattgcaaaatacggggacgaactggccggggcaaccatctgcggaacaacgggaattttccgcggggcagaagagacgggaaagaaattaaaagaagcgatcgatgcaggacatggagaagaatccgatccgtcatataccggagaactgatgggatggatgtgtgagcgctgtggagaggtcagcatcggaaatgagtggatctgtgccgatccgtatgtacagcgggatcatgccgatgatccgtttgatgcatttaccagaccgaccagcaaccgttcggtatatgatttcatccagatgatgttacagatcgagggaacagagtgggccgaaaaagtgccgacagacctgccaatctataatattgcgggagatcaggatccggtaggtgagtatggtgtcggtgtatatcaggtaagtaactggctggtacagaccggacataacgtaacgacgaagctgtactcgggataccgccacgagatacataattatgctgagattaagaacgaagtcgaagcgggtattattgcattcatggacaaggcattataaaaatgtattaggtgccgggaaggattataatt

SEQ ID NO: 2941 - DNA, 7995 bp, Unknown
  gut microbiota DNA sequence
ttttgaagaagttcatcgaaagagcaaggttttccccacagatagccctgactataatcaggatccagcagccggatcttttcccattcatcctccgtctccacaccttctatgcagatttttatattcagacggtgtatcatggtgcagaatcgtttcaaaagatcatattcctttgcgtcctttatagcctgtgcagtaaaggagcggtcaattttaatgatatccggacgaagctcattgagataatggaagttcgaataaccggttccgaaatcatccagtgcaagccgtatgccggcttttcttaattccttcaggaaatgtcgtgcattggaattgtcttccagcaaagcactttccgttaattctacaatcaatgcttccggaggaagtttggcattttcaagttcagcagagataccctgtatcacatcagacttttcaatctgtatttgtgagatattgatgctgacctggaagtccggaatcgtttcacggatctttttacatgcctgtagtgcttcccttatgatccagcggccggccggaatgatgagtccgctttcttccaggatagggataaattctgccggtgagatagttccaaactgtccggaagaaaaacgcatcaaggtttcagcaccaaaaggctgtctgcagcctgatttcaccaatggctgtaaggcaacagagaatccacggaagtcatgtatgactgccgcatgaaggacatcgctgatatctttcagatgtaagaaccgttgatagtcctgctcattgaaaatgtaataacggtttcttccatgttttttagctgtgttcaatgaaaaatctgtccgcttcatcatttcatcatattcattttccagaaggttatgaaatgagaggattccaccggaaatcgtaaagattgccgtataatgattctttttaataaagtggttgatattttccctgattttattgtaaaggtgtattgcagtctgtgcattgtcagcggtaacatccacgatgataaattcatcagaagataatttgtatacctgctgttcctctgaaatacagtgcgaaatacactctgcagttttccggagaatataatcaccataatcccatccgaatttttcattgattggtttgaaattatcaatgccaagacgtaacagaaatccattttccagaggagtctcctgcgtcttcaggtattcgatcagaccattctcaccgaaaagtccactgacattatctgctttctgttttttgccgatctcattaatacatccaaccatgtagagaggcttctgatgatcatcccgtacaagatatccgcggcagttgatccagaccggattcctgttcagatccagccagcggtattccatattatggatacaacggttggtagtaagcagatcacggaattcgtcggtcagcagcggataatcctcggcgtatacaaagtcccggtgtgtttccataacattgtaaaaagcattttgaggaacgcagaaacgttccagtgactgtggcgcaatatagtaaaagtcggtccggaaatcaataaagtacagatagtcatcggtacttggactgagcaggtcaatgatcccgcataattccgtcggtgaaatatgctgatattttttctcctgcgtgatcagttcatccgtgattccttgtgcatgagatttctttccggaagaaagcatcggatgagaagaagcggaatgtgacattttttttcttcgtttttcacggtaaagcatagtatcactgcgtcttacgatatctttaaaatccatatcggtgtcaggctgataataggcatatccggaggaaacgctgagagaataggaaagatcctgatccttttcatttagaagcagctccagtttatggagcttatcggcaatcagtgctttttcatctttatggaaaatgtaggcaaattcgtctccaccgatccggaaacaattctgttccgattgaaaagcctggcggatacactgatagcaaagctttaaggcttcatctcccttttcatggccaaagttatcattaatttccttcagattatcaaggtctaataagacaactccggttgtatgtaattccagctcctgttcatccagataacggatcatattttcgtaggcattccggttcatggcttcggtgagcatatctatattagccagtttctggaagtagatcagtttttgcttctggatacactgttcataatattgcgatacctggatccagatcagcataaggataaacagcagagtgccaagcggaagaaatacagatgtctgctggaatttgcggatataataaaccgatagttccgataaggcaaaacacataatgaggtacattggatatctgaactttctggcaagttcgtttccaagctgttttgcctcgtaatggatcagtccgatcgtatatgctgtattcactaacatgatcagatgcgtgatcggaagaatctggaagatatcgacaattcccatacactgaagaaggacggctgcgcccatattgatcagataagaaacagacaggaacagggcagcttttttgaatttacttttgcaaatatcatacaaaaggaaattaaacggtacaggaaagagataaaaggtaaagaagtcaataaaatacagtgttcttccatccgggactaaaaactgcaggaaaccgcattgattcagggaccataaggcaatcagcagagagaagattccaagattcaggaatattttagatgtttcttcggaaaaatcctcctgtttcttacgaatcactgcaatatacaataccagagagagaaatcccaaaaataaaacaccgcaactgaggatcagtattcctagactctggctgagaatcttcagaatacaatcgcccctcgtacccagaaaaagatgcaccgggttcccgtaataaccctgatatacaggaatgattttgacggtcagtttcttggtgtcactgtttgccggaatgtctacaatatgccagcaggagccgggtgatttcatgaatttgggtgtgtgtttttcatttccgtattgataaataagtttcccatcaagccagacttctgcattggtatgagtagtctggaaaagaatcgctttttgcgtgtggaattcatcggacaggatcacagattctgttttcgcaccgtcagttttaaaacttgttgttttcagtgaggtggtgttatcaaaaggcagttcgttccgaacagtatcctgtctgaatatccagatggaaaagataacggcaaataagacagatgcgatcaacgagagccatatttttttctctattttcataatttgatttcctttagattctacgtattctcaggtgacaataatctatacgtatagaataacaaaattggcagatgaaatcaatgtgaaaaggagtctgctatttccaaacttttgctttacaaatgatatataaagtattatgataaaaaaaacgaaatcttcagggcagggtgtgattccctaccggcggtaaagcccgcgggccgagaggcatgatccggtgtgattccggagccgacagtatagtctggatgaaagaggatgatggtacagttattttaatagatgaatgtagtgtcagagctctgagatggtgatccatttcagagcttttttgattaacagatcatttgtcagttatatgtaacagatcatttcccctgtaggtatcctgcaggggtttttgtataactaagaaagaaggaagaaaaatgacggatcaggaatacatgctccgggcaatccagcttgcaaaaaagggagaaggatggacgaatccgaatccgatggtaggtgcggtgatcgtaaaagatggccggatcatcggagaaggttatcataaaaaatgcggagaacttcatgcagagcgcaatgcaatcgcatcgcttacagaatcggcagagggtgcgacaatctatgttacgctggaaccatgctgtcattatggcaagacaccgccgtgtacggaagcgattatagaacagaagattaaaaaagtggtgattggttccagggatccgaatccaaaggtggcaggaaaaggtgcacagacattgcgtgaatcgggaattacagtagttcaggattttatgcgggaagaatgtgaccgtctgaacccggtgtttttccattatattacgacgaagacaccgtatgtagtgatgaaatatgccatgacactggatgggaaaattgcgacaaagacgggtgcatcgaagtggatcacaggagaaccggcccgacaggaagtgcagcatatgcggcaccggtatatgggtattatggccggtatcgggactgtacttgcggatgatccgatgttgaatgtccgggtagaaggatggaaaagtccggtcagaatagtatgcgacagcagtcttaggataccgcttgacagccagatcgtaagaagtgcaaaagagtaccggacaatcgtggcttatgcaggacgggaagagaacgaagaaataacagaaaaaatagaacggttacatgcgaaaggcgtggatactgtctgctgtccggatgaaaaaggtcagatagaccttaaaaagctgatgacatatcttggaaatgagggtattgacagcattctgctggaaggcgggggcacgctgaatgacagtgcactgcgggaaggaattgtaaaagaggtacactgttttatcgcaccaaagttatttggcggaaagaacagtaagacaccggtggaaggaatcggcatcggacttccttcagaagcattgaaactgaaatgtacggatatctgccggatcggtgaagatatcagaataatctgtcaggtatgtgaaaaagaacaggagggaccatgtttacaggaatcgtagaagagaaaggaacggtccgctatatgcagctgaccggagagtcgggagttctggcagtcagggcgaagaaggtattggaaagaacgaagatcggtgacagtatcgcagtcaatggagtgtgtttgaccgttacttcactccagccggatgggtttactgcagatgtgatggcagagactgtcaggagaagcagtctgggaagctgcaaagccggaagtcaggtgaacctggaacgggcaatggctgcagatggaagattcggaggacatatcgtaagcggtcatattgacggaaccggtgtgatccggtctatgatcagggaggagaatgccatctgggtatccatcggaacatcgccgcagatattacatctgatcgtggaaaaaggatccatctgtatagacggcatcagtctgacagtggcaaaagtagatgaagagggatttcaggtatcggttatcccgcatacaggagaagaaacgacgcttttggaaaaggtgccgggcgatccggtgaatctggagaatgatgtgatcggaaaatatgtagaaaggctgttaggcatcaaaaagagtgaagaagagaaaaaagaatccggaattacgatggaatttttgcaggaattcggattttagaacaggaggataaataaaaatggcacaaaacaatcagtacaatacaatcgaggaggcactgagagacctgagggaaggaaagattattctggttacagatgatccggacagagagaacgaaggggatctggtatgtgcggcagagtttgcaacacaggagaatattaattttatggcgacttatgcgaaagggcttatctgtacaccgatgagtgcggaaattgcagcaaggcttaacttgcctccgatggttgcggagaataccgataatcacagcacagcatttaccgttgcggtggatcatgttgatacaacgacaggtatttcggcagcagaacgttcctatacaattatgaaatgtgtggatgaagatgcgaagccggaagatttcagaagaccgggacatgtatttccactcattgccagaaaaggcggagtcctggtgcggaacggacacacagaggcaacgaccgatctgatgagactggctggattgaaagaatgcggcgtgtgctgtgagatcatgaaagaagatggcacaatgatgcgtacaccacagttgtgggaacttgcaaaagagcatgatcttacatttgttacgatccgtgatcttcaggattacatgagaatccatgaaaaacatgtaaaagaagaggcggttgcagaccttccgacgcagtatggagatttcagacttcacggatatatcaatgatattacaggagaacaccatcttgcactggtaaaaggtgatatcggagacggtgaagatgtactttgcagggtacattcggagtgtctgacaggtgatgcatttggttcactcagatgtgactgtggtctgcagcttcagactgcgatgcgtcaggtagaagcagaaggcagagggatcattctttacatgagacaggaaggtagaggaatcggtctgctcaataagatcaaggcgtatgcactgcaggagcagggatatgatacggtagaggccaatgtaaagctgggatttgcaccggatctcagagagtactggatcggagcgcagatattatcggatctcggagtgaagtcattgagacttctgacgaataatccggacaaagtctatggacttggtgggttcggactgaagatcaatgaaagagtaccgctggagatccctccgcagaagtatgatctgaaatatatgaagacaaaacaggaaaagatgggacacattttcaaagaaatagaattataaaaagatttaatgaataacaggaggaagaaatcatgagacagatcaatttagtagaaggaaaagtagtagcaccggaggggatgaaagtcggaatcgtggctgccagattcaatgagatcattgtgaataagttattaggcggagctatcgatgggctggtaagacatggggtggaagaagagaacattacggctgcatgggtaccgggagcgtttgagattccactgactgcacagaagatggcacagtccggaaagtatgatgcagtcatctgcgtgggagcagttatccgcggagatacttcccactatgatctggtgtgcaatgaatcagccaaaggaatcgcgcaggttgaacttgcaacaggaattccggtattattcggagtgatcacaacagagaatatcgaacaggctatcgcacgtgcaggaagtaaagcaggaaataaaggatatgactgtgcattgtccgcaattgagatggtgaatctgatgaagcagctttaatcaggtgcagccgatggtgaaaacaatcatttttgattatgatggaacgatacataatactcttggaatctatgaaccggcgttcagggaagcttatcagtggttagtggagcagaatgtcgtagaagaacagaagatagagacggcacagatcgcaggatggctgggcttaaacagcaaagaaatgtgggatgcatttctgccggaattagatcagagatacaaagatcaggcgagtgcgatcgtgggagattccatggtcaggcagatcgggaagcaccgtgcagtgtggtatccgggagcggaagagatgcttacagttttgaagaacagaggatatcatcttgtgatcttaagcaactgtaaagtggcataccgcaaagcacattgggaagaattccgaatggaaagatggtttgaacagttttatgactgtgaatcgtatggtttctgccctaagacggagatcgtgcaggaagttatccgggactatccgggaccttatctggtgatcggagacagaagacaggatttggaatgtgccagatcctgtaaaagtccgtttatcggatgcctgtatggctatggtgagaagggagaactggatggagcagattattttgtgaaatctgtagaagagataaccggaatcatataatgcaaaaaagtgtaaaacattaagtaagctaaaaa

SEQ ID NO: 2942 - DNA, 1040 bp, Unknown
  gut microbiota DNA sequence
aaatttacaacatttacgacaaatctgacactgcttttttcataagattcctattttttcacgcaccatctgtactgataaggcttcatccataccgaattcatttccagtttttctcctgtaaataaatcctcatattcaccttccagacagttcagccatgcattctgcccatattctgaaaaattagccagacagattaattcttcatttcctactgttcttctgattgcaaaaaccgcataatttcctgtgtcccaggtagaaatactggcagtctcaccaaaacaatcctcctgacgcctcatttcttccatctgcttcaggccatgccaaatttcatactgtacagtacctgcttcttttctcttgtctgcattgtcccaccggaacaaactgcggtgcagatacctgctatccgcagcaatatccgggtttttcttataatcataatcatttacctgaccaatctcgtccccggatgaaagcattataaatccttccatgctcatacatgccgcatgcatcatgagcactctctggattccctgtttcacctgctcaagatctccttcaaatccgcctttttcgattccacacagacttgccgttgttccacagcttctggcatctttggtcaccggatcgtaattatacagctctccacgagcaaagctgtacggatatgttccctcgaagaaatgatataaatattccttgtgctgaatcggatctatctccagcttcttctcctgctcttcatccaagccccagccaatatcatcatgacagcgaaggtaattgacaaaataacaattcttcggaagactgtggatcacatccatctggtgtttcaacatccttgtgtccctcgtagccagtgctgcccagagatttaccatgctggaaactccgtataacatatgacattccggttcgttttctgttccaaagtaaaccggaagttcctttggttccataacaacctcgcctttcaggattacaccaggacaaaccatctcaagaatcattcgtaacat

SEQ ID NO: 2943 - DNA, 371 bp, Unknown
  gut microbiota DNA sequence
tctacaatttgttcctaattctttccagatataaggaactgcatcaatacgaaagacttctactccgagatttgccagatacaggatattcccaatcatttcattaaatactttcggattatgataattcaaatcccattgataaggatagaatgttgtcagtacatgtctgtgcatctcttcacaccatgtgaaatttcctggagcagtttccggaaacacctgcggcattgtcttttcaaattgatccggaatttctcgcgtctcatagcactgatagcgatccatatattcctgtgcgcctctcttggctcgtatcgcccactcatgtgtatctgccgtatgattcataactacatccagacataagc

SEQ ID NO: 2944 - DNA, 177 bp, Unknown
  gut microbiota DNA sequence
tatttcatttcttaacatccgcagccagtcacgacttgaagaaaacagtataaagtggttctggtgaatgtggaatgctcttaggaaaagttagagagtcagaatctccgttaaaggaacgaagcgaacgtgtttgaggcgaacgccgagtttgagcgtagttcctttgcttttagg

SEQ ID NO: 2945 - DNA, 504 bp, Unknown
  gut microbiota DNA sequence
tgccatcgctcaacggataaaagctaccctggggataacaggcttatcactcccaagagttcacatcgacggagtggtttggcacctcgatgtcggctcatcgcatcctggggctgaagtaggtcccaagggttgggctgttcgcccattaaagcggtacgcgagctgggttcagaacgtcgtgagacagttcggtccctatccggcgtgggcgtaggatatttgagaggagctgtccttagtacgagaggaccgggatggactggccgctggtgtatctgttgcataccaagtgcatggcagagtagccaagccgggacgggataaacgctgaaggcatctaagcgtgaagcccccctcaagatgagatatccctacgtaagtagtaagaccccttgaagacgacgaggtagataggtcagaggtggaagtacagtaatgtatggagctgactgatactaatcggtcgagggcatgaccaagcaaggtgataggtaggatgaa

SEQ ID NO: 2946 - DNA, 523 bp, Unknown
  gut microbiota DNA sequence
ctaggcgaacctttggtatttatcagatcaaggatgattcaccgggcgaaaactatgcatttatgaatatgcgctttattgaaagtcatggtatgcagataaaaaaagaagattataagctggtctatgttggagacttatcgggaaatatgtcactgggagatatttttgaaaggttcaacattgacagaccggaagacttccgaggacattccctgtctgtcagtgatatcgtagttctgaatgacggggaaaaagtaacagctcattttgtagacagtatcagttttgaacaactggattctttcctgaatctggaagaacaggttcttagtgaactggcatatgaggtaggagaacgttactttgctattcagagaacagaagaaggatacgattattccttttacgatgaagatttccgtctgatggatggtggcgtctatgaaaaggatgaaatttctattaaagaagcggcagaggaacttctggaagacgaaggctggactggagaacgcatccg

SEQ ID NO: 2947 - DNA, 608 bp, Unknown
  gut microbiota DNA sequence
tcatcttttggtattagccaagtctttccctttttctctgctccaggcactcttccctggctacataaaagagaaattcttctagatgaaattccccatatttttgacatttcgatcgttgttatataatccataattttcctccaaacgatacaacaagcctattataagtatattcttttatcggaatagtttcaaccaaaattaagttttcttctaggttgtttgatttgttattgttttctaagattttcacaaaaacacctggtaaataatcttttaaaatcatctaccaggctttattgtttatcttacacccaaatcagcccctctctccagcttatcttttccctgcttttcctggataattttcttattgatttccaagcgttcatggattgatggtttcttctcttttcccgtcattgctctcttttgtgctactggctttctttcagctttccctgcgtccttaactgctgtatttgcttcaacgccggctcttgacacagcttctctgctctcatttttctctttcacctgctgttctcgtctctccttcacacctttttcttccagactgcaaaagctctgcaaatacggcagaa

SEQ ID NO: 2948 - DNA, 1608 bp, Unknown
  gut microbiota DNA sequence
cttccttcttttcttaatttttccagaagattttctcttttcatatttttcatcgtcatttcgtaatttactgtctttctttcagacttcaactttttcttctgttgctttccggattcccaatctgattgcctgaatattcgtaagtggtgattttgttcccagaccacatgccggtgaaataatcccggaaccatctctccaacatttgactgctaactgttccactttctccggattcccaaattccagtgtccatgtgctgacatttcccatcagcacatgctttttcaaatgcttcttcgcatcgctcatcgctacacaggaatcaaaactcagcacatccgaatggatcatttccacctgcgcatacacatttctcatctgcccgcagatatgtacaatcacacccatcttttctgcctggagatggtcaatgatacggttaatgtagtgcaccgcatattcctcaaataattttggtcccagaatctctcctgttccgctcggatccgaaatcgctataatatccgcccctgcatcaatctgcgctctcgcaaaacggatgatctcatctgctaccagttccatatatttatgggcatcttctcttttcttacgcagctctttataaaatatcaccggctccattaccgaacttgccgtactgaccggtcctgtaatatttccaatgatcggcacatccagattcctcgatttcaaaatgcggattgcatccagtacaaccttgactctcccgtaattcatatccatcggcctgattttctcccattctttcaccgaatgcaaggcatattctgtcacatgcggctcatgcaccctgtctcccaatgtgacttttgcacccatggactctgcctcgatcgtcatgcagaatggaacacctacattctcaaaacagccattttcataattggcctgtgcaagatccgccatcatctctgcattcagatgtgcttccggccatgtaatcccagatttgtccatcaaatctgtcgtaatcatattcatcattccgcccggacagatacatggcggccggtctgtcttttcatgatgtaacgctttttttagtctttctttttcattcattgattactttttttcctatctaatatcttctattcggatgaataactttacaaccttaacgtgctcactttcataacatactatgcaatattcagtaattcttttgcaactctgactgcttctactgcattaacagaatagccatccgctccgatatcatttgcatatttcttcgataccggacttcccccgaccatgactttcacattatcccggattcctctttctttcaaaagttcgatgatatcttccataccgctcattgtggtcgtcatcagtgtggaaatgcacaccagttgtgcctttaatgcttctgcctgattcacaaattcttccgccggcacatctcttccaagatcatgcatctcaaatcctgcagtttccatcataatcttaaccagattctttccaatatcatgcgtatccccttctaccactccgataactgcaatcggttttgcagcctgttcctcttcgtccggcagatacggtctt

SEQ ID NO: 2949 - DNA, 59818 bp, Unknown
  gut microbiota DNA sequence
atacctttttcaagggccttttctgcgattacttttcctaaatatgctgctgcatcaacgttgttagttttctccaggtttgctttcacatctttctgaagagtggaagcggaaaccagtgtatttccaactgtatcgtcaataatttgagcatacatatgattattacttctgaataccgctaaacgtgggcactcagctgtaccagataaacggttacgtaattttctgtgcttgtttacgcgaacttcacttcttgattttttgctaaccattttcacactctccttacttattttttaccagtcttaccaactttacgtctgataacttcatcagcatacttaatacctttacctttgtatggctccggtcttctcttgtctctgatctcagccgcaaactgaccaactttttctttactgagtcctttaacgatgatcttgttctgaccttcaactactgtctcaatgccttcaggatcttccatctcgactggatgagaataaccaaggttcagtgttaatttgttacctgattttgctgctctgtatccaacaccgttaacttccagaactttctggtatccttctgttacaccaataaccatgttattgatcagtgttcttgtaagaccatgtaaagatttcattttctttaagtcatttggtcttgttacaacgatttcttcgccttcctgtttgatttccatctctgtaggaagtgctttttcaagtgttccctttggacctttaacagtcactacattgttctcagcgatctcaacagttacgcctgccgggatagcgattggatgtcttccgatacgtgacataccttattcctccttaacttagattctcggaaaagctctgtaggcttttctgttttcagtttctatatggcaatcagttcaggctgtgccttacggcacaccttcactaagttgctcacgggtttcttaccaaatatagcagagaacttctccaccgataccaagctttcttgcagctttgtcagtgattacaccctggtttgtggaaatgattgctgttccaagtccaccaaataccttaggtacattctcgcttgaagcgtatacacgaagacctggtttagaaattctcttaaggcctgtgataactttctcgttcttatcagcaccgtatttcagtgtgatgtgaattgttttgaatactccgtcttcaataacatcgtatttctcgatatatccttcatctaacaagatattagcgatagcaagcttcatcttggatgctggaacatctacagtatcatgtttagcagtatttgcattacggattcttgtaagcatatctgcgattggatcactcattgtcattgttctttcctcctaccaacttgctttcttaacacctggaatctgtcccttgtatgctaactcacggaagcaaacacggcagataccatattttctcaaatatgcatgtggacgtccacagattctgcaacgattgtattctcttgtggagaacttctgcttgcgctgctgtttcactttcattgctgtcttagccataatttacctccttattttgtaaatggcatgttgaactgagtgagcagttcgcgtgcctcttcatctgtattagcagtagtaacgaagatgatatccatacctcttaccttatctactttatcgtattcgatctcagggaagatcagctgttctttaattccgagagcatagttacctcttccgtcaaatgcgttaggatttacacctctaaagtcacgtacacgaggaagagcaaggttaaccagacggtcaacgaactcatacatcttttctcctcttaatgtaactttacatccgatcggcataccctctctgattttaaagttagcaacggactttttagctttacaaactacagccttctgacctgtgattttctccatgtcagcgattgcagcatctaaaagttttgcgttatcttttgcttcaccaacacccatgttgataacaactttatcgagttttggtacttccataatatttttataaccgaactttttgatcattgcatcaacgatctcgttctggtactgttctttcagtctactcaaagctttggacctccttcctcaaattaatcaatcacttcgcctgttgatttagcgtaacgtacttttttgtctccatccatcttgataccaactcttgtagcagttcctttgtgaacatacattacgttagagatatcgattggtccttcctgacgaacgattccgccttcctggttctgagcacttggttttgtgtgctttgtcagcatatttacgccttcaacgataacctttcctgtcttctggttaacagcgataactttgccttctttgtctttatctttaccggcgataaccttaactgtatcaccttttttgatctttaacattgacatcttacgcgcacctccttaaagtacttccggagccagagaaacaattctcatgaactgtttgtcacgaagctctcttgctactggcccgaagatacgggttcctcttggtgtcttatcatcttttataattacagcagcattttcatcgaaacggatgtaagatccatctttacgacgtgtactgtttacagtacgaacaactacagctttaactacgtcaccttttttaacaacgccgcctggtgttgcatctttaacagtcgcaacgattacatcaccgatacttgcatatcttcttgttgaaccgccaagtacacggatacacagtaactctttcgcacctgtgttgtctgctactttaagtctgctttcttgctgtatcatgcaggtttccctccttatactatttcactttttccataacttcaacaagtctccatctcttgtcttttgacagaggtcttgtttccataacttttactttgtcgccgatattgcactcattgttttcatcatgtgcttttaatttatatgtcttctttacaatcttcttgtaaagtggatgttttacatgatcttcgattgctacaacgatagttttgtccatcttgttgctgacaaccttaccaactctggtttttctaagatttctttccacagtctgtaactcctttcattttgtgagttttcagtttctactgagctgccttttcagtgattactgtctgaattctggcaatatttcttcttacttctttaattctgcttgtattgtccaactggtttgttgcgttctggaatcttaaattaaaaagttcctttttagcagctactaattcttcattcagctctgcagctgattttgcttttaaatcttcaacaaatgcattaattttcactgttatcaccgccttctaagtctgcgcgagaaactactttacatttacatggcagcttgtgagttgcaagacgaagagcctctttcgcaacttcttccggtacacctgcgatctcaaaaagaacgcgtcccggtttaacaacagctacccagtattctaaggttcctttaccagaacccatacgtgtctcagctggtttcgtagttacaggtttatctgggaatatcttgatccaaactttaccaccacgcttgatgtaacgtgtcatagcgatacgggctgcttcgatctggttagaacggatccagcaaggttccgttgcaacgataccatattcaccgtttgtaatctggttaccgcgaagagctttacccttcatggtaccacggaattgtttacgacgttttactctttttggcattaacatgattatctatctccttccttaactgttttctccggaagaacttcgcctttgtagatccaaactttaacaccaacttttccgtaagttgtgtttgcttcagcgaatccgtagtcaatgtctgctctcagtgtctgaagaggaattgttccctcgctgtagaactctgtacgagccatgtcagctccaccaagacgtcctgatacagaagtcttaacaccaagcgctccagatttcatagttcttgacatgcaggatttcattgcacgtctgaaagaaatacggttctcaagctgtaatgcgatgttctcagctactaactgagcatctttatccggtctcttgatttctttgatgtcaacgattaactttttatctgtaaactgtgctaattcaccttttactttctcgatctctgctccgcctttaccgattacaacaccaggttttgctgtgtaaacgatgatctttacgcggtcagatgctctctcgatttcaattttagaaataccagcactgtataatctcttcttaagatatgttctgatttcatggtcttccactaagcagtctgcgaaatctttctctgcataccatcttgagtcccagtctttgataactccgactctcaaaccatgaggattaactttctgtcccatgtttgccctccttatctttcatcaagcacgagtgtaatgtggctcattctcttttcgattctgtaagctctaccctgtgctctaggtctgattctcttcattgttggtcctttgtttgcataagcctctgcaatgtacagattctcagcattcatgccgttgttattctcagcatttgcaattgcagactctaataatttctttattaaactagaagcatatcttggattgtatgtcaaaataccaagtgctgttgttacatccttacctctgatggcatctaatacgaagcatgctttctgaacagaaactcttgcgtaagataacttagcagaaggtcttgtatctttgttagcatttctttctcttttaatttgggatctatgtcctttagccatggatgaaccctcctttcacaatctaattatctaactttggatttcttttcgtcttttccgtgtcctctgtaggttctggttgctacgaactctccgagtttgtgtccaaccatatcttcagtaacatatacaggtacatgctttcttccgtcatgaacagcaattgtatgtccgatcatgcttgggaagattgtagaacgacgggaccatgtcttgattacagacttgtctccagcctcgttcatagcatcaacctttttaagcaggcttgcgtctgcgaatggtccttttttaatagaacgtgccataggttctaacctccttatgaaaactatttaattgctttaccatctcttcttcttacgatcatcttgttagaagctttatttttctttcttgtcttaagaccaagtgctggtttgccccaaggtgtacacggacccggacgaccgattcctgtcttaccttcaccaccaccatgcggatggtcattcgggttcataacagaaccacgaactgtaggtctgattcccatatgacgtttacgtcctgctttaccaatgttgatcaggttgtgatcaccatttccaacaactccgacagaagctctgcactcaagcggtaccattctcatttctcctgatggaagtctgagtgtcgcatattttccttctttcgccattaactgagcactgttaccagcggaacgaaccatctgtccaccttttccaggatgaagctcaatgttatgaacctgagtaccaaccggaatctgtgctaatggaaggcagttaccgattttaacttcggcttctggtccattcataattgtcattccatctgtaagtccttctggagcgatgatatatgctttttcaccatcttcatagcagatcagagcaatattagctgttctgtttggatcatattcgataccaagtacagttgcgtgaatattgtcttttcttctcttgaagtcgataattctatattttttcttagctccgcctccgcggtgtctaactgtgatttttccttgattattacgtccagcctgtctgctctttggagctaacagagatttttctggtgttgtctttgtgatttcagagaaatcagaaccagtcatctgtcttctggaaggcgtatatgggcggtatgttttaattcccatgataaatctcctttcaattgtttattgtcacggtttctgtccgtatgctttgcaatcttataatccctggaagatctcgatatccgcgctatcctctgtaagttttacgattgctttcttagttttagctgtttttccgaagttgtaagttccacgaactcttttcttctttccgtcgttattcattgtgtttactttctctacttttgttccggtaaacattttttcaacagcttctttaatctgagattttgttgcttctgggtgtaccaagaaagtgtatttcttttctcccataagttccatactcttttctgttactacaggtttaaggattacatcataatactgaacgtttgccattatgcgtacacctcctcgattttagcaacaacagcttttgttgtgattactgtgttgtattttaagatatcgtacacattgattgtattagtctttgcagtcttgatgtcagcgatgtttcttgctgaaagttctgcatttttgttgtcatcctctaatactactaatgctttagatacatctaaactcttaagaatgtttgcaaagttctttgtctttgcttcttcaaagttgatctcatcgattacgataaatttgttttcttcaactcttgatgtgagtgcagatttcagagctgctctcttctctctcttattcattttgaaagaataatctctcggaactggtgcgaatacaactccgccgcctgtccactgtggagctcttgtggatccctgtcttgcatgaccggttcctttctgtctccatggttttcttccaccaccagaaacttcagaacgtgttttcgctttctgtgttccctgacggttatttgcaagctggcttacaactgccatgtgtacaagatgttcatttacttcaacaccgaatacagcatcgcttaagtcgatcttaccaacttctttaccttcgatattataaacagatacgttagccatcttaagtgtcctccttccttcgccaaatcttagttagcttttactgcttctttgatagttactaaagatttcttaggtcccggtactgaacctttaaccagaagtaagttattctcagcatcaacacgtacaactacaaggttctggactgtaatcttcttacttcccatatgtcccggcatgtgttttcctttgaatactttacttggatctgaacaagcaccgtttgaaccagcatggcgatgatacttagaaccatgagccataggtcctcttgactgattgtgacgtttgattgcaccctggaatccttttcctttagagattgcagttgcatcaatcttatctccagcagcgaagatatcagctttgatttcctgacctaactcatattcgctagcattttcaaatttaaattctcttacaaatctcttacctgtaacaccggctttagcaaaatgtccctgctctgcctttgttacaccgtgacggtgaacgatttctttctttccacctttgtctttgttgatgatcttgtctttcttgtcaacgaatccaacctgaacagcttcatatccgtcattctcaacagtcttgatctgtgttacagcacaaggtcctgcctgaagaactgttaccggagtaagtgttccgtcttcgttgaagatctgagtcattccgacttttgttgctaaaatagctttcttcattttattttacctcctgtgatttacagcggaacgccctttttcggacgctcatcctaaattataggaattactgcttcttatttcattttgatatcaatagctacaccagctggcatctctaatctagataatgcatctacagtcttctgtgttggtgcaatgatatcgatcagtctcttatgagttctctgctcgaactgctctctggaatctttgtatttgtgaacagctcttaagattgtaactacttccttctttgtcggaagtggtacaggtccactcaccttagatccatttttctttacagtttcgatgattttcttagcggatgcatctactaactgatgatcatacgcctttaaagtgattctcattacttgacttgccataaaaaaagtcgcctccttttcgtacttataatcgagtacgacaagcggtgactgtacactctcccgtgtgtgtcgtgagaacccacacgttgttaccacatcgcagtggctgttatagtagtttcgtacagtgacttgtcgccagtttcctaacttgacattcgctccacggaaaacctgctgatctccagcagcaacctcacgcttcaacgctatcatgtcacagctctcttagtatatcccaatccggcagataatgcaagtactatttttgttttttttaccgtacaatctttcagattctcttttatatcggcgctgttaatttttcgctaaaagtatcacttttcattatatctgcattatgttttctaatatctctattgatattttcattttttcagactatactgttattataaactagcgcagacagggaagtcagacatcagagatgttttgcttcccttttttgcaaaaatataatagagaatggagcgtgttacatatgagcgaaaatggaaaccaatctcgtgaatggagctcaaggtttggatacatcatggttgcggccggtgctgcgatcggactaggaaacatctggaaattcccatacctcgcttatcagggcggtggcggtgtatttctggtcgtctatatcctgattgttgccgtcatggctcatccaatggtagagatggagactgcaatcggacgccacagcgcttctgacacagtaacctgttttgaacgtattaataaaaaatggggattcgtcggctggctggcaaatatctgtacactacttatcaatatgtattatgtcgttgtcggtggatgggtactcaagtacgcttttcaatacattataagcggcgacttcggttcagacaaacaggcctacttcacagattttactacttcaactgtcgaaccgattatttgggctatgatcttactggcattcgtctctatattgttactgttcggaatcaccaatcttgtagaaaaagtaaccaagattatcatgccggtactctttctcttccttattatatgtggtatctgggcgatctttgtaaccgataacgcaattgaaggattaaaatactatcttcttcctgatttcagcaagttcagtttcaccgtattttcccaggctgcaacacaggtgctcttctctgtaggtatcggctggggaatctatgaaacactgggggcaaatattccaaaaaagaataatctaaagagcgatgccattcttgtatccatctgcgataccggtgctgccatccttgccggctttgtaattattccatccgcattcgcaggcggagtcgatatgcaaagcggtccgagtctgatcttccttgtaatgaccggcatcttcagcaaactgcctggaggacgtctgatcggcatctgtttcttccttgcgattgtatttgccgtgatttcatcattatttacattctttgagatttctatccgcactttcgaagataacctgaaaatgggccggatcaaggcaacacttatcatttctctgatcatcggagtcggcaacattatcgtttctctcggattcggagtattaagcggcataaagcttccatggctggacgcttccggtatatcctatctcggactctatgactggcttgacacatttaccggatatattctgcttccgctcggttgtcttcttgtctgtctcttcgtatccaaggtctggggatttgaagaatacgaaaaagaacttacgaacaacggcaaattcggaagaattactttatatgataagattcttacttacattgtcgttccggtcttcatggtgatcattattctgaatgtatttggattcatacgctaaaatccggtgtcagacaccgacactttcttcggtcatatgatatttttaaaaattttaattttatctacttgtaatttttatattttttcgctactattaataagcaaataaattttcacgaatttttgtattttttatacattggagaataaaagaatggacatcaaaagttggaaaatcatgctggccgtagatgattacggcagctttacccgtgtaggcgcagaactcggttacacacaatccggcatcacacaaatgatgaaaaatctggaaaaaaaggtcggatttccactctatatcaaagatcaccacggtatcacacttacaaatgaggccaaatcactgattccggcaatccgcacattattgaatgccgacgaggtgattcatcaggaaattgcagcgttaaacggtgctcaaagaggcacaatccggatcggtacttatctcagctgttcgattcactggattccaaagatcatccgtgaattccaacagaagcatccggatattatcatccaggtaatcgagggtgttgaaggcgaacttgccgactggattcaggagcgccgcgtagatatcggatttatcagcctgcagaaaaatcataagtatcaatttcttcctgtcatggacgatccaatgtatgcagttattccggaaaacgatccgcttgccaaagaagaggaaattccgatcgaagtattcgagggagctccttttatcatcactgaatatacacccgggagcgatgtgcaccgtgtcttaagaaagaataaaatccatccggatatccgttacgtaacccgaaatgaattttcttctctttctatggtagaacacgaacttggatactctatcctcccaggtcttctactccgtggtcaacaggggaaattcgtcaaacgtccgctgaaaccaacgattacccggcagttaggcctggcctattcttctttagaagatttgtcaccggcttccaagacatttctggaatacgcgaaaaatttcctgttagacgattaatcccgcaaagctgctgttttatctatatactttacttaacaaacaaaaaccctgctgtttttcagagcgattacagcagggttttctattatataaaatgtgtcagatgcactcagtgccttaaataaatccaaacacatgaagtattacaaccaatgtaagcaccggacagattactgccagagataacttatcatacatagatagttttccgtgttttccattatttgtaagttctttttcatactctttaaatccccatgctttcacaatatagaaacatgtcagcaatacacccagaggcaggagtacataaccgctcaggcagtcgcaccaatcataaatatcgtaataagcaattccctgaaaactcggccatggaagtttcaaccagctaagtatgccttttgacaaagaacagagaacacttccgccgtacaccagagccgctgtaataatcagagaaacctgatgtgacgtatgcgtcttctcctgtacatacatacgcggaatttcaagaatcgtaaagaatgttgaaataaccgcaaaaatcaaagatgcgaagaaaaagataccaatcattcttccacccggtaacgtttcaaaaatctgtgtcattgcgacaaacacaagcgatggtccggaagacatctcacttcctgtcccgacaactgtcgggatgataacgaacccggcaagcagcgcaataaaagtatcgcagatatctacccaccatgcatctgccttcagattagcgtctttatccatactcgcgccaagcgtcgtaaagataccccatccaataccaacagagaaacatacctgcatacatgcatctgcaaactgctgcattccgaatttactgaaatccggcacaaaataatatttcaatccatccacagctcccggtacaacgattaatgcataaataccgcatacaagaagtaatactgccagcatcggcataatcacttttgaagctttctcgacaatattcgtaatcccaaagaaaaggaagaaaacgatgatcgcaataataatcaggctatagatcaatggctgcgttgtactgctgatataattatcaaagtatgcctgtttatccttgccaaaatcaccggacactacataagtaacaaaatatttgagtacccatccggatacaaccagataataaatatcaatcaagaatgtacatactatattaatcactccgacaaaacgccatttcggatgaatcacgccatagcttgcagctgcacttgcacgtcctctacgtccaactgcctgttccgcctgaacgatcggatgccccagaagaatacagattacaatgtaaatcagaacaaacgctcctcctccgtcaccgtaagccagatacgggaatttccaaatatttcccaatcctatcgcagcaccggccgctaccataatataaccgaatctcgagaaactttttgcttctttgtgatcactcatatataatcactcctatcctttcaagtattctacatgacccttttattccctggtttgattatccttaatttctactgtctcattcatactttggtctaaaacaaaaagggcgttacttctctttcctcaagaagtaacacccttgtcacgtaaaatctgttcctattataacaggcaggaaattatctgtcaatatttatatttcgtgcatatttacatatatttccccgcaaacattactattcactcatattttttcacaatcccgactcttcaagctgcttcttggctattatttttgacatcatttctcatttattcattaaaattgcacgaaagagtacccatcaattccacattttcttgttgcaatgccagttttttacatccttattgacatcatcggattaacgtgctatattaatatcaacttaaaaacagacacagacaccaatggcggttccttaacagaattctattatgcgggaactgctcttttaaaatcagttattatatcgtagtagtttgttcttaagaaaccatttttatggttgttattgcagttatacctaagccggtcgtttcccccaaaaatgaccttgcgaaggtgaactccaattgatatatacatcctctatatagaggagcattccccagctttgtatataaagacaaaactgcaatgcaacgaggaaaaacctctcaatgacataccaataagaaagagcacgacatgttcagatgtcgtgctttttcttattgaatctgtctataattttcatgtttgattgacttttaacgatttaattggtaaaatattaatacaaagcaatgcgtgaatttatagaaaatctttacaaatcggggtgtataagatttctttttttaaagtgctaaaatacattttgcacttatgcattcacatgtatagcttgtcaacaattaaatatgaaaatctggatggatgaatttatgttattagcgatccaaattttattaggtgttatgttcgccggaacaggtatcggccttgttgtcgacataagcaagaaccgcatggatgaactcaaaggttctacaggtaagcagtggggttccgcttttgcggttggtatcatagccaacttccttgatactttaggatgtggttcctatgcaccatcaacattcatgtacaaactttttaatcagattgatgatatcaacattccgggtacactgaatgttggtgacacattcccagttatttttgaggcattcatcttcacaacttctgtagaatgtgatcctatcttcttatgggtaatgtttatctgtgccgctgttggttcattcggatttgcatccatcgtaacaaaatggccacgtaacaagatcagaattgctcttggaacaattatgattcctcttgctgcgattatgctttgcaagaacttaggtgtcggacctttcggtattgttggtactgcaacaggattaagcggatggaaactgatcgttgccgcagctcttaatatcttatggggtgctttaatggatatcggtttcggtctttatgcaccatgtatggcaacatgtctgcttcttggtgttgatgctgctacatgcttccctgtattcatgggatcttgcgcatgcttaatgccggcttgttctatcgagttcattaaatcacacagatatgacgtaccacacacaatcggtaatgcgatcggcggatgtatcggtgtatttattgcatggaaactggttacaggacttccgatgttctggctcatcaacttaatttgtatcgttcttctttggacttcttacacattacttagtgcagcaaagaaagataaagcaaaaggtattgcttaatatccgcaaaacatataaataagcaatgcacttatttaaacaaaataacatccggatggcagtcttaacagactgccatctttatatcctgacacacaagaggaactgcctgtgcagtttccacgcattacaattttatttatggagaatatcatatgtttgttaatgaatatgtaatgacacgcaagcgttatgacaaatgggcagctccaaaattctggaggcttcccatcttttacgtatattgtataatcttcgcagccggaacttttggctggatttattttcatcatgtaggcgcttcgctcagatggcagtctgttggtgctacactttcctttatagccctctaccgcggagtatttttcaaatggatgcatgctgacaaaactttccgtgtgacacgcgcacaatatttcaatggaaaagactggacatgtaaagtgatgatccgtgagaaagatatagcactctttatcaacaataagatcaacaatcatgtaaactgggaagatctcacaaaatttgaagaagcaaagacttattataaattaacttccaaagatcagatagaaggagttatgcttgacaaagactcttttacagaaggggattcgagcagttttaaacaatggatgttagaacagcatccggaaatcaaatacggacctattgatccggcatttgacaaatagaaaaagagaagatttccatcgcaaaatgtggtaatcttctctttttacaagttctccgttttccttttttcagacattctgtccagatattttaacgtccttccagttcgtctttatggcgcatcttgagtttcagaagtgccttcgccttcagacagtctactttcaccatattattttctccgacaacgtctgtttctgtgccatcggcactcttattaatatcaacgattccatccagataatcattgactacaacgaacttcgcaaccgttccgctgaaattaagtcccgttaccggaattccacgaataccaagttgttcacatgtgttggtataatccacatcactatttccccatccatctgatgatatgatcacaccatctgcacgcatacactcagccattgctgccgctctggttccaaccagcatcttatctttattatcatccggagtccctactataataagtccaagaaggtccagatctgtatcctcagatacgacttccagaagaggatctctgaaatgatgtaatgatgtttcttttgtcgatggtccaatacccataacttctgcacctcctgttattactgcatcgaacggataataccgtctctgtactcatttggagtaatcataaccggcatattacccatatcgataattgaacgtccgccttcaacccctgacggttcatccgggaacatccacgtatcatacatagctccctgacctgcaacctgacggataatgacaaccttcttctttccaggtctcaccttatcatgatattcatgccgttccgtacacttgtcccctttgaactttttcagtttatccctgtatgtctgaataaattcatcacacagtctgtgcgcagtaaatggtccatgtctctcctgtcccattccggccgcaaatgtaacatcaaaagaaatgatataatcatcatctcccggtgtacctgcacggtttaagtataactgttctttcagcttcccttccgatgaaccaaattcgtgacactgctttccattcacatcaacgcctgtcagcattacatatacaccggttatggtgtgagtaattccttctcccaatttaccaagtacttttgttgagattggaatgatatccatgatcgtattcgtccatctgtcgtggtctcccggttttatgatctgaatatcaatcttctcaatacaatcatcctgtgcaacaagctgatcgatcatctctttactgactgtcatatgtccatccgttgtaatattattgtgttcaccccattccacatctgtcatatgaaatgctttgatcacaaggcgtcttaagtctatctctttctcagccatcatgtcacctcctatattcttaaggcatatctctttcctgtaccgttcaggaaattaagcatatctctgcccctttctatgccttctccatgtctctagtatacaatatactgcaagaaattccaatatattgtcttattctttttttaaaaaagggcagatgcaaaatacatctgcccttcttaagatcaacaatattctttaaatagaattagatcttagcaacatactcgaacggcaacggaacaatctttcctggagtttcgattttctctaactgctccagagttgcctttacgatctgtgtctgctgttctacgttgtgaggaccacccgcattagcacccataggtaccaacggagctaccgcacgaggagtaccagtctgacgaacaactggtggaagagctgcaataataattgtaggaattccagcttcttcaatcgctctctgcaccaatactgcagagcggtggcaggtacctcagccagcggtgaggattactgcgtcaacatcctcatttttgaacatttcagcgatagcaggaccagtttcatgtttgaatttctcctggtttccaccaccacccatgaatccagcatgtacaggagcacaagctctgataaatccttcttttgctaattcatgaattctgtcaattgggaacatacagttgatgtccttgttaacatcactgttatcatatccaccgtgtgataccatcaaatcactagatggtgtagtgttttcgatctttctccatgtgaagtcaccagcaaggttaaatctctcctggctcttcttgtgaacacctgctgctgttgcaagagcgatagacatatctttcagctcttttgttacaggagtccatactgacggtggagtaataggaacgaatatttcagactgtaagcctttaacaaccgttaaactcatttttaatcctccttattagcatccaaacgtgcttgcatttcttgttgtttgcgacgttctttttcaatattgctgacgtatttctcatttacttccggtccgagctgttccggaaaactcatgttccagccaacttcctgacctactttcggttctgtatcgcagatgaacattctcttcggagctttaaagaaccccagacgtcctttcaggtcgatgctgatgctacagtcatcaacatctacgatcacaccttccatataaatgatcttatcgccatagtgtaaacgttcattatccattatgataacacccgatcttagtcgtatttttctttacgtttctggctcatcggcagagactgttcgttgtctacgagttcaatcttcttaccgcaagctgcttcgatcagctctacgtttgtagatttaacgtttggattccacttcttctcagcggcctttacttcttcaccagccatagctgctttcagcatagcaagagcacggataccctcttcctggcaaagtgtattacatccaagtacctcattctcgataccagactctgatttgttattgtcaaccatgtactgcatgtacttgttaccaacaacaagtgcaccctgaacagcgcagaatgaaagtcctactacaggaattcctctcataccgatctgctcgatgtggcttgcgaaatcaatgtggttatttccgaatccttctgttgtaacgaaagctccgtcaacatccatcatttctacagtatgtcctacacgacgagatacatagtacttctcagcattgatctgaggtgatcctacgaatacaactccgcaaaggtcaacttcttcatcatgtaaagcttcaagtacaagtggctctctccagtaatgtcttgacatctctttagatgcaggtccgatacatgttaatgcatggatacatccatcaagtacctcaagtggagatacgcatacaggtacgtttcctaagtctacgttagctcttgcgccaaggataccaactggttctacaggaaggatgaagttatcatgcatagctccctgtcccatgatctcttttacgattacgactttcttcttacctggacgacggatagatttcagttcttcgtcttcaacaatgaagctgtcatctaattctttcattacttcacggatttcctgagtaatgatatcgaatgctgtatgtgcagccataggtccacgacgttccatgttagtcttttcctgaactacgatgttacctttgataaagatttctcccttatccgggcatccaggacgtccccacatgatgttctcgtcaaggtatccttccgaagaaccgaactcaccaatctgaactccgccttcatctgttcctgtcagcatcataacaacgccgtcaagtactcttgttgcaccttcaccaaggattgcatcgccttcttttgtagcgattggctgaacatccatgattgtctctgagtatgtgtggtattggtcaggagtgataatttcaagatggaaatctttaaccagttcctgatcagcaattacttctgcttcaattccttcacggatgtaaagagttgttccttcgatctttgtctctggtcctctcttaacctctgtgatcttaatgtgtcttctcgttaatgttcctactactttttcttcttcaacaggtgcttctgctgttgctgttgctgctactgctgcaggtacttctgctactgcttctcctgttgttccaagagctccaaccgggatttcaagattgatgtcttttccttctccgatgtggatcttgagtgttcctccagctactgttgctgctgttgcaactggtgctgccggtgcagcttcctctgctggagcttcttcctctgccttttcttctgctggagttgtaggtgcttttacaccatccagaacatcatttgttaacgggcaaagagaatcacatgtttttgtaagttttgcacccagtacttcttcaatagtaaggcatccgtccaggtttaataatcctgaatctaccagatcatcaaagattgctggatcttcgaggttcgccggttcaattgtgataccagcttctgctctacagcacagtactgcaggatcatgagcatgtgcttttgctgtttcagctgtgattgacatattgttttccctccttgttttgtttcggtacattgtcccttacgggatattgtaattttaatatatatacagttacatacaacattcagaagaacctctcaattacttctggcgggcaaaagaatcgggggtcttctacctcattgtacgcaacagtaataccataatataattttgataatattgtgtcacttcggatagtgattaaaaatcaatatcctgacttacttcttttgaaaccttcaggcttctgtacagcggatgtccaactgttctcataacgtggtctgtctgatggaatactttcagtcccatcttcggtcctgacgccattacagtatttgaacagtctgagcagttaccgatcagaatgtattcacatttatcttttttaaactgcatattgttcttaacctgtccaggacagttaccaggtcttaagcacttcagaggtgctcccggtttgttttcaattgcctgtttacatttgcacatagatactactttggcattcatcttagaagcgatctcacgcatacgctcttcgcttccgccgcaggcacatacaagaattcccattgttgctccgtggagatccgggaactcgactgttacaaggattgctcctgtcgtcttggttgttggtgcatctaatgtagtagactttcctgtgaaagctccacccatgatgatctcgccatattttccgtcgattccgccggctttttcgatcatctctccaacgcttacacctaccggtacatcgaagaatacatgtgcttcatttccaccgtttaatttaccacggactgtcatgttcttgctgatacaaggtttcttttcatcaaccgcttctgcgatcttacagactgtctctacgttgacaacaacggatcttgctgctgatggaagctgtgtagttgtgagtaataccccaagacattctcttactactgcacgttcctcacccatcgggtagatatcagccatcaggtgcatcttgatatcaggctcgttttcaagagctttctgtaacaccttgattgctttgtgatgtttctttttgatagcaatgattgctttcttagcgtgagtaatctccatactatatttaataccacggattaacttatcgctctgttcctcaatctgtcttgtgttatgttccagtcccggttcgcattctgccgcattaacaaggatgtatccacaatccagtgtgaagtctttcggaagttccgggttgatctcaggatcaagctctcccattggagtttcttctaaattaatattaagttttactcctgtcgggaatccggctcctcccattcctacgattccggctgctttcaccagatcaagctttgatgactcatctgtgataccttctactgattcggtaacaggaacgaattcatccggctgttcagcggccggctcgatgatgatgcggtcttctgtaatctctgttacttttccatacacgcttgaaaaaatgttagctcccaggcctgttggtgtagcaatgagagtaccttttttcacctcagcaccaacttctacacatggtgcacaaggagcgccaacatgctgacgtaataacatctgtacatttcccatgacacacttctcctttttaaatattttatctaagtcaaaacgaaactatacagttcgtttacttattcacatttttttcattatagataaattctataaattcatcttcgccatttttttaacagaattgcttgtttttttggcggaggcatgtgggaatcgaacccacccaggacgctcttaacgccctacactagttttgaagactaggaggcacaccagttacccaactacccccatgtgcttattaaccatatcacatttgtccttatttttcaacacttttatttatttttataataccaaaaaatcattgacttttcaagggatttcgtacataatgaaatcaacagattgaacacgatactagaacatggtctatttgttaattttatatcgtaatatttgttaattttatatttttattttttacccatagaaaaaggcactacgaaaatatagatgttttcaatgtgtttttataaaaacttatagattgtttctataagaaaatcataaggaggtaaggattatgaagttagaagcaaaagttaacttcgaccggtttgaagaggcacttcaggttgtagatgctcatacagccggtgagttctgtcgtatggtcatcggaggattccctgagccagaaggcagcacaatgatcgaaaagaaaaaatggatggaggaaaaatacgaccacgttcgtacagcattaatgctggagccgagaggacatcacgatatgttcggtgctttcctttgcgagccgatccacgaagaagcagatcttggggtaatcttcatggatacaggcggatacctgaacatgtgcggacactgtacgatcggagctgttacagtagcccttgaagcaggtcttgttgaatgccacgaaggagagaaccacgtagtactggatgctcctgccggaatcatccgcactactgctaatgtagaaaacggaaaagtaacaggtgttacacttacaaacgttcctgcattcatttataaggacaacttaaccgttaacattgatggagtagatattccttatacgatttcattcggcggaagcttcttcgcactggttgatagcacaaagcttgatatcggtgagatcaatgcccagacagttcctgcttatacagaactgggaatgaagatgcgtgataagatcaatgctgaagttaagattcagcatccaactctggacatcacagaagttgacctggttgaattctacggaccaacaccgaatccggatcaggctacaatgagaaacgttgttgtattcggagatgctcaggctgaccgttcaccttgcggaacaggtacaagtgccaaacttgctactcttcacggatggggcgaacttggaattggtgaagaatttatttacgaaagtttcatgggaacacgcttcaaaggtgtgatcaaagaagaaactaagatcggtgattacgatgctgtaatccctatgatcacaggaagtgcatatcttacaggtgttgctacttacttaatcgactctacagatccattaaaatatggttttcttgtaggttaatgcatattcggggttgaattagattgcattatcatatatgatgatagaagcggattcatatgatccgcttctatttttttacttagacagcgttttcatgttcagagaactattatccgggcgtgttctcctgttagttaaataccaagagaaaggaatgatccgaatgccacgtaaacgcagatccacaaaaagccgtattgtcaaagcagcctggaatcttttctacaaaaacggttatgaacagaccactgtagaagatattatcaatgccgctaaaacatcaaaaggcacattttaccattattttaaaggaaaagaagcacttttaaactctctttcctatctttttgaccagaaatacgaagaccttgccgccgtgattgatccgaatctttccagttatgataaactattatttttgaatcacgaattattctacatgatcgagaccagcgtggatatccatttgcttgcatacctttattcttcgcaattgatcaccaaagacaagaaatccctttccgacaagaaacggatctatttcaaatggcttacagaaattatggaagaagggcttgccaaaggagaattcaaaagtacaagcaccgccgctgaactcatggatatctatgccatgtacgagcgggctcttttatatgactgggcattgtttaaaggtaaattctcactgactgaacgttctgacaaactattgcctcatgtactggacacatttgtagaaggaatttaatatcaaaaaggcgatgccaacagaagatttcgtatcttctgttggcatcgccttttactacaccagacattcatgaacatcttcctgttcgattccgacatctttcatcacatcaagaatctgttccctgtctgtcaggtctgcacaccaggaaagtccacaacccgctgagattactctcggaaccggaatcagtcttcccggcacacttctttccttgcatatcttttccatcgccattgcatccgatgttgtatggaatgttacaacaagtttcattactttttttctcatgtttactcaatcaccacttcgtagtaaccgtctttctgcacagatgttggctttttacctttatctttggcaaatttctcaacattcatcatctgatgcggctctgtgacaagaattttcacaggtcctgctgctccttttaatgcctctgctgtcagcatcaaaggttccgggcaagaaagacctcttgcatctacttctttcataatttaattccttctttcctagaatactatgtatttacacatatttcaatcttattttgcttcttctctcttatttgtaaatgctataatgaagcagatcacaatacagatgatacatgccactttcccatttaccggtaccgcacctgctaccacttctttcgtctctggattcagagctgttccacttgctgcaagtccaaaattatggcagattgcagatccgacaaacattccgacaaccgttacagccgaatccgaagagccctgccctgcaaggatcagctgacgaagcgggcatccacctgcaagaactgctgcaaatcccacagtgtacattcccaggatattccacaaatgttccgaatgtgcaatgactcccggtgtattgaatcctaccacgaaacgtcctgtcgcaatattgaataccagcataacaacaaataaacctgcaatcacgctgatcagatcgaagttcttcatcaggatgatatctctgatactacccgcaaaacacattcttgacttctgtgcaaatgcaccgaatacaagtccgcctactaaagatgcgatgattggtgcatgcatgcttcccggtcctgcctggcttgctttaaaaagcgttgtacatgtggcaaggataagaattccaacaacgaccgccggaagcactgctccacttgacttatttgtaatatgcgctcttccaaggctgaaaccattctttaatgcaaacactcctgttccaactccaagaataaagccaacaaatgcaacccatgcattcagatcacctgctgacatacggatcaccatacggagcggacatccaaggaataccagtgcaccgatcataatgattacaccaagtacaaaacgaatcatcggagatgatcctgctgttgagcgatattcttttgttgccacagaaatgataaatgctcccagtacaagtccgatgatctcaggtcttgcatactgtaccacttccgcctgatgcattcccattgctcctgccgtatcgcggataaagcatgcaatacagaatgccatgtttgccggattcccaagtgctgcaaggcatgccgctacaataccacatacaacaccggccagcgccagttttttctttgaatctgataaattcattagtatttcctcctacactctcatttttgcatttccccataacttatgcctgacatacttttttatgaatttatatcatttttcatacatacttacggttcttctgccagttcgtggatcgctcttaccgctgcatccacttcttcctccgtgttgtaatgcgagaaactgaatctcacagctccctgctctaccgttccgagtgctttatgcataagcggtgcacaatgtcctcctgatctggtagaaatgttatattccataagaagctcatcactcacttctgaagaatcataatcaccgatgttcaaagttacgatcgcacagcgttctttctgactgtaatccccataaatcttaacgcccgggatatcttttaccccgttataaaatctccacatcagttcctgctcttttctgcggatattgtctattccttcttttttcagatacccaagagccgcatgcagtcccgcaatgccatgcccattcaatgttcctgcttccaaagctgtcggcatctgtaccggatgttccttactgtatgtctggattccgcttccgcctgtcttcagcggtcttaactctattccttcttttacatatattccacctgttccctgtggtgcaagcagtcctttatgtccggtaaaacacagaatatcaatattcatctcctgcacattaatcgggaaaacccctgctgtctgagatgcgtctaccacaaacatcagtccatgtgcatgcgccatcttccctatgactgatacatctacataatttcctgtaagattcgatccatttgtacaaatgatcatcttcgtattttcttttatcgaagcttccatctgactaatgtcaggcattcccttctcatcacaccttataatggaaagttctactccatttttctccatctcatataaaggacgaagcaccgaattatgttccaaaacagttgtgatcacatgatctcccggattcaggcttccctttattgcaatattcagactctctgtcgaattcgaagtaaatgcaatccgtcttgcatcttctgccccaaacaattccgccagtctgtctcttgtatcatagataactctggatgcactgagtgccgcctcacttgcaccgcgaccggcattgcccattgagttcatagcgtttactaccgcatcgatcacttcctgtggcttatgcattgtcgtcgcagcattatccatatatatcatacttgattcctcctaatatcttccccgcatacgattcaagtattattataaaaacaccccgtttatacaatactcatttatttccgaacaaatttgtacattattcatatgctttcagtatagtccattttcctcttttcgtctaatcgaaacattgtatgaacccaccgtattaatagattttttctatcattacagtgggttcatgttatcaatcgtattatcggttactcttcaattccgtatatttcttttactatctttacaaagcgttcggtactttttgacatctgataattcttattatataccaggttgatatcccgtccctgatctgcctttgggattgagaatgccagaagatctccatatttcacttcatcttctgccgcaagcctggatatcacagagatccccattccctgtttgactgatttttttatggtttcctgattctcgatactggcgataatcttaagcttatccaaattgattcctgccgcacggagctgttttcctgcttcttttcttgtaccggaaccttcctcacgcatgatcagatgttccccgccaatccagctgatatcatccggcatatcttccaacagcttttgatacttcttcgtattcggtgtgatcacaaccagttcatctttataaaatgggatatatttacagtgtttcttctccagaatcgtaccggtaaatccgacatctaccatatgatcaataatctgtgtaaccacctgactgctgtctgtctccagaagtttaacctgttctttcggataccgttcattgaatttcatcagaattttcggaagaagatactgtgccggaatcgtagatgctgcaatcgtgatcagatgcttgctctcttcttttcctgtttcaaaccgttcttctatttttttctgcagatcgatcatctgtctcgcataacggtacagatcctttccatcgtccgataattttacttcttttgtgtttcttacaaaaagccttgcattcagttctttctccagtgacgaaatatgtgcactgatggttggctgtgtcaggaacagctgctttgctgcctttgaaaaactgcctccctctgctacctgaacgaaagcttctaattgtttcagattcattagtatgccaccctttcgctctctgctcctgtcttcttcgttaccttgatactgtccatgtattccaggatcggttttgcactctttctgcttgtcgcaaacatatccctcacctgtgcgattgtgatcagcggatcttctttcagatgttctctgatcttctctttcgcagtctccatataagaagtcagtgtatacatttcatcatttatttttacaatctgcttttcttctaataagatattcaggatatcatccatgatctcctgcggcacatctttacatgtgatctcggaatatcttgcaaagtcaaacccggccttcttaaatgtgtccaacataatcttcgataccctgtcatagatcttatcttttctcacttcatatcccggagtactcaaaaattcatccactctcttcaaacttccctgttcttccagaagcgtcagaattctgtcatatacattcggttttacctttttaaaatacgtcgtctgtacctgtgctttcttgattccatagcggtatggatacttctcttcgtattctcccagagctttcagcaaaatgcgttctgcctctcttgccgaatcgcagtgccatacatatatatcttttctcatcggaaatacatatacacttccctgcccttccagttcttttacatcctgttctacctcttcgagtgaaagtgccgtcaattttgcaagttcagagactgtgatcagcgtatctgcatgactcttcacatgcatttcgattacatccgcagatgacccttcttctttccgcttcagttcttcgatcacttccggctggaatcttcttttaatcttcggattcggctccagaatgacaccgccaccaatggtttccatcggagaataaaaacgtacaacaaatttatcgccacgtcttacagcaacttcttcctccatccggagctgtacatatccgctttcccccggtccgatctcttctttgtccaaaagtaccgcacggcacaggacttcactggtccctgtaaagaaatgcagccgggtgtgattcgtaaggattctcacggatgaatccagcacatttaactttacatcaagaagatctgtattcttcatactgttcagaggtgccagcacacatccccttttaatctcttttttctttacatttgaaagattgattgccacacgctgtccggcatagcattcttttttatcttccccgtgcacctgaatgctccggatcttacattctgttccgaccgggtacatctgaagcgtatcttcttttgtaatcgttccggacaccagtgttccggtgatgatcgtcccgaatcctgacaaggagaacactctgtcaatcggcaaacgcggaatggtatggatgtctttctgcacgacttcatctcttgtctgatgctcaatctctttcaccagatcaccaagtccttcacctgttgctgcagatacccttatcagaggtgcatgttccagaaaagtaccggaaagctcctcccgcacatcttcttccatcatctccagccattcttcatccacaagatcacatttattcagcacaatgatactcttctcaattccgagaagattcaaaatatccatgtgttctcttgtctgcggcatgattccttcatccgctgcaattaccagaagtaccaggtccattccgacaactccggcaaccatattgttaataaatttctcatgtccgggtacatcgatgatccccgcgcggtctccgcccggcagatcaaaataggtaaaccccagatcgatcgtaattcctctgcgctgttcttcttcccagcggtctgtatttcttccggtcagtgctttgatcagtgtcgtcttaccatgatcaatgtgtccggccgttccgataatgatattcttcatagccttctttcacacctaccgttcttctttttctttctgtccaagtaattccgtcagttctgatgcgatcatcttataatccttgcgttcaatcgttctgacatccagacagatactgtcattgactgttcttggaatgatcgggatctccagatgccgcatcttttcttccatctcagctacactcataccatttggctggatggatacggcgcggctttccatcctttcaagcggaagggatcctccaccgatctgtgattcacaagacacgacctgtatctttgcatccattcctgtacggcgtaagattctggcaaaatatcccgcttctttttcaatctcatcaagcggcattgcgatcatccgcagaacaggaatattctgtacggctgtctcttctgacagatactccatcagaaccatctccagtgccgccgccgtaaatttatcaatacggagtgcacgggtcaactggttcttcttcatcatatcaatatatttcttcttaccgatgataattccggcctgtggaccgcccagcagtttgtcaccactgaaacacaccacatcagcaccatgtgcaatggattcctgtacagtaggctcatgcgtcagtccatatttttccagattgatcaacacaccgcttccaagatcttctactaccggaatcccatgttcctttgcgatcggtaccagttcgtcaattcccacactttctgtaaatccgacaatccggtaattgctggtgtgcaccttcagaagtgcctttgtctcttctgtaattgcctcttcgtaatcttcataatgcgtcttattcgtcgttccgacttcgacaagatttgcaccgctctgttccattacatccggaatacggaactttccgccgatctcgatcagttcccctctggaaacaatcacttccccgccttttgccagggaacttaagatcaaaagcacggaagatgcattattattgaccgccatggcagcttctgcaccggttaacttacacagtaatttttcaaaatgtgaataccgctctcctcttcttcctgcttccagattatattccaggttcgaatatccactgacgatctcagctgccctcatcatatgcccgaagcttatcggggcacggccaagattcgtatgcaggatggttcccgttccattgatcactttcttcatattcggtgtatgcattgcagatacggcttttgcgatattttcattcagaagagcaatctgctgctttgctttttcttcctcttcacacactccgataaatgcacggagtttttccatctcactgtggatcgcttccatgacgctttcacggctgtatgtctcaatcaatacttttatcccttcgtctgccagaagaatatccaccttcggaatactccgatacaataaattcttattcattatacttctccattctgtcattcttttcaaatattaattttagaataaccggatcagcttatcactctttggcgcaactgttccgattacggaaacggttgtatccagtcctgatgttttaaaatctctcatcatattctcatattcttttggtgatacactgatgagaagtccgccggaagtctgtggatcataaagaagatctaaatatgtctcattcaccgatcctacttccaccttatcaatcgaatatctcttgttcttataggcacctgccggaaccagtcccatcttcgcataatcatatgcatcctgaagatatgcaatgtcggtaacgctgagttcaaatgtcacatcacttgcggatgccatctcaacacagtgtccaagcagtccaaaacctgtaatatccgtacatgcggaaacatcatacttttccacaacctgcttgcctatcttattcaaggatgccatgaccgtctgtgcctcgcggattgccgatggcgatgccatctctgctttgatcgcagtattcacgataccacttccgatctgttttgtaagaatcaatatatcgccgggtctgcagccataattcttaaagatcttatccgggtgaacaaatccggatacgcagagaccgtattttggctcatcatcctgtaccgaatgaccgccgactaataccgcacctgcttcttttaccttatctgcacctcccgcaagaatatcgccaaggatcgccggatccaggcagttcgggaaacctacgatgttcaatgctactgccggctctcctcccatcgcccacacatcactgagcgagttggccgcggcgatctgtccgaacatatatggatcatctacgatcggagtaaagaaatcaaccgtctgaatcatcgcaatatcatctgtcactttgtagatggcagcatcatcggaagtctcgattcctactattaaattgtcatcctcaaattttggcagcttactcagaacctgagcaagggtctccggaccaatcttggccgctcaacctgcggttttgcttaaactcgttaattttacatctgatttcattcttattactcctcctgtttttcatacctttttcccgaaacaatccatttatctctctgacacgcccggatttttgtattcattatacatacatgatagtataagaaagccggaactcctgtatctttcttcaggaatccggcttttatccagatatgtaagtaaatttatgacggtctgacgattcttcctgcttttgccattgtctccacaatgctgtacatattcgtaactgtaccaactgcaagcttgtctttcagaccatagtaatccagacaggttccacatgtcatgatctctactccctgtgcttccagtgatttcagatcttccagagaatccgaatcttctgttgtcaaggttgctcctccattatagaaaagcattgtctttggcagagtatcaagctgtgtcactgcaaagataaatcctttgatcagtactttacctaattcatcatttccagatcccatacggtcagatgatacaacaacaactgtattgtctctcgcatccggtacgcatactgcttctgcttcgtctgcttccggtgctccttccatttcaatcgtaactttaaactcggcatccccaagcttctcagaagtaacctttcctcccgaacctgttgccatctttgttacgttctgcactgcgatctcattgtcaaccagaacttcaattgtctccggtccggtcagtgcagctattgcctttttggtcttaataaccgggattggacaattatcccccatagcattaactgtaatcataatgattccacctttccatcaccattcccacaatcaatacatatagaaatattctatcatcatttatggaaaaggtaaatatataaattatataaaagcctgaaaacgtctatccttaaaatcctatctccggatagccattcccatactcttgtacctcaagtatatggtacgaaccatcttcataatatgctggtttcataccaccttttttcagagcttccaggaactcttccattgtccttacttcttctggaaaccaggtcgcacagacgccgactttctccggaacatgacagtcactggatcccatcgtacaaagtccaagttcctgtgcatatcttgctgccttctggcacgctgctacagaagtacttccattcaggacttccagaccgtccagacctcttactgtccttaagttctcttccagacctctgttattattccggaatggatgtgccgcaaagcagaagcctccctgactctttacaagatctataaactcctgggccggaatcctttcatccgggtattcctcaattccaaatgcgatgatgtctccctgcaaagagaaaaactcaatcccgacaaagatcggaaatccggttttttccgcatattcttccgcatattctttcagtcccatatcatcatggtctgtgatgcagattgcgccaagacctttctccctggcaatttccaccatctgttctaattttaagaaactgtcttttgaacaggtcatttcgtgcatgtgtgtatctataaacatgtttcccggctcctttgatcttcctttatattacaagcttttctctcactcctcattatataaataaccgctccgggtttcaaatagagaatcttaatataaccattctcttatagatgaattctatattaaaggcccagatattaatccaggccctgcagaacccgttgatcctgcctgttcgtctcttttgtctttgtacttacatttaactcttcctgtttctccagacattctttgattgcttcattcaaagacagcatcttctcatccagcgttgataccatctctgcacattctctcagatccctgctgatatactccggcgcatctccttcgaatttataatagatcttatgttccagacttgcccagaaatccatcgcgatcgtacgaatctgaatctctaccttggtatctacaacgctgtcagaaagaaatatcggtacagataccagcatatggtagctcttatatccactttcttttggattcttaatatagtctttgatcgacaatactttcagatcactctgattgccgatcatctctgccagccggtaaatatctgacgtaaaggaacagatcaggcgtacccctgcaatatcattgatatattttaccatattttcaatcgatatctcgtaaccatatctgcgtaacttctttacaatactttccggtgtcttgattcttgtcttgatatgttcgatcgggttgtatttatgcacatgttgaaattcatcattcagtatttccagctttgtccccacttctttcaacgctgaattatacaggaacatgatcgtcttccaactgtcgacatcttcatagttcttcatcgtattttccatataaatgttctctctcctctcttaacgaagagttaaaccagcactgttaatattataccataagtactgctaatatgtcttatttttcacatttattttagaaagattctacatatgtaaaataaaaagaagctatcctcagacagcctctctccactcattttttaaaattcaattccttctctcgcctgtaccttacggtcatacggatgctttaccttcatcatcatcgtcgcataatctgccagatccagaaggtcctgcgatacctcatgccctgtcataatgatctccagtccgcgcggcttatgttccagaaaacttctgatcttctcttcacttaagacattcagatggatcgcacacagcgattcatccagcactagcacatcaaaattcgtacagaactttacgatctcatccaacgctttattattataatggcggagttccgctttctcatctccgttcatccggcttacaaactttacctgatcacgccccggaaggcaggtgatcccgggtacagattccagaatctttctctcatttgaagaattatctttcaggaactgaaagaagagcacctgaagtccggctccggcggctctgactgcctgtccgactgctgctgttgtctttcccttgccatctccgtaatacatatgaattcttccagtgcccatcataactttctacctgctttctcctaaatatctctgtaaaatctgaactcacattcattctacaggacattataatcgtttacaccgaaaatgtaaatacaggtagtttctctaaaattccagtttcatatctccggtcttgatccagtctttctttctcatgaattccgaaataccaagtgtcacgactgccggaagtacgatctggatcagtaatattttgatcagaaccatctgtgcagactctgtctggatcatcgtctgccacgtcatgatctgtcccaccagacctgctgtccccataccggaaccggtcgcattattcgtcatatgaagcaccattgttcctaccggtccgagaattgcgctcgatataattgccggaagccagattaccggtttcttcacaatattcggaacctgtaacatggaagtgccgatcccctgtgccagaagtcccccgactttgttctcacggtaacttgccacggcaaatcctaccatattacagcagcatcctactgttgcggctcctgctgccagaccggacagattcaggatcacaccaagtgctgccgaactgatcggcagtgtcaggatcattcccatcagtaccgatacaataatccccatcaaaaacggctgctgctccgttccccaattgatcagtgaaccaagccagctcatgaagcccgagattggaggtccgatcagaaatcccaccagacatccacttccgatcgtcacgaccggagtcaccagaatatccaccttcgtcttaccggataccatatgtccgaagaagattcccacataggcagcaatgaacgctcccagcggctctcccggtccggcaaataccatagctccgtctacgaatacctttccggccaggatactgcttgcaaatgcacctgccattccggccgttgctgccgacaccactaccagcggtgcttccttaaacttataggctactgccacaccaataccggctccggtaagggttgctgcaagcttgcctgcaatgaagatcatctctccgatatttccgcccataaatgttccgatctgctggatgatcgtgccgatgatcagtgttgcgaacagaccgtgcgccatggcgcttaatccttcaatgaagatgcggtctaatactttctttactttttccatataacgttctcctcgtccttccatatctgctattttatgtctggcactgctgattttcagatatatcgtttgcatttacatgtgtcttgtcacatgtcacgagtgtatcatacggctaccgaaaaaacaagaattgttttgtttctgtcaaaaatcaatcttatccggatgtgaaccagagttaccgaagttctccattttgtctatctgttccatatcctccggtaataatgaaaaatcaaagacttccgaattttcttttatccgggacggtgttaccgatttcgataatggcagcacctgatgctgcagacaccagcgaatacagatctgtgcaactgtttttccgtatttctgtgcaatctgctgtaaattcggatgatttaatacccgtccgtttcccagcggactccaggcttctacctgtattgtattttctttacaatattttacagtttccttctgcatccatcccggatgaaattcaatttgatcaatcattggaatgatatctgtctccatcagagccttcagatgatgtggcataaaattagatactccgattgcttttaccctgccttctttataaagttccatcattgctttccatgtagaaatatttatctcttcccagttttcaaactgattcacagaagccggccagtgtatcagatacaaatccaggtaatctgttcccagatcctgacatgttttttcaaaagcatgaagtgtcttttcataaccccgttccgtattccatactttgcttgtgacaaacagctgctcccttgaaataccactttcccggattccctctcctacactggtttcatttccatatgccgccgctgtatcaatatgcctgtatcccagttcgattgcagttcttacacttgctgaagcagtctctccatccggagtcttccatgttccatatccgatacatggaatttctactttatttctcaactgaaatgtatccgttaaacttttcattgtatctcttcctcctcatctgttgttttctgattgtctgacacatacattattatactattgtcttgctgttttttccatgaaatcctatctttactttacttttgattccctgtatacttggaatatcaaattgtaatattctttagattttccaatctgaaaatccaaatatatacacgaacaacaggaggacttcatatgttccgtttatggggaaaagaatttaaagacaatcatatgctgcgcgacaccgtaatctgcgatgagacagatgacaccagaacgcataagatcttcaatgctctggactcgatctgttatgaattcgatcttagcaagccaatctggctggatcataatattgatgaattcaaaagacatgacaagacaaggttctatcaggataattttgtagattcgattgattttgattatctagagattcatattattgaggaataaaaaatcacagcccgagttgtactcccgggctgtaactataactctttttccaaaaattttatactgtctgacatagtacgtcattcaacgcatttctatatgcattccactcttcaatcattctttccagatattttttcccattcggtgtaatacgataatatttacgtaatttcccgttaacttcctgattataacattccaaatatccagactgctccattccgtgcaacattggatacaatgcacctactttaagttcaaaaatattatttgatctttttgccagagtatcaatcatctcataaccatacatatctttttccgacaaaagttttagaaccaacattgctgaattaccagaaaccatgtttttattaactttcatgctttcactcctcactagcgttaacatactcactaactattccataataccttaaccctaaccttttttcaacctgctgttactttatatctgaaccattttatttaaaattttttcataatatttttcatttgattctttctttatcagagaatccaatatcactccatcttttaggaaaagtgttcttttaccataacttgccattttaggatcatgtgttaccattactacagttttatttaatgtttcattaatgtgaaccaatgtctttatcacttgcaaagaagtatttgaatcaagatttccggtcggctcatcagccagtatcaattctggattttctatcatcgctctacagatggccgttctttgtttttcacctcctgacaattcgtacggatatttattcaataagctggatataccaaattccgcagctatttttttaacagatttagtgccttcttttaaatcattttcattcaaaatcaatggcagcataatattgtcttttacagtgagactattcatcaaatagtaatcctgaaatacgaacgcaatctccgttcttcgtatcctggcaagattttctccatagatttcctgtatgtcctttcccttatataatacagttcctttacttggctcgctaagcattccaataattttcaaaagtgtggtttttccacatcctgaacttcccatgatacttatgaactctcctttatgaacttgaaaagatattccttttaaaacagaataaatagtttcttttccttcatgcgttgtcgtattataatttttctcaagttttctgacatccaatataatatcactgctcattttgaatgctcctttcaatctgtttataaacattactcgccataccatatatcatgaaaaggatgactattgtcaacacaacaactaccagtaagctttctcctatataacgtattgtccaatatatacttaaatccttatacagtatttttatcaaaaccataataaatgcaaatggaatactacttatacatgcaatctctgtagtaagtaatatttcccgattcagatgtcttttcatttttaccttgttcattcccatccgataaaagaatgcgtatttccatctcattttatttttatagcttgcaatattattgtacagagtaaatataatacaaataaccaatgtgataatgttaattatcattgcacttacttttaacatattcgcttcctgttcctctacgatcagctctttcttctcataaatcagattgccatatttataatcaaaaaaattcacctgtgaatttttctctgcatatttatatatatcatttactacccggctataattttgaggaatattgattgcaactgttaaatcagatcctctggctgttttactgattctttcatattctgcatctgaaaatacaataatctcttcaaaaacctttccttttattccgctttcttctaattgtctgcttttaaaattaccggttataattctgtttgtagtaccaacaatcttatagtctcgtgtaaattgattaccgggcataacccgcatcgtatacacccagatatccgcatccgaatttcctatatacaatctcggttctttttttccgtaatctattccaagtgttccatattccgctttatttcgttgatacacaacatatatttcatgattatgcaatttcagtttttcacctgtaagtctctgatattccgaagctgatattcctgtatgttctccatagtcacctgctgtgactcttatatccggaatacatttcacttcaattccatatttcttttccaatttgtttaaaaaatctttgtcggttttatttgctccccataccagatcatatggataattttctttttgtacaatgggcagcgtattaataatttcaaaggaaaacgtgaatataacaatatatataaacgctcctactatatacgagacattaatatgcctgtaaaaattgccacaccagtcatctatccagagaattttcttataatacccttttcctctttcaaaacgctttataaaataagcaccataaaaatataaaaagagtaatattgtaataactgccaacaaagttggaatcgtattaccgcttttaccccagtatgtcataatggatataatcgtaattccagccataataattgtcacaaagcacattttaatatttacctttgttctttgtcttgtctcactttcattactgataagataatcaattcccagacatgagattgcctgatcacaaacaataaatcccattccaaaaatcaaaaaactgataattaatgtaagtttcagcggagtctcaccatattgaatatgtccctttatattggcaaaaaaatattctaaaataatttttaagccctttgattcataaattcctaatacgattcctaatatcatactgaatccaacaattcccagatattcgaacaaaataaatctgtatttatgctttcttttcattccgaatacagttaacgttttgtatataacggccctttttcttatgtatccgctcaacagtaagatcagcaggatcaacagtaaaccatatggaataagaaattctttttctacttccatgatcaaatatgtcatttgagggatggatcctgttgatatgtatgaaagacagccacccactgctgtcgaaaaatatattaatgaaataatccagctacatcctaaaactgttcgaatataatcattcttattttctcttaatatatctcgaaacaacctgttcatacttcttccccccatccctcttcgaattataattataagaataatctgtatactgcaaaaaagataacacacattatttttattaaaaatgaaattcctgtcattccttctgcaatcattgactctttatgtcttgcacgtcccactgcacatataatattcaatactaaaaacatgcaacaacataccgcaccaacaacaattaatgtattaaccgctcctatgcctcccttctcgtctattaatctctgcaaatcagaatgcaacataatattaattctccacatgcacaatataattcccgcaatattaaatggaatatcaatcattaaaatagcatttcctaatttcttcataatttaatgcctccttactttttaacaacagaaagactgtaacatctattttcctaatgttatctttatacttctcagctcctttccgattcaattgtgtatgttacaattacttcttttgtttttattatctattttgaatatatatcttttttcgatatatgtcaatattttaattatatatttttacattatatataacaatttaacactcatcatttgtacataattattatctttcctgctcttcctctatatacagaaaacctactacctgcacttctttcgaacatatgacaagaaaaaagaagatgtctagcaatctgccttacaccttcttctttcattgtaattttatattttatttattataaaaatcttattccttattcattcctgatcgccgcaagcggactcagcttcattgcccgtttcgccgggaaatatcccgccagcactccgaccagcactgcaaataccatggacatcagcacaagccaccacggaatataagatatcgtgctgtctgttcccatcgacatagcaccgctgcttccaacaattatattaatggctgctgacattacgaagcttagaatatttccggcaattcctccgagaagacctataaacgctgcttccaacaggaacatttcccggatattcctaagactgcatccaagtaccttcatcacaccgatttcctttgtccgttcataaatggacatcatcatcgtatttgcaattccgattgcagctaccagtaatgacaccgcaccgatgcctccgagcaccgcctgtacaatcgcgaactgactcttcatactgtccagatattccgcattggtctcaacattatatcccatattacggattacatcagcgacctcattcacgtgatctatatcgtctgctttcacttttaatgacgtataatagaagccttttaatgcctttccagctttggtcttcggctgtcccggaatgactttgcctgcatattctttccgcaataactgctttaaagtctccaggtcacaaaatacactgtcataattgttggaatagtcatccaggccgccatttatcacaccgcttgcccttactacatacttttgaacaggttttgtcttcccggttccggaatctgactggctccctgtacctgccgttccgtctgtactgtctccaaaggctgtgctgctgtcactattgtaattctctgtatccgtgatcatgaaaagagaatctttcatcagattgatattcgggactttcccggtatcataatatccgttgccgcttcctgtttcataaaaatcagtgatcacgccatttccgaatatcagctccagatgtcctgttccggtctttggaagcgttccatcgccaagatccatatttagggatttcaggccttccggtgtcattccttgcaactggacctgcgccatataggagcctttcagcaggatcaccgaagtctcatagattggtgcagctaatttcacatgatccattttactgatcttttcaaccaactggtcatctatccttttttctgtctcctgtcctgatcccctactttctgtcgtcataccgtcactgttgttcgatccggtcacagtgatactggtcagacctcccgactgttccacttccttataaagggactgctgcataccaagtccgagtgagatcatcactacaatcgaagctgtaccgatcaacacaccaaggaccgtcagaaatgtacggagtttccttctccgcagactattgatgctcatcctcagaagatcgttccagttcatccaataactcctcctcttcaatctctgccagctgtttctttttgcgcttcttaagtattacgactgctgccaccactgcaatgaccactgctgcgattacaaccggaattacaggaaaacttttctgtgtctcctccggcatatcggaagctgccgcctcatcatcatccactttttctgtcacttccagattcagatctttcgtggttgttgaaatgtttcccgattcatcttcataactaagtgtcatcgttaccttcgccggaccattcgatattttctttccttccaacatggcatcaatcgaaccggttgcaccggattctatatttccgataaatacttccgactttttgatattctttccttcaaatgtagcttttacattatagagcttgatccgtcccagattataaagactacacatcacatttgcttcttcaccgacagcaacgctctgcggactgatctcaaaatcgctgatttcaaatcttgcatcctgcttcaccggaatagagatacttgacgatccttctacctgcgtagcattcggatcttcatatttcatggaaagttccatgctgtatggcttctgaagaagatctgattttgcattcagttcgatactgatatcggctgttccattcggggcaatgctgtccagatagatggagcttgcaccggatgatggaaggaatgccggtgatgtcgtctgttcatcgctgccttctgtcggtgctgaaagattgaacagcatattgctgactttcatcttggatgtatttttcagatggatcgttaacttgaaattactgcccgcacggacttctgccggatcggttgtaaatccggttacgatcacacgcggaacagaaccatttcccgaagctgcacctccatccgtacttccaccggctcctccgctgtaagctgcttctccgttactgtaaccgccggcatccggtgtctggtaagatgtgtcagaactactgcctgctccattgccttttcctgtatccttgtcatcatctgtatctttgttgtctttattatcctgtgtgtctttctgtaccggctttgctgtggtattcacatagaactgcttttctgcttcttcctgtccgtctgccgtaaccttgaactttaaagtatagcgtgaagtctgaacatcttctctctgagtaaaatcaaacgccacatcttttgattttccgttttccagggttccaatgttctgctggtaactctgcatctctgttttgaatggccatacatcattgtcatctccaagatccggtgttaccgttacattattcatcggattccccgaatgattcgttacggtaaatgtccatgtcttcttttctcccgctttatatgtcagcaccttattgtcttttgactcgatcgtaattcctgttgcagcctgtaccatctgcggatgcagcatagttgtcatcatgatcactgccagaaaggcaacaatgattcttttcaagcaattatttcctatctctttctgtattcgtttctgcatgtcttcctccctcttcttttccttttttccatcggttatcttctatcttaatgatcctgccgtcccggatatgaaataccctgtccgcataagttgccagatgatcatcatgtgtgaccatgaccagtgtcttcttctgctctctgaccacccgctgcatcagttccatgacttcttccgatgtatgggaatccaaatttcctgtcggctcatcggcaaatataatatccggatctactaccagtgccctggcaactcccactctctgctgctgtccgcccgacatctgattcggcagatgcttcttatgctttccaagttttaccagatctaacatctcattggcttttcgtactcttacatctcttggaacgccgcggaagctaagcggcaatgctacattttccaccgcattcaacgttcccatcagatgaaatgactgaaagatgaatcccacatgatcccgccggaatgtcaccaattgttcttcatttaacttttcaatatgctttcccgcaatgatgacctctccctttgtcggtttttccagccccgccagcatattcagaagtgtagatttaccagaaccggaggtcccgacaattgcacaaaactctccttcatatatctcaaaatccacaccatccagtgcgcgtacaaactcatcaccaacacggtacagcttgtatagattcctgacttcaattaccttcctcatactcctcctctctgtcgtttttcagacttttcagaatatggattcattttactctaaaaatataaagacttcctcttataaattatgaagattttcttaatacctcgactgttcagataatatttctcatttatgccgtttaaattcctgcgccatatcacacgtattatattttatacaattttcgctaagattttccgtgcatattatttcaaaagtggtataattggtaggacaatttcaccaaagtaaagtggatatcttatgattcacaagatatagggaggaacacatgaagtttgtaagacaatttatgatcatcctgacgatctcattcgtcggagaactgttgcacgcattactgccgctcccggttccggccagcatctacggcctcgttcttatgctgatcggtttacagaccggtatacttccactcagtgcagtaaatgaagccggaggatttctgattgaaatcatgccaatgctttttatccctgccggagtcggacttatggtttcctggggtgctttaaagccagtcattattccgatcagtattattatcgtcgttacaaccatccttgttatggccgtaagcggacgtattgcacagtttatcttaaagaaagaggacaaaaaacatgagtaaattattacaggattcagcatttttctgtctggcaatcagcctgatcggatatgagatcggtatcattctcagacaaaagacaaagcttgcgctctgcaatccactgttgatctcaattgtatttgtgattattattttgaaagttaccaatattaaatatgaagtatatgaagatggttcttcgttactcagctatctgctgacgccttctaccgtctgtctcgcaattccgctgcatcagcagatgggactgttaaaaaagaatatgaaagctatccttgccggtattctctccggtgtattcaccagtctggccggtgtatgggtcttctcgatgttattccatctggataagaagatctatgcaaccctgcttccgaagtctatcacgacagcgatcggaatgggaatctctgaggagcttggtggaatcgttacgatcaccgttgcagctatcatcattaccggaatcatcggaaatatgttcggtgatgtgatctgccggctgtgcgggatcaggcatccgatcgccacaggtctcgccatcggaacggcttcccatgccatgggaacggccaaagctatggagataggagagattgaaggtgctatgagcagtctttctatcgctgtttcgggacttatgacggttatcggtgcaacgattttctatcagttatattaatgaattatgaatcagataaatggaggttaacgattatggaaaaaacaattatctgtatcggacgtgaatatggaagcggcggacatgccatcggaaagattcttgcaaaacgtaccgggtatgaattctatgataaagaacgtttcattgcaattgcaaaagaacgtggatttgagggggaagttgaagaatatctggaagaacagccgatgaacagtctgctgtattccatcgctatgaactactccagacctaagaagaagccatttccttttgaactcgtagaagaactggccgccgagaagccgtgcatcatcattggccgctgcgccggataccttacacgtgaacaggacaatgccttcagtgtattcatccatgcagatatggacaagcggattgctgcagtcatggcccgtgaccacatcaattcccgcttaaaagccaaacgtaagattgaagaaattgatgaaaaacgcagtactttccgcaaagaattcaccggtgaagaatggggacagtccaaatactacaacctgtccatcgacaccactcatctgagttatcagcaggctgcagatttgattctttattacaaaaaacttgcagaagaggctcagaaataaaagaatctgcctttagaaatctgcctttatgaatcattctttttgtgataagatgagaataccgactgaacaacaagggaggatttcttatgatcaaggttatcggtctcaatacaaaagtattaaaaaaagaacctttctccggttctcatcatggcatgcgcttcttcatgcgtgcagaaaatgacattctgcacgtatgggtgtatccggaaccatggtgcttcgaacagacttctgatgatgtaaagactttgaaagattttccattcaccggagaaggactggatgaatcactggaatggatctctcaggaatttgaagagcgcaaagattactggatgcagatggagaaagataagatgaaaatgatactataaatcactgaccgctgcaaatatatatttcagatatttccgttcttcgtttgggtcgatcacatttacaatactgagaatgtaaatatctgaactccattttttcttctctttctgcagtaattccatcatctttctgtaagttctgctgatatctccgtcactttcccgcgatacagccacaagatattcccccggcttcatctctgtatatactttctgctttttatccgcaaaactaaacacatttttatacgaatatattcccttcataaatgcttctttcccaattgcggatcccattggaaatgcctggacatccggaatctcacaacatttcagatgtctgcgtatatcttctgctatctccccggacgaagtcgccggtgacgaccggacttctgtcagcatcagatataaagaatgttccacttttctgatcaccggtttccctgcatctgcgatccggatctgatctagaatcttcctcgttccggcaatcgtgtggatcttccggtccagttctcttctcatcatgagcagtctgtcatactgctgatccacaaaagcgtcaaatcttacctcttccccgcccaacaggtattctttaatatctcctaccgaacagtccagttcacggaatgttcggataaaataataggagctgatctgtgcataactataataatgatatccgttgaccggattcttcttcggcactaaaattccctgccgctcataatagcggagtgtatctctggtggtctggcacatctttgcaaattcacctgcagtgatgcagtattcgtcttttttctgcatatctttcactctctttcttgacatgggtgttacccccagttttattctagcacaggattttgcagtatgacactgtatttttccaattcttttgaacacacaattttttatattatatggaggtttctcatgaatacttttaagaaaatatactgtcgcatttttcagacttgttttagaattgctcttccgtttcttccttaccgggaaccagaattaatcgatggattcaaaaatgtccctgccgtactgaaaaagcatcacatttcccacatcctgctcgtcacagatccaggtgtctacaagcttggacttacaaaacctttggaaaaacagctttcaaaatctcagatttcatgtacaatatataaagatacagttgcaaatccaacttctgccaacgtagaagatgcgaaggatctttatcttgaccatgaatgtcaggcacttcttgcattcggcggcggttcttccatggactgtgcaaaagcagtcggtgcaagacttgcccgcccgcataagtctctttctaagatgaaaggcatcttaaagatctggcacagacttccgctcctgatcgcagttccgacaactgccggaaccggaagtgagaccactcttgcagctgtgatcaccgatgccgatacgcatcacaaatatgcaatcaacgattttaatctgattccagactatgcggtactggagccatccgtcacttacggacttccgccgcagcttacggcaactaccggtatggacgcactgacccatgccattgaagcttatatcggacgctctactaccagacagacacgcagcgcagctgtcgaagccatccaactgatcttcgacaatctgcaaaacgcttataataatggaaatgacaaaactgcaagacatcatatgctccgtgcctcttatcttgccggaactgcctttacaaaaagttatgtcggatatgtgcatgccgtagcccacagtctcggtggatgttacggaattcctcatggacttgccaattctgtactccttccggtcatactggaagcatatggaactgccgcacacaaaaagctggccagacttgcgcgtcttaccggcatctctgattcggaccttgacgcagttgctgccggagaattcatccggcatatccgaaacatgaatctttccatgaatatccctgagacactggatggtatccgcaatgaggatattccgaagctgtcccgttatgcagataaagaagcgaaccctctctatccggtacctgttttatggggaccttcaaaactggaacagatgtatcatcttgtacaggaggtaaatgaaaatgacagaaacagaaattcagaacatcctggaaaagcagcataaatttttccagacaggccagactctgcctgtagcttatcgaatagaacaacttcagaaattaaaagattctatcacccgccacgaaccggatctgaatcttgccttaaaagccgaccttggaaaaagcgagacggaaagctatatgtgtgagataggactcacactttcagaacttagctggatgctgaagcacataaaaaaactgacaaaagaaacggtcgttccgacaccgctggcacagtttgcagccaaaagcttccgctctccttccccatacggaaatgttctcattatgagtccatggaattatccggtcctgctgacactggaaccactgattgatgcactggccgccggtaataccgctgttgttaagccaagtgcttatgcaccatctaccagccgtgtgatgcaggagatcatcgaagaatgcttttcggatgaatatgtcgctgttgtgaccggcggacgtgctgagaaccaggctcttttaaaccagcgttttgataagatcttcttcaccggcggaaagacagtcggacgtgaagtcttaagacatgcagccgaatatttaacaccggtaactttggaacttggcggtaaaagtccatgtattgtagactctacggccaaaattcctcttgccgcaagacgtattgtctttggtaaatacttaaactgcggacagacctgtgtcgcaccggattatattctctgtgataaagcgatccgtgaccagttgaccgatgcaatcaaatccgagattcgccgtcagttcggcaaacatccattggagaatcctaattatggtaagatcatcaaccggaaacatttccagcgtctgcaggggctgattgattcttccaaagtagtgatcggcggacaatcggatgccaagatcttacgcattgcacctactgtgatgaagaatgttacatgggaggatgctgtcatgggcgaggaaatcttcggaccaatccttccgatcctgacttacgaatcactggatgatgccattcagaccgtggaatcacatccgcatccgctggcactgtattttttcagtgaagataaagctgcacagaagaaagtccttgaccgctgtcacttcggtggtggctgcatcaacgataccatcattcatcttgctaccagtgccatgccgttcggcggtgtcggcgaaagcggaatgggtggatatcacggaaaagccggattcgatgagtttacacattacaggagtattgtggataaaaagacctggatggatcttccggtgcggtatcaaaggtataataagtttaagaggaagatgttgcggatgtttttaaaataatttgggatttaatttattaacggggaagcaacctctcggtccttgaaggaaacaatagataaggcttcttgttcaggttccataccataagaaacactaagagagtcagaatcacctaaaagcaaaggaactacgctcaaactcggcgttcgcctcaaacacgttcgcttcgttcctttaacggtgcttctgactctctaattgtttctaacggcattccacattcacaataatccttatctattgtttccttcaagtcgtgactggcagcgaatgttaagaaataaaatgcccggaagtgtaacccggtggaggccacaaccgttacgcaattgctgtttaattcttaaggcatttgatacacacggaataaagcttgaaaaggcgttccagtgaatgtgaaagaggcgttggtaattcttaaggggcaaaattgacccgccgatggaacctgaacaggaacacctttccaagctttattccggttcgggtatccacagccttcctaaattaaatcccaatcttcttcaaaatatccaccgtatgtgatcctgcccccacaagttccgggcgttcacatacagaaagatgatatcggataaatgtctcaaatgtctcatcatccattgcattgagtaccgggcgcatataatccgaaggtccgtctgctgagattactttaatccgttccagtccggcggccttattatatgcatccatatcttccagacgtacataatcatagaggtcttccggttttggctgtacacggaagttttcatcaatcttcccactttctatacattctaaaatatgattctgtttgaatccataggtcaggacactgtattcattcatacagtaagcaaccatgattacaccgtcatcttttagtacacgttttgcttcggtcagtgccttgactttgtcttccatggaatacagatggtacatagggccaaataccaggatcaagtcgaattctttatccgaaaagcgagataatttcatagcattaccctgataagcttttacggaactgttcttcttttttaaaatgccaagattatatttaaccagttcaacagcggtaacatcgtaaccttcttccgcaagggcgacactgtaacggccggttcctgcacctacatccagaatttttgcagatttatcttttggaagatattcgtgtatatatttcatagaagttgtaaattcgacttgtccatgccggcttccaagacgtttttcttcgttaaatttattataatatttctcaagttcagtcatcatagtgaagaattctccttatatcaaaaaaatatctgctcataccttatccactttaacataaagtccgggattatgggcataaaatatttacagaattgagaaaatatcattcattctgtataataagataacaataagaccctgtgaatgacaaagaagaggaaaatgattatggataatacagaaactgcgaatataaggctattacagaatataaaagaaattacggattttgatgcttcggaactggatgtatatgcaaggctcacagaagcacagcttttgaacaaagaccatccggagaaaggactgtttattgcggaaagtccgaaagtgattatccgggcattgaatggaggatatgagccggtgtctgttctggtagaaaaaaagcaggctttggaagatgcggaaacaatagccgtacttgaacggtgtgccaatgtaccggtatatacggcagaatttgctgtactgacgaagcttaccgggtttaaactgaccagaggaatgttatgtgtgatgaaaaggcggaatctgccggggctacgggaaatctgtgccggctgtgacagaatagcagtacttgaaaatgtaatgaatcccacgaatgtaggcgctatcttccgttcagcagcggcacttcacatggatgcagtggttttgacaggtggatgcagtaatccgctttacagaagagcaagccgggtcagtatggggacagtgttccaaattccgtggacatttgtggatagatctgtaagctggccaaaagaaggaatgcatatattacgtgaactgggatttaaaacggcggcgatggcattgaaagaaaattccgtaagtatcgctgatccgaaactcgcaaaagaagagaagctggcagtgatattgggaacggaaggagatggactgctggcggaaaccattgccgcctgcgattatacggtaatgattccgatgtcacacggtgtggattcgctgaatgtcgcagctgccagtgcggttgcattctggcagttaggaatgaagaattgctaataaaaagaatgtaaaatcagtaaacttgtgttatgataaaaagcaaaaagacaaacaggtataggaggaatcatagaatgtatattacatgtctggatgttgaaggagtattagtaccggaaatatggatcgcatttgccgaggaaagtggaatccctgaactaaaaagaacgacaagggatgaaccggattacaataaactgatgagatggagactggatattttaaaagaacatggacttggaatcaaggaaatccaggaaacgattgctaagatcgacccactcccgggagcaaaagaattcttagatgaactgcgctctttcagtcaggtaattctgatcagtgatacttttacagaatttgcacagccattgatggaaaagctcggaagaccgacattgttctgcaacagtcttgagatcgcagaaaatggtgagatcacagattttaagatgcgtgtggaaaactcaaaactcagcaccgtgaaagcactacagtctattggatttgaaacaattgcaagtggcgattcgtacaacgatctgggcatgatccaggctggaaaagcaggattcctgttccgcaccactgataagatcaaagaagctcatccggagattccggcatacgagacatatgcggaattgttgggagctataaaatcggtaattgggatttaattgggatttaattcaggaaggctgtggatacccgaaccggaataaagcttgaaaaggcgttcctgctcaggttccatcggcgggtcaattctaaaggggtaaaattctgctaaaagcaggctttcaaaatttgaaactcggcatacgcctcagacagtcaaattttgaaaacctaacgcagaattttgccccttaagaattaccaacgcctctttcacattcactggaacgcctttccaagttttattccgtgtgtatcaaatgccttaagaattaaacagcaattgcgtaaccgtagtggcttccaccgggttacacttccgggcattttatttattaacatccgctgccagttacgacttgaaggaaacaatagataaggattattgtgaatgtggaataccgttagaaacatttagagagtcagaagcaccgttaaaggaacgaagcgaacgtgtttgaggcgaacgccgagtttgagcgtagttcctttgcttttaggtgattctgactctcttagtgtttcttatggtatggaacctgaacaagaagccttatctattgtttccttcaaggactgagaggccgcttccccgttaataaattaaattcccaattcaattccttgcagttccttctgcatctcccgaaagaattccgacgtatgccacccatccatcgccgcatgggcaatcgtaagcgtcagcggaagtgtcagtttcccgttatcttctgtgtatttaccgaatgtaatgatcggaaacagcggcacatgatcagatgctgttgatgccgcatatccggtgtaatccagccatggcacgcaggaaatacagtaaaagttcaccggctgtccggcttttgccttgatgcctctgaccttctttgcagcttctatgtccgcttctattctcttatagaaagtcgcaaagtcatcatcgtatttgctccagcagtcagaaaatgtgtgatcctctttgtggaagatcgtataattcggatgtatcacatcccacactcccggattgccttcttcgtccgtcatcattttcatgaagggcagacggttcacaacatttgacgtacaccagataaatgccgcatagaaatgcactccgagccggtcgcattctgctcttaatcttgttacatccaggcgtgctgtcatactgtagtttacttttaatttttcggtataatacttgtagtgatcctgtcgcggccaggttgactggtcgatttttctatatggtggaagactcataatgtcacctcttattgtatattacttcgaattgatatagaaagcatgtcaagtaaacaaataagtaagtatatattgccttattgtaaaatgatgatataattaaaatcgggtgctgccataaaacggtaggcggttagtccttttaacagagggactgtgatgactgtaatccacaccctctgattacatagcccgtaagggactccaatggacaggagggctaagccatgagcattatagattttatagcagtggtgagcttcggcttaacctgtttcggactaggatatacatttggcaaagataacaataattcacaaaaatagccgcccgatgtctggtaaactaggcgactaattttgcttaaactattggactgaccgtctatcggcagcaccctttttctataactatactaacatcatctaatgaatatgtcaattttttatttcatcccagaatgactccccatctccccggtatttacttccaagagcttccgcaatcgtcgccgccatatctgcaaaaccttttctggtatgcagattcacccctgctttgatctcttttccgtatataagacaaggcacatattctcttgtatgatccgttccggtatatcccggatcacagccatggtctgccgtaatcatcagcatatcgtcgtcccgcatatttgcgaggaattctcctaactgttcatcgaatctcgtcagtgctcctgcatatcctgcaatatcacgccgatgtccatagatcatatccccatctactaagttcacatagcaaagtccgtcgaactcttttttctgtatctcaatcatcttttccatattcttttcatttccctgattcggataggtctctgtcactccctgcccttcaaagatatcatagatctttccgactccgatcacatttttcccttctgctttcagggcatccagcaaggtctgtctcggcggtgccagtgaaaagtcgtgccgtctgatcgtcctttcataatccggccaggttccgataaatggtctcgcgatcactctgccgactcccagatctccggtcagcatctctctggcgatcttacagtattcatacagctgctctgctggaattacatcctcgtgcgctgcgatctggcatacactgtccgcagatgtatacacgatcagtgctcctgtctcttcctgctcccggccataatcatgaatgacctgtgtccccgaatacggcagattacacagaatctttcttcctgtcctttttgaaaattcctctatgaatgcttttgggaatccatttggaaatttgggaagtggatccggtgttacgattcccgccatttcccagtgtccggtcgtcgtatcctttccacaggataattcctgcattcttgcaaaacttccggtcggattctctgtgctttttgcatattccataccatcgatctggtagattccgatcttttccatattcggaatatgaagtttcccgctgtcatagcaactcttccatgtattacttccgatatcaccaaatttattcgcatccggtgcttcaccgatgcctgcactgtccaatacgatccagaaaatacgtttcatagaatcagtcctttcggtctttttcttttattataagtctatataagaagactgtgcaagatacatgaatccataatttgttattctcactaataaaatcgcgcctttaaattatccattagtaagtaaatatatattgtatttttcgttgttaattgttataatcatatcacgggtgctaccaaaacggtaggcggttagtccttctgcagagggactgtgcccctctgattacatagaaacctgaaaaggaattcactggaaaggagggctaagccaatgagtattatggattttttagctatcatcagtttcggcttatcatgcttcagcatcggatacactattggtaaggataatcataagacacaaaaatagccgcccacagtctggtaaactaagcgactatttttactaaattattatcgggctaaccgtctatcggtagcactctttttctataactatactaacatcatcttatgaatatgtcaaaagatttttcaacaataaatctactctactactgattttcttacattcaccttcgtacgttcttccctgtcgaagaatttcttagtttcactgataaccacttttcgaagtccaagtaatgcaatcaggttcggaatgatcatcagcgcattggtgatatctgccatcagccagattggttccagtgtcaggaacggcgctgttgcaattgccaggatataaacgatcttaaagatcttgatacttcctgtctttccggtgagatacagcacacatctttctccataatagttccatccgaggatcgtagtaaatgagaagaagataattcctactgctaccagatacataccaatattaaatggaagtccggcattatatgcctttgtaaccagaacacttccgcttaaatcagtcttatcaagcagaccacttgagattacaaccagtcctgtcatagaacatgtcagaattgtggtaaagaatacacttgtcatagagatcagtccctgttttacacaggaatcggtctttgctgctgccgcaacgatcggtgagcttcccagaccagcctcattggtatacacgcctcttgccacgccggttctcatagctgtcatgaaggagatcacagccgttcctgctgctcctccaagtgcagattccttagaaaatgcacatgagaatatctctgcaaacgctcccggaattgccgaacggttcacgatcaggatcaccatagagccaccgataaaagagattgccatgaatggaacgacaaactgtgcaacttttgagattgcctgaattccgccaagtgttacaactgctgttaatacagtaacaataattccgataaaaatgaccggaatatggaaagaatcatgcacagactctgtaattgcattgacctgtgggaatgtaccgcaaccgagaagtgcggttacaactccgaaaaatgcaaagatttttgccagccatttgaacttctctcccattccattctggatatagtacatcggtcctccggcaatttcacctttttcgtcttttacacggaattttacagccagaagtgcttcggaatattttgtcgtcattccaagaagcgctgatacccacatccagaacatcgctccgggtccgccgatacgaagagctgttgccacacctacgatacttccggttccgatatcagcagccagtgttgtacaaagtgttgcaaacggagatacatcgcctgctccttcttctttttcaaaaatacttttcagtgcttttggaaatttacagatctgtattccccgtaatttatatgtaaaatacaaacctgttcccatcagaagcaccaatgtcggcggtccccagacaaatgtctgaattgtttccagtaacttcataaatgtttccatttttttcctcccagttgttaaattcctgtcaataaatagtcatttttttggcaacggatgaatgcatccgttgccgttatgaaaagtttatcagttacatttttagctgttatatttttctttatccagctctttttctttcgcatttacgattacgtttactgtggcatcaccgataacgttcagtggcaggagtgccatttctaccggacggttgattgcaacaaccaatgcgtaagcgatcatacatgcatcagatgtccatccaagtcctgaaaggatcgttacgatcagtgtggtacctgcgattggaatagcaggacatcccatagctgcacagattgataagaatgcgatcgttgcgaggttggcaggtgttacatcaattcctgcacttgttgcaataaatgttgctgcgaacatatgcataacggttgttccgttcatattgatcgtcatacctgtcggtaatacaaagcttgtaatctcttcgctgcatccaagttcatcaatacatgtccttgtattgagcggcagacatgctgctgatgagtttgttgaaaatccgaacacaccgaccttcgcaattttcttgatgaactttattggattcatctttgttgttacccagataccgataggataaattgtaacaaccaatacgaataaggttaccattgcagctacgatataagcagcagccggtgcaaggtactctgttccgtaaattgcaaatgttcttgagatcaggcagaaaattgcaatcggaccaactttgttaattaagaatgtaaggtataactgaatgatttcgttgacactttccagcactttcttcagtgggtcagctttttctcccagtgcattcatgcaaagtccaacaggatcttgttgagtatcgtccatg

SEQ ID NO: 2950 - DNA, 34845 bp, Unknown
  gut microbiota DNA sequence
accagaagagatcaactgctctcttaataaaagaaaagcaattcccaccaacaggccgccgacaagagcgatcatcattttctttacaaccgacattggctgttttttcgttgtgttactcattgttgttctactccttttcctttttgttttcattagaatttactaattttttctataaaccgcgcgtttatttatgaactacatacaatgtaacatggatgcggtcgtaagtaaaattaattatttgtctataaaatatcaatatcttttatattatctatattatcaaatattaatatcgttaatattatacagcaacattattcatttctcttttcacaacaacattgatataataaagacaaccaatagattcaagccaataaggaggaaaaattatggctactaaatatggggaattattttcagatgaatatcagaaaagcttaaaagaacagttttgttatgccgatacagatccggattatggagaccggctcttctttgagaactccggcggatctctcagactcagagctgctgtagaagccaaagccggactggaagaatatccagactgtccggaacgtgtacgtggaaaaggatatgatctttcttattatgtaagtgaaggaacaaaagaaatccttgaagttgtgtttggtgcaaagagtggtgctcttatcactgaactttctgcttcccagacaatgttccatgctgtcggaacaatcatggaaaacgttaaatggggaaaaaatgcagttacatctgcactggaacatccgtctgctcatgatgcggtagaatactactgtaagcagacaggaagagaattccgtgaagttcctgcaaatcagacaaccggtggtcttgatcctgatacgattatgcagtacgtagacaaagacaccgttttattaagcatcatggctgcttccaacatttccggaaatatcatggatatcaaggaaattgcaagacgtgccaaagagatcaatcctgacatctacattgtaagtgacgcagtacagcatgcaccacatgccgttatagatgttgaagactggggtgtagatgtatccaacttcgcaccttacaaattctttggtgtacgtggatgtggatactgttatgtatctgaccgtgttgcgagcatgacgcacagaaaactcacatgtaaagctcctgatgtatgggctctcggaactcctacacctggtaacttcgcatctatgatggcagtcatcgattatgtatgcgatattgcaaaacatttccttggagacaaagctgaagaaatgagcaaacgtgagctctatgtagaaggtatgaacagaatccatctgcaggaaagaggacttctctaccgtatgctggaaggaacagaagatgttcctggtcttcgtcatattcctgatgttgaagtatatgtagacatggaagaccttacatacaaagatctgatcattgctatgggtatcaagggtattgaatatgcagactgtgctcagaaatatatggaacacggcgtgacgatcttcgaacgtgtgaagagcagcccttattcaaaacgtatcgtagaaacactcggacttgacggagcactccgtgtatctcctcttcactgccatggcagagatgacgtagacaagttcttaaagatcacaaaggacattgcagaagggaaataacccccattcctcatcttttgaatagcgagaagctgttatctggcagcttctcttttttgtatataaatatctgggaagtgtaccaaagaaagcctttcacagagttttgataactctgtgaaaggctttcctttatcatatttattctatttgtttacctggtttactgtatttccctcaaggaaggctttaatattatctactgtgatatccatgattctctgtcttgatgcctgagctgcccatgaaatatgtggagtgatgatacagttcttagctgttaacagtggattatcgcctttgatcggctctgtagacacaacatcaagtcctgctgcgtataccttaccactgttcagtgcatctgccagatcctgctctacaacaagctgtccacggctgttattgatgaggattacaccgtctttcatcttggcaatgttctctttgttgattattccttctgtagccgggaataacgggcagtgaaggaagatcacatcagaacgggcaaataactcatctaatgacacatattcagccagtttctttcctgcttcgctttcatgtgcatcatatgcgattacttccatgtctaatgcattcagaagttttgctgtagcctgtccgattcttccaagtccgatgattccggctgtctttccatagagctcgatcattgggtaatcccagaagcaccagtcaggattgttctcccattttccttcttttacacattcgtcgtgatgtccgtaatgtgaacagatttcaaggagaagtccgagtgcatactgtcctacgatctgtgttccgtatgtaggtacatttaccaccggaatgcctttttcttttgcgtacgcataatcaacaacattatatcctgttgcaagaacagcaatcagtttgatattttcacatttatccattgtttctctggaaacaggtgttttgttgatcactacgatctctgcatccccgatacgctctgcgatcaatggtgactcttcataagaagttctgtcatagacttctacttctcctaattcttttaatgcgtcccagcttaaatctccaggattctctgtgtaaccgtctaatactacaattttcataacatttcttacctttctcttttattagcattttgttttatttcatttccatgtgcaatcctgcatgatcatcacttgaatgaccacttacgcattcagcttttcatccagtgccttaatcgactccagctctctgatataaagatcctgggccagatccagacttacattgacaaaacgtactttctgtcccggctgtgcctgtgcaatctttgcaagatccacggaaattactgttcctatcttggcatatcctccggtgctctgtctgtccgataacatgatgatcggctttccatttgttggcacctggatggatccgacggaaataccatctgtattgatattaccatccccgacatgttcaatcggctcccgttcgatacgacagcccatacggtcaaattcattggtgatcacaccactgttccaaaagaagctctttacccctgcttctgtaaattcatcgtcctgtggtcccagtaccacacgaagaacaatctctttctttggatatacacttgccggtacttttcttgcttccatattcggaagtatcgtcttcgctgagacaaatccaatctcatcacctttttcaagttttcgtccctttactcctccaagatgattacgaagcagtgttgatttacttcccatcacgatcggaatatccaggcctcctgcaaatgcaatatatccacggcatccatttcttgctcctgcaaaggaaagcgtctgcccttctttcaccagaactgcccgatacatcgggaattcattgccgtcaagcatcggagtcagatctccgcccgtcactgcaacgatattatcactggtaaactttaatgtcggaccgataaatgtcatctccagtgcgccttctcccatatcgtttcctaccagtatattggcgatgtgaaacgaatgattatccatggctcctgaggtagatactccgaatgcctgatatccgaatcttccttcatcctgtacagtcgtcaggattccaccattttcaactattattcccatatcatgacctccgattctatgcgttaccttccggtgtatatgtcttcaccttatatgtaccttttttcacatctctgcggatcttgtcgtattccgacttcgttaccggcacatgttttacccagtcaccggcatgtaccaggaatggatcttcgttatcaaagttacagatatccagcggcgtgcttccgataatattccatccgcatggctgttcaaatggaataaaatctgacagattctgctgtacaacaatggatcttgccgggatctttactctcggtgattctcttctcttgaatccgaacggctcatcaaatcttgccatatacgggtgtcccggtgcaaatcccagcatatatacatagtattcatgttcggaatgctttcttatgatctcttctacggttgtatgctccagctctgcacaatattccaggtccggacctgtctcgccaccatagtataccggcacttcttttactactttcttcttattactgttgtcgactgcatgcatattaccaagtcttttctccagttctttcaccagtttcccataccggatcacttccggacggtagtgaatgatgagtgcacagtatgtaggaactgtctcgatcatgccttcgatcggatcttctttcaaattctcatccagcatacgtacttttgcattcgtctcaaggcagattgtttttccaaactctacggaaaccgcccggtctcccgctgtaagaaatcttacctccattttcatacctccattttgtatggagaaaggtctgtcccatgttctgacagacctttctgcatatcatttcttatcgttcgtcactttagattcattataacatatactaatatttctaatatacaattatctgctagtccacaaattcgaatccaacttttttcagggaatcctgtacccatgggcgaggccattcaccacgatttataattccgtccagctgattttcttccccttcatgataagcttttgcaattttagcaagctcttccgcattctttggatctattgcgatcagtccatcggaatcaccaacaaggatatctcccggattgataataattcctccaaaggaaactgggaaattcatctctccaggaccgttcttatacggtccgtttggtgtaatcccctttgcatacacaggaaagtccatctggctgagtgtatagctgtcacgcacacatccgtcaatgatgatacctgcaagtccacgcttctttgcgtaattgctcataatctcaccacatagtgcacggctcatacttcctttgtttgcaagtacaataacgtctccaggctgtgccatatcaagtgctgcatggaacagaaggttatctcctgccggtgcgtttactgtgaatgccgttccaagaagacgtgccttaggatttaatggaaaaatactcgcatctaccgctgcgatccttccgcaattatcgtcaatattagcaaccggaattccacggaatgcctcaactaactcctttgccggtctttcaaaattccttctgattctacatcctgctgacatataaaaacctcttttccttttttctgatttcatcatagcacacaagttactgattgaaaaacgaataatttctctgtataatataaacaacttttatattcataatgactacaaactatgaaatataaataacaaatgaacgaggaggaatagcatgaatctcgctgaaattgaaacatttttaacgattgtcaataccaaaagtattaccaaaaccgcagatctcttatttctttcccagcctacggtaagccaccgcttaacttctctggaaaacgagctcggattttctctggttatccgcaacaagggccacaagcaggtcgagctcacaccaaagggaatggattttatcatcctcgccgaacgctggatgtctctttggaaagaaacacttgaactacagcataatcaggaacagttgctgctgaatatcggctgtaccgacagtctgaacattgccgtatttgtcccgctgtatgacaagatccttatagattatccacatctggatctgagcattcagtcacatcattcttctgaattatacggtatgctcagtgaacataatatagatataggctttgtatatcaccagcttcattacaaaaacattatttcagaaaaattatttgaagaaaaactttatcttttacaatccgaacatccggttgttgagaaaccaatcgtacacacagatgaactggattcaacaaaagaattgtttttaagctgggatgataattttcaaatctggcacgaccgctggctttcttctgtatccagaccacatatttctgcagatacgatcacactgctcgatcgtctctggaaaaatgcagatacctggatgattgcaccggaatccgtcatccatgaactttcccggtaccgcaaagtatatgtgagcgagctgaagaatcctgctccaaaccgcatctgctataagatcaagcacaaatatccaaaaactaccagcaaacgtgctgttgagctttttgaagagattctggaacagtttcttcatcttgaacgcaaggagatcccgattggtgaaatatggggcggacggtaactgtatccatattttcctgtttcattgaaaaagcagtatctgacggacagatgctgctttttcattttggatacgttatacaatattaattggtagtgtcaaattaatttttctatttttatctggctttcagttctgcaactgcttctctgattctcttagctgcttcctgaaggtcttcgtaactgcatgcataagaaattctcagatatccttccccttcagagccaaatgctgatccgggaaccagtgctactttggcatgttcaagcagatattctgcaacttccattgatgtcattcccagactctttacatttacaaaaatgtagaatgctccctgtgggttattgcagctgataccatcaatatcattcaatgcttttaccatgaagtcttttcttctctgatactcctgcctcattgcttctacatcatctgcacattcattcagtgcgacgattgctgcatcctgtacaaatgaagaagcacatgtgatcgtatactggtgtactctgacacatgcagagataatttcttccggagcacacatatatcccagacgccatccggtcatagaatatgcttttgagaatcctccaagtgtgatcgttctctctttcatccccgggatggaagcgatgctgacatgctctgctccatcatacaccagttgactgtaaatctcatccgatacgaccagaagatcattacggattgcgatctcacttaatttttccagtgtctttcttgagaagataccgccggtcgggttacttggattaaccactacgatcatcttggttttctcagtaattttagattccagttcttcaaaatctatctgataatcattttcttctttcaggctgtaagtaaccggagttgctcccagtgaggacggtacatgaatgtagttcagccataccggattcgggaccagcacttcatcgccttcttccagaaatgctgccatagacgcataagtcgcctcaccgacaccaactgttacaagaacttccgatgtttcataattcacattgtgatgttcgttttcccattttgcgatttctttccggagtgcaggagttccataattggatgtataaaatacatgtcccgcattcaggctctcatacgctgcatccttgatctttttcggtgtatcaaagtccggacgtccaatctccagatgaatgactttctctcctgcctgctgcatctttgttgccttttccataactgccctgattccggagaatggaaggtattccattctttttgctgttttgtattccatgcctgttcctcctgctgaaaatgattatctgtttgtccctatactatattttataagtgtctgatctcgatgccttcttccgtgaatttctcacgtatcttctgaacgaatgccagcgctttcggtccgtcaccgtgaacacaaagagtatctcctttgatatccagttctttcccagtgatagaagtaacctttccttctttgatcatcttcacacatctctggattgcaatgtcttcatctgtgatcatagccccttccatctttctcggaacgagtgaaaggtcatccatatatgctctgtctgcgaagatctctgaagctgtacgaagtcccttgctctcggcgatatctccaagaactgctcccgcacagtagtaaacaatcaggtctttgtcatattcgcagattgcttctacgattgcgcttgcgatatcttcatcatactggcatgcatttcccattgccccgtgaggtgccacatgctgtaatttcattccataactcttcgtaaatgctgcaagcgctccgatctgatatcttacataatttttaatctcatcatgagacagaaccatctttctgcgtccgaatcccatcatatccggatatcccggatgtgcacctaccataacacctctctctttagccatgcggacaaccttgtccataaccatcggatctcctgcatgccatccgcaggcaacattggcagtggtcacatatttgatgatttcttcgtctcctccgatcttatatgctccaaagctttctcccatatcactgttcaaatcaatactatacatgagtctttctcctttcggttatttccgtttctttttccttgttgcttcaagtataacaccgcaagaataaataataaaataaataatttcactttaatatattaactttttttattatcaaatatattttttcatgttttaatatgaacggattctctgctataatctcagatatgaacttttttgaatatggtcttttaggcgaatcatataagcaggagggatacccatgatcacacagattggaaaacagctcgctacacagattgtagataccgtccatgacgtttgtggacacgatattaatttcatcaataagaatggtattatctacgccagtaccaatacttcccgcatcggctcttttcatgaaatcggtaaaaaagctgccgatacgaaaactgtcattgaagtacaggaaaatgaccactacgaaggaaccagcagcggagtcaatattcctgttacacacaacggatatctcattgctgttatcggaataagcggttccccggatgaggtccgcaaatttgcttatctggcagaaaaaatcacccggcttcttatccgcgaacaggaattgaatgctgcttcccgcactttgtcagaaaagcgcacttatctggtttcttatctgctgtccggaatcgaaacttccaacggaacctgcgaatttgagtctttcccggataaaatagcagatttgaactatatccatgatcttcttgatgaatttgagatcaatattgagaagaaaaaacgtgtattgatcatccgcatgttatcagaccattctacgatcacgatctcgtctgtggaagaaaaaattttacggatgttcacagaacattccatacacttatataaatttcagtatccacatgaatatgctgcaatcatcgacagctcctttcctctgaaagaattggaagcattctgtctgtccctgtctgactccatccagatgggtatcggacgcccagcggaactttttaagctttctacatcttacgatactgcccggattgcattaaattcacttacggattctgctgatcattatgcactcttcgatgatctgacacttgaaatcctccttggatccttaaacgaagtcaccacggctgaatttattgcaaagacgctttcctgcctggatgaagcagactgttctcttttacgcagttattttgaccatgagcaatcgctttccagaacaagtgaatatctctatcttcataagaataccttgcaatacaagttagaccgtattcataagatctgcggtctgaacccgcgtagtttcagagacggagttattctttatcttgctcttcgtctgaaagaaatgtagatagaactgcagctttttacgcaatatatgtcacttgaaacatatattgcgtttatttttcccctttttcattcttcgtactatatatttttctttttctcttatgttatactgcatattaagaaatcaattctgaatttttatttctatgtacctaaaaaatgtatttcaggaggtttattcacatgaaagttgtaatagcaatcgattcattaaaaggaagcttaagttccatggaagccggaacggcaatcaaagacggaatccttgcagcaaaaccagacgcggaagttatcgtaaaaccgctcgcagacggaggagaaggaacaaccgacgcactgatcgaaggaatgaacggggaacgcattgaccttaccgttacaggtccgatgcacacaccggtagatgcttattacggatatctgaaagataccaacactgctgttatggagatggcatccgcagcaggtattactctggttcctgattcagaaaagaacccgcttcttgcaaccagttatggtgttggtgaaatgataaacgatgctatccaaagaggctgtcgtaactttatcatcggtatcggcggaagtgtcaccaacgacggaggtatcggaatgttaaaagctctcggcgtacgttttctggatgaaaatggcgaagatgccggagaaggcggacaggccctggctaaagttgcccgtatcgatgtatccggtatgaatccgcttttaaaagaatgccacattcaggtcgcatgcgatgtgaataatccactctgtggtgaaaatggttccacatacgtttatggaccgcaaaaaggtgtgaccgaagatatgaaaaaaacattggatgaagcgatggcacattttgccagagttacttctgaaactcttgaaaatgattatatgaatacaccaggtgccggtgctgccggtggacttggctatgcattccttgcatataccggcgcagcactgacacctggtattgaactgatcttagatgctgtcggactggaagaagagctttccggcgcagatgtggtcgttaccggtgaaggccgccttgattttcagaccgcaatgggaaaagctcctgtcggagttgccagacttgcaaaaaaatataatgcaaaggttatcgcatttgcaggaagcgtcacaaaagaagcgactgcctgcaacaaagaagggatcgatgcattttttcctatcttgcgcagtgtctgcacacttgcggaagctatggatcctgtcgctgcgcgcaataatatgaccgcaactgtagaacaggttttccgtttactttaatgtgtatcagtaatgattaatttccccttaatcaccggctctatcgtctgttccatcaggcgatggagcagatcaatacctccgttctccctgatacgggaatagatcggatgcttagtaacttctgtcgtgatggattccattccttccatgatcaaagccttaccgggtgattcgtaccattttatttctatatgttccggcggtattaagtcccggttattccctgtattcctgacaaatgtcacgtataacttccgtctcatcgcttcttccagatacgcaatttccactttcaaaacctggttatcatctgcatctgaggaaagttctcccttcactgcaaccagatatgtctctccatgaacagtcagtttattttcgatatattttgaccatcccatttcaagttctattgattcttcaccttcctgaaagcatagtatcatccctttgcggaaaccgattttcgatatcccatctgtcatattattgtgcatcacctgcataaccagcggaaacagaccgacacttgactggtccagctcatagtgtacaccatccagcagatcctccagtaaatggatctgttgtttccgtgctttttgtgtttctatatacttcccgcgtgccctatatttttctgagttcttcttccatccacctttacagaccgtgagtggatgattatagcattgctgcttctttaaacagatttcggtcagttcctgcagctttgcatacgcaattggattctccggaagggtctcttttggcatccaatctaccgggaaatattttcttataatattcagcatcacattgtcctggaatagttcttcatttcccgcattcgttacgatcaccatatcaacgtccggatagatcaacacattctgcccaagcattccgttatattcaaaacttcccggacgttcttccatccagagctgatatccgtatccgtaagtaccttctatactatctacttttttcgtaacagacgcctctgcccagctttccggaatgatctgttttccattccatttccccttattcagatatagctgtccaagcttcgccatatcctctgtatgcatgaaaagtccccagccgcctttcgtaattcctctcggacatttctcccacagataatctgtaatccccaatggatcgaacagtctcggcttcagatattcatccatcggcattccggtccgttcggttatgattgcggaaagcacataggaattcagactgttgtactggaattttgtgcctggtttttctgataccggtgcattcagataactttccagccagtcatttccggatacgattcctgattcattaaatgttacgccgcttgtcatcgtcatcaggttctctaccgtgacctccggccggaatattttcgcccaggtacttcctttatcgtgaaaaattttataaatgttttctgaaagatccagttttccctcatctatcagaagtcctgctgccattccggtgatgctcttacacatggaatgtgtgatatgccagatgccttttctgtaaggtgcaaaatccgtctcacagatgacatttccatgacgcaataccataaagtggtgcatatcggtgtctggtgagtatgccagttcctccacaagattcctcaaatgctccgaatgaatcccctggctttccggagtgtttcttgggaaggtctgccccggattctcatacacaatactctgtggttccgggcaacgtattttctgaggtacaaagtccactttactgattccaccggtcttacccaggatcatattcgttaccatctctattaccgcaagctgctcttttgccataagatcacctcattttaccattcttgcttttgttcatctctatacaaatcagaacagatcatagtttctatatatgatgtagtataacagaaaaacccggacatctatacttcgatatccgggtttttccatatttttatatactttatcttttgtttagattattcccttctgtaatacaatttcctgtattacacaagaattattctgcggtctctgcggctgcctcatcttcatcatcatccggtacattgttgtgtacatactgtaatgtaacaactgtcgtttcaggatctgtcatgacatctacatctttgtcacttgaaagtgtaagatcttttaccttgatcgaatctccgactttcatgttacttacatcaacttctaccttgtcaaccaatgctgacggatatgccttgaactgtacttcttccagtaactgttccagtacgccgcctgcagccttctcgtgtccgaccagaacgatctctgctacagaatgtactttttcattacttacaagtgcctggaagtctatctcatctacctgaccttttaatgggttgaactcaacatctttgaccagaacattcatcttctcaccttcgatgtccagcatgacctgactgcctttgtgacaggtcttcagtaaacggtcaacagttgctttttctatcttaaccggaacagattctttcatctctcttccgaagacattaccggtaacgtaaccttctcttcttaatttctttgctttgacgtccatgcttcttttttcagcttttaaagtattcatttatcttttcctccaaaaatctgatgcttagcagccttcgctttgtggtttcaacgctacaaagaggttttgttaagtaggtttcctttgttacagtcgtattataacacctaaagcagatgaagattcaccaaaaagttgatttttttgtccaggtttttatgcacaatttatctacgtttttccagttcctccgtcatctcaccacggatgctgtccaatttataaaaatatgtcagaactgcgatcagcacacacagcacgatcgggatccagataaagcagatttcaatatgcgtcagtgcacgagaggtctgtaccgcattagctacatagccgccttttctcaggaagattccgataatgaaacttgtcagtcccattccgccttttacgaaaaatccctggaatgcagcgatcagtcccgctacacttgcatttttcttatattcagaataatcgatcacatccggctgcattgcaaatgtaattccgaatattccatagattccaagtccggtgatcacaaggccgaccagaaggcatgctgccgagttcttgcctataaagatcagaagatctccgatcacatacagccccacacttacgaacattaaatttctcttgctgaatctctgttccaatgcaggcagcgccagtaacatcggtaatccggacaagattcccagaattcctaccagtgacagccagtcttctcttcccagattatatttaaaataatagataaccgttgtatttcttactacatataatgagaaatagaacaggttcaacaagaacagaatccacgcctgtccagtcagtcccttaaagtcctgcagaagtgaacggtgttcctgtgtcgctgtcggtggaacgatctctttggtacttgcaaatgtgaggaagaaaatgcacattgctgcaataccataaattgtcattgtgatcagatatcctcttccttcgttgccatgtccgaagaatttgaccaatggtgctgtaattgacataacgattgctgttcccgccatcgcacagatcattcttgtggatacaaggatatcacgctcatgaatatccgatgtcagccttggcacaatcgtattcaacggaatatttacgactgtatatgccgtacaaagcagacagtaagttagatatgcccagattaattttccggtacttccaaagtccggtacgaagaatgtcagaaccgtaaacacagcaaaagggatcgcaccaatcacaaaatatgggcgtccctgtccccattttgtatgtgttctgtcaacgatcagtcccattcctgtgtcagtcagtgcatcgataaattttgttaccagcatcatcgtacctgccgcagccgccgtaattccaaatacatcggtgtaaaataccatcagatacgaagccatcgtactgaacaccaggttacatcccagatcaccgattccataaccgattctttttgcccattttttcatttttcttttcctctctctttcgcattcatttttccgaggttaaaatgtaaggaagtctgccgccacaaacttccttatatttttttcatattagaagcaggtaaatgctccgtcaactacgatgtctgaacctgttgtaaatgaacttgtatctcctgcaaggtatacgcagattgcttcaagttcttctggttttcccattcttcccattggtgccatctcattccatttttcaatcagtggaatcagtgttggtgagttcagtgttaactctgttccgatgtatccagggctgatacagtttacacgcacgccgcgttttgcccattcgattgcaagtgattttgtcagctggatcacgcctgcctttgatgcattatatgcacactgtggctgcggtacatttacaatatgtgctgacatggaagctgtattgatgatggaacctccgccattttccagcatatattttcctgctgcaatatccgttaagaagattccattcagattaatattgattactttcaaccactgttcatatgtcatctcttctgccggtgcattgatgcagattcccgcattattatggcagaaatctaggcctcccagttcttttacaacttcttctaccattgcatctacctgctctttgtctgtgcagtctgtctggattgctatgacttttctgcctgtcttctctgcgagctctttcgccgtcttctttgcttcttcaatgtcaaggtcaacgattgccacatcagctcctgcctctgcaaatgccgttgccgtgcactttccgattcctcttgctgctcctgttacaaatccttttttcccatcaagtctcatgttttcaatgattcccatttttgtttcctctctttctttttgttattttaaataattttatattttaattttataaaatcgttttatttaatgtgtttacataataattcttttttatattttttacaagatgtaaatatttacaagatttgcgaatttattttgtgcacttttaataaagcaaagagtcttttcaagatacggataaaattgtataattattttattaaattgctttatataattagcagcatataaaagggagattattatggaacaattttcattaacagatataaagaaaaagaatttatcagacgtctatcaatatatatatatgaatccatcctgttcaaaacaggaaattgcaactgcgctttctgtcagccttccaacggtcacacagcatcttacgacgttagaaagccagaatctgattgaaaaatgcggccgcctttcttcatctgtcggacgccgggcagttgcttatcagattctttcaaatgcacagattgcgattggtatcgaaatcctgtctcataccgtacggcttctcgcagtgaatctgtatggagaagctattgcaaaagaaaaattaacgcttacttttgaaccgaccaatgcatatctttccaaattaagcaatgccgtaaagacatttttggaatcgaatcattataaagaaaataacattcttggaataggtcttggtgttcagggcctgatctcaccggatggctcagaatttacttatggtaagatattaaattgcaccggattttccctggaagcatttgcaaatactttttctgtcccatgcaaattcattcatgattctgaatgtgcatgtaatacggaattatggaaaagtccggatatcaaagacgtaacatatatttctttaaattaccatctgggtggtgccatcatcgtagacggtcagcttcttaccggtgctacaggaaaaagcggaacattcgaacacatgacactggttcccggcggtcatgattgctactgtggacgtcagggctgtgcggaatgctactgttccgtgaactcacttctcggagattccgacaacctggaagaatttttcgaaaaaaaatcagccggtgataccggctgtatagaaagatgggaggattatttaagacatctgtccattctgatcaacaacctgcatatggttctagagcataccgttatattaggcggacatgttgctccctactttacagatgaagatttctctaaaatccgtcattacgtggctgagcgttctacctttgatgatgacaccagttacatcattcccggcaaatgtcctggtgatacagtagcgatcggagctgctctgccatttatcaaagaatttatcgacggcatttatcttatataaccttagattcatttataaaatacagagaagttaccacctgattttacaactggtaacttctcttttttatcgccatgcgttcgtaagtaggtggcaggtcaagcagatattattttcagaatatttcgtctttttattatttttcacttttttttcagattacccattgacatttccactttcgtgcgatattataatatcaacaaaagaaaaggaggacggaccaccaatcagttaaatctttatttaaaatctaaagaaagaggtacagtccaatgcagaggacaatctaaactgaaaagagtctaataaagaaaaaggaggacaaaccaccaggaacgtaaatttaacatcatttaaaaaatgataaaaaaacaaatcgaagaaagaaagaggtatagtccattggatgaaatatcataaaaatccatcgtatttaaaaaattattaagtacggtggatttttcatgtttcttttttgtttttattcttactcctcgtattcaaacttacgaatctcacaattcttgataccgaatcttgcaaattcatcatttgtcatatcgccaaaataagactgtatcgctcttgagatcccgttatgtgcaaccagaagatatgtcttctgatctgattctttcttaatatcatcgagcagatcatagattcggtggcaaagcttcagcatcgattcgccgccttcataagaattaataaaattagccttagccttctggaattcctctccatttctcggcgtaccttcgtattttccaaagttctgttctttcaggcgcatttcttcacgcatcggaataccggttacctctgatacgtgtcttgcggtctcttttgccctgatcaatggtgaatacagtatctcatcgatctgaattccctgctccagaattgcctgtcccagttcttctgcctgctgatggcccagttctgtcaattcaatatccgttgctccgcagatcttattctctacattccagactgtctgtccgtgtcttgcaaaatataaatgtcccatttctgtttcctttctgctcttaccgcctatataagttctgcaagaaccggcagtttctttttataaattcttcccgaaaatgcaatatgcggcaactcataaaatgccacattctccgggcagaccgggcgatacaatggatccgccacaacgccttttacattctttaaactctgaagtgcctgctccagttcttcttctccacaaactgcaatatctccatccgcaagtaatcctttcttttcccttagcggacagattactcttacagatatctgatattccgtctcgatcaccgctgccagagattccatgatcactggttcgccgattaatatgatctgattttctgaacttttttccgactcgtttcctgtcaggccgatatgccttcctttttcgagatatgctacctgctttttttcttctattgcattcaacagagttttcataaatccccgaatcggtgtaccggtcacataaggcgtcccgaatctttcctgcaatatttccgctgcccggagtcccgtcgaagagaccaccagattcatctctgcctccggtgcacgcgcaagatcttccagtgtatctcccatcgcccaggtcgataacaccttccatcctgcctgttccacattctgtatcaatgcatccacatgctcctgtggtccgaaatcgagcggtgtcacaccaagaagattcacgctctttggcgtcacttctctctttccttcgatacgtttcgcaatctctgcaagtgctattccaacaccatatacataatcatgcatgccgtttgtcggaaccgagaatgccggaatcccgagatcttgttccaatatcttggcgattgcttcaaaatctgttccattcatatagggaatcggggaccccgcaagtgctataaacttcggctttaattcctctgccgcaatctcgatatcacggatcagtttctcatcatttcccataacagcatcgatctccgtaagtcccgagatatagatcatgctgtcctggtcataccagcggatctcatcgtgtgtattataggtagaattacagccggacggatcatgcatcactgtcatcccgccaagttcatagagtgccgagcagacaccggatacatccgctgtataaattggtatgatcttataacttcgtttcatatgcagctttcgcacccccaacctttccggatgatcagatcttccggatctttttcttcctgccaggcttctatcatcaatcctgccactttccggattccgtcaaatccatacagaccggcaccttccaccagattgacaaaatgcttcgttccggtaaaccacgccgctttctgtccgattgccagtatattttcttctttcctcggacgtacccgcatctctgggtggatcgtcggctcatatgaaaggccaggatattgttgtttcagccactcaaatgttgctttttcttccggatttaccgcatccagatagattcttgtcacagaaaagccatgtgtcagtaacagctttgcaagctccagcggtcttggatgaaatgtgtgatcgatcatgatctgtgcatctccgattatttgtcttgtttttttcaaaactgcttcacacaatgcaatctctctttctatggtctcatctatctcagcatctcttacactttccgtaaccgtctgctccagcattctccattgtctgatgatttcttcataatcaaagcttcccggaagatataacgctttcttcccaagcctctctgcctgactttccagtccatattttccaggcggatagcatgctatgaatattctactgtctgcaaggttctcataagctttccatgagtcacaggtcggaagttctctcacttctatattctctgccttcaacaaacgtttgatatcactcgtctcatccagcgcaaaatcactgcctaaaattgtcactgatctttctgaatcagacttccctgcatttctttccggaagtgcgtcgtagatcgacttccgaagcttctgatccggcgtcagtccgtgcttctgcatgatcggatccatataacagcggatgaaaaagatctccggaaatctcgcttccaattcttcatatacccgttccagatcacatcccagaaaatgatgcaggcatactgtaaataataataccgccttcggatgatcgccccgtttctttaatacatctgccactccctcgatcgtcacatcttccagattaccattcagaaggtcctcctcttctacgatcacaaaagagaacctgtctgcggcattcatctcggctgctgtcagaacaactccccgcatacagttatctgcacagacatagatctggattgcttccggaagaagcattcctgtatggacaatattccagttcccatgcgccggggaattgaattccagaccgcttgattctccggctttctttaacatttccatccctccccggattcttttgacaactcatagattgcttccgcaagctttctatattcttccgccatctcactgcctgggaaacactccatgaccgtctttccttcttcttccgcttctgccacaagttcactgtgagataatgttcctatcacctgtgtcttgaaatcatctgccagctcttttaccttctcttcttctcttgccacatttctgcgatttaagataatccctccaagagacgcatatccacgggtcttgaaattctccactgccatcgcaatatttgccccggcatggattgccatattttctcccgaagtgatgataaagactttatccgcatatcctttcctcatcggcatagaaaatccaccgcatacaacatccccgagtacatcataaagtacaacatccggctgatatacttcatatgctcctgtctcttttaacttttccagtgccgtgataattcctcttcctgcacatccaagtcccggtgtcggaccacctgcctctacacagatcacaccctgatagccgatccgcaccatatcttctaatctcagatcctgcttcttttcccggaagaggtccagtacagtcggcaccgcttccccgtgtcttaatgtaatcgtcgaatccgctttcggatcacatccgatctgcatcactttcagtcctttttccgccagtgccacagctacattagacacggttgttgattttccgatcccgccttttccatatactgcaatcttaatcatactatttttattctcctgctttcgtaataatattcgaatacgccgtcttcgtggatatcccgctcagacgaccgatcttgccggataacgtactgatcacatcctgcggtgcatcaatagcaatactgataatattaatacctttttcccgatatggaattcccattcttccgataatatactgtcctgcctcatgaagcagatgattcaatgtctcgatcgcttccggattttccacaatgatagaaataactgccactcttgtatccattgataccctcctaacagatgcgcggcagtaattccccgcccggctgcggaagtaatgcctgcgttccgatctccgtcaacatcactacttttcccggctgctcttcggtcacttcaccgataattgccgcatcctgtgaatatggacatactttcaacgcatccacgatcgtctgtgcctgttctttcggcgccataatcacaagccgtccttcacatgcaagatagagcggctccagtccaagcattccacatacgcctcgtacctccggtgcaaccggaatcttcgaagcatccagacgaatgcctacctggctctgtccggcaatctcatacagcacagttccgactcctcctctggtcgcatcacggatcacatgcagttcatgcgttgcatccatcactgcttttacattcccccagagtggtgcacagtcactcgtcacatccgcatcgattccaaaatcttctctcgcaagaaggatcgtgcatccgtgtcttcctatatctcctgtcacaatgatcgcatcgcccggttttgcaagatttcccgcaacttcgactccatccgtgatctcaccgatacctgttgtcgtgataaagactccgtccacctgcccttttccggcaaccttggtatctcccgatacgatccggactccggcttctttcgccgtcttctccattgcttctgcaatctcttccagtttttccatcggaaatccctcttcgatcacaaatgcacaggtcaggtataatggttttgctcccatacatgaaagatcattgaccgtaccgcagatggaaagctttccgatatttcctcccggatagaatgccggtgatacgataaatccatccgtagatactgccatcttaccggccggaggtgccaggacggctgcatcatccgcagtcagatccggattatcaaaatgtgctttgaagatcatatcgatcagctctgacgtctggtgtcctcccgcaccatgtgccatcgtcacagttttccccactaatttcgcttttcttgcttcgttatccacatactcgttcattttgtccacttccttgctattttccgtctgtttttcttattctcttccatacatataatatgccgaacaggctccttcaccggataccatacatgcacctaccggatgctgcggtgtacagacctttccaaatactttacagtcggatggtttacattttccctgtaatacatccccgcatctgcaggccggattcgcccttccttccatcttcggaacctgatatttctttctggcatcatacataccccattcatcacgtaaacgaaggcctgatcccggtatgattccgagtcctctccattcactgtcacatgcttccatcagcgtatccaccagtctctgcgcttctttacttccttcttctgtcactacacgcggataacaatttacaaagaaaggtttccctttctgaaaatgtgtcaacgcaactgccagtgcagtcagaagttcttttgccgtaaagcctgccaccacaccgcttacaccttcctgcaccagttcttcacaaagctttgttcctgtgatcgcattgacatgtcccggatataagaaaatgtctgcgcttccttttaatgcttcgtatgcctgcggcatcgttttatttgcgatcagcatggaatagttcgtgattccttcttcttttgcttttttgacagacagacatcccgccggagtcgtcgtctcgaatcctacagataagaatacaacctcttcttccggatgttcttttgcatatttttccgcatcggcaggtgaatagacgatatggatcttcccgccttcgcttcttgcatctgccagactcttcttacttcccggcacacgcaccagatctccgaatgtacagattgtcacactcttttccagcgccagataaactgcctcatcgatataacttaccggtgtgacacagaccggacacccgggaccagagatcaattctacctgctttggaagaagtttgcggatacccagacggaagatttcatgtgtatgtgtcccgcatacttccatgatccgtactgcgggaccgtcatatccttctatgatcgctcttgccgttttcttcatctcgccactcattataaaagttcctccatcaactgatctgtctcactgtcatcttcatcggtgatctttgcaatggcgattcctgcatgcaccattacatagtctcccggttccagatcttccagtaattctgaagagacctctctttttgccccccctgcgtctacaactgccgtaccgtcactgatacggactacttttgctgataatcctacacacatgttatttttcctcctgaatatactgcatggcatatgctgcctgtcccagtgcgatcccgccgtcatttgccgggatcaggtgatgtctgagtacggtaaaatgttctttttccagaccttcttccaccattctcaacaacagccgattctggaatacaccgccgcttaatgccacacaattacattttgttttctttctgatctgcctgcagccacagattataaggtctgccagcttttgatgaaagatataagctaatttttcagcctgaatgccttctgttttcttctctgtcagatattttataaggcttcctgtcttcataatcagcctgtcttccggctctttcttttcttcatccggaccgctttcaccatctgccggctcatcaatttcccagatctctttctcataagcttctgcggcaaattcaagtgccatcgaagcctccccttcgaacgtagacctcgtccgaattcccaggatcgcactgactgcatcgaacagacgtcctgcactggtcgatgtcacagcattcattttccgatccgccatggcaagaagcactttgcattccggttcactgcacaggttaagcttctttacgatctccatcgtctgcgctttatcctgtgtctgctgatagatcagtgaaactgcaattcgccatccttctttagcagaaatgtctcctccgatctgaagaaatggttcgatacttcccatccgctcaaatccgtgataatctgcaagcagaagttcgcctccccagatggttccatctgtaccatatccggttccgtcgaatgccacgccgatcacctgctctttccggtcattttctgccatacaggataaaatatgtgcataatgatgctggatctttacgacgggaagtcccagttcttctgcaacaactgtcgagttgtattttggatgcagatcacatgctgcaacttccggttctacctccagaagtgtctcgaatctgtggatcgtctcttgcaacgcttttacagtacggagatcttccagatcccctacatacggggacagatagaaacgtccatccactccgatacagaatgtattcttaagttctccgcctgcggccagcacctgtcctttccacggcattgtcaccatcgtcggaagcggtgcatagcctctggagcgccggatcatataaggctctcccttataaaaatccatcaccgaatcgtccgcccggatccggatcttccggtcatgagaaagaatcagatcacatagttgtgacagttcctccaccgcttctttgtcatccctgcagatcggtgcaccggatgcattgccactcgtcatcaccagataatccggcatctggatcccgtcgtcatatcggaataacaacatctgtaccggagcgtatgggagcatgatgccgactttcggattccccggagcgacagacttgcaaagacctgtactgtctgcagattttttccgtttttcaagtaacaggatcggcttctggtgtccatccaggatctcctcctgtacttcatttaccagacattcctgctttaccgcttccacatcccgcgccatcacagcaaacggtttcaccggacggttctttaatgtccgcagtctctgtactgcttcctcgttcgtcgcatcacagcagagatggaatccgccgattcccttgattgccacgatcccgccatcatggatcatttttcttgtggcaatgatcgcagctcttccccgttcttccctgccggtcagatacacttccggaccacaatcgttgcagcataccggctgtgcatcataacgtctggtcgccggatcctcatactccgaagcacagtccggacacatcgggaattccttcatgctggtccgttcccggtcatatggaagcgcatccaggatcgtaagtctgggaccacagcaggtgcagttgataaatgggtgcagataacgccggtcctttggatcgtacatttctttcttgcattcttcgcagattgcaatatccggcgagacgaatatctccccttttgtcttctcactttctatgatctgaaaatcattgaatttcccgtattcttcctcttttacatcttctgtattgatcttcaatatggcagctctcttcggcggctgcttttccagtctctccagaaaatcttttacacatttttcctctccctgtgcaaagatttccacatagggacctttgttacacacacttccggtgattccggcaaccgctgcatgacggctcacagtcggtctgaagccgacaccctgcacaattccgtagacacggattttctttgttatcatccgttccttccccctgtctaaaacatataggtttcccatatatcctgcttacacgttaagctttcctgacactgcaaaatgcgtcagcggaataaatgtcccttcaaatcccggaatcatccgctccatacacggatctgcaaagattacatcatatccttctttttccaccagcgaaatgaaattatcctcttctttcagactaatatcatctgcggcatcaacattcagatccgttaaaatctcctctttccgcatgaaccatgtcgctgttgtgattgcttctttttccccggttcgtttttcaatctccttacgcactgcatttgcaatcacctgctgctgtacgatcaggatcttctttccttgataattcacttccggcacaagttctgatgccagtggataggcaatctcatatggtgttccgaacttcttttgcagatactgcgctgcttttaatgctgccggagatacgaccacattcttcgctgccagagaagcatttctcacttcatccagtccgtctcccatgccatagcagatggcacgcattccctggtctgcatatactttccggatcttatctgctgccttcaggtcactgacatcctgcggagtcatgccgataatcccgatatgtggtctgtctttatcattcatatcctcagactcttcattcttgtcactgaatttctcgaacaatgcaagatatgccttttcttctcccttgtcatacaattccattccatccgtattcaccgtcaggaccgaaagatccgtcttcttagacagcatccgctccagcgcccggtaatccgtcccgatcactgcgggaaccggagtcccgatcactgctgcaaatgtcacattcagtttttctgccgcatctgcaagttttgcaaccagtctgtcgtctcttccaaggatcgcatccatatcacgaagtcccgcactgaataccgcacttcttgtttcaaaccatcttggctcatcgaagccgcacacatttcccgtacatccgcctgcatcacagatgaccagcattccgccaagttcatataacaccgacactgctcccgactgatccggtgcaaatggtgtcagatattttcttaatcctttcatcgcctacacctccaacagtctttcgcacaaatgtctcacacccgcatatccgtacggctgcacttcttcgttccacatcacgtttttcacatctggatgatagtagcaggcatctttgccaattgtaattgtaaccctgctctcttccggatcataatacagcatggttggttccatattggaaaatacttttgtctgcggactcaattcagataaattcttcaggtatacaaaattctcggcggtcagcgttccatagatctcagccacccggaatccatactttacaagcgccagtgccagttcgaacggatccccgttcatgcattccccgatggcgaaaactgcatccggcttcgcagatttcaagcattttacggaatcaagtgcagcagcctccgcttcatgatcttcgaatggaatccccagaaccttccccagtgcctgatactgcttcgttatcttatcgatctggtataatcttcgcagttcaatgaatggaatcttcaatttctcatgaaaatcttctgctgcgaatctcgcttccggatgtaataccagattgaaatttgcctccgccatcgtctgatattcttcgtaatctttgcatctggatatctcatgcaccgtctttacacctgccttttccagcattccgtataactcacagtcatccataagtggtgagaaaaatcctagcagattcacgacatttccttttttcttcttttgttctaatagagaatataaggactggcgcacatgcaccatcggcggcttccgtccttctcttgtcagcgcatacatataacacggtctgaccggaagtcctgtcttttcttcggattttctgcagatccgttccatatctgttccaagaagcgcatccacacaagtaatgcagatcatcacaaccgacggcttcttcgcaagactgtcacagatctcctgcacggccttcggcactttttttaaatgccttcccgttacgatatccgtctcatccatcgtaagatagaagaaacggtcctcatactgcggcatggaactgatcatggatgtattccgcccacagcatcccggtgccacgatcagcataatcgaatccgggatcgcaagtcccgctctctttacaccaaatccttccgctcctggcgagttaaatgcaagtgtcgccggagaactgtagatcagatgtgtattcgaccggaactgttccggaatgttatctcttccccgcttctgtaattcttctaccgtacaataataagcagtccctctcatacctgttcctcatctttccataatatttccgccagatcatagaagcatttactgatgtccgactccggatttccctcgatcaccgtcttcccctgatcttcataacgaatgatctcatcactgcggggaatctcccctacaatgtcaaatccatgttcttttgcaaatgtctctactttttcggtctcattttcaacatttctgtggttcagtacgattccgaacacccttgcatagcttctgtcctcgaagttctgcactgctttggaaatattgtctgccgcatagagtgccatcttctccccagatgtcacgatcaggactttttccgcataatcttcccggatcggtgctgcaaatccaccgcagaccacgtcaccgagcacatcgtacagaacaacatcgggcttataagtctcgaataatttcagatcttctaataactggaatgtggcaatgattcctcttccggcacagccaagccccggtgtcggtccgcccgtctcgatacataagacatttccgaatccttcttttgcaatatcttccagtttctccggttcttcgtcttcttctctcatataattcatgaccggccttagcggttccccgccgagcagattcatcgtcgaatctgccttcggatcacagccgatctggatgactttcttccccatcgtggcaaatgctgctgccagattggatgtgacggtggatttcccaattccaccttttccgtagattgctacttttaacatgtgtgttcctcctgcatgttctgcttatatatttgttcaaatgaaaaagaacattttgtatacataagccggctctcttttcgttatctgaagccgccttattctgtatacaaaatgctcttttttgttttttccaatgcataatgcgaatacatggtatagaaataccatgtgtcggaaataaggaagttcttaactattcctgctcgggatgatgccttgcagtcagagtcgtccttgtatattctgttttcttttctgctttcctgtttcttattattttatcatacaatattatacttgtgcatcaaaaaaactgttgctccgtgattttttatctctgctatcccttcacacctttccgatacaccatatatgagatcgccgccgtaacagcctccgtgatccagaacgcatgccatactccgaccgctcccataaaacggctgacgatgaatgccgccggaatgatcacaaccacatatctgcataacgaaatgatcagtgaatgcacgccttttccaagaccttccagtgcaccgctgcagataaccgatacggatgaagcaatgaagccaagactgatgactctgagtgccacacttcccgcctgcatcgttaccggattcgccgtaaatagccccatcagctgtcccggaattgccaggcagattaccgttccgaccgtcatcatcacgagtaccaggatcagaccgtcccgaaagatcttatgtacacgcttatgctctcccgctccgtaattatatccgagaagcggacgcattccctgcacgattccatttgccggaaggtacaggaaggtctgcagcttataatagactccgagaacgaatacatagacttccccatagcctgtaagtattacattcaatacagagatcaacagtgacggaagtgccaggttcagacttgccggaattccgatcacgtataacttcttccataatctaaggtccaccttcagatatttctttctgtatttcaccggaagcggattcgcgatataaaggatcagatacagcagtgccgctgctgcctgtccgattcctgttgcaagtgcggctccttcgattcccatcttcgggaatggtccgagtccgaagatcatgaccggatccaggataatgttgatgaccgcacctgacatcatacaggtcatcgactctaccatacggccgactgcctgaaatgtcttctcaaataccagctgccatgacaatgccgtggcaaataaaaatgcaattcttgaataacgcacaccatagtccacgatctgtgcatttcccgtaaacatctgtaaaaacggtctcattacggcaattcccagaatcataaatccaattccgtgaatggttccaagcagcattccctgtgttgctgccctgtctgccatctctttatcctgagctcccaggtaaaatgagatgaccgcattgattccgattccaaatccgatcatcacggcattgaccagattctgcaccggatacaccagtgataatgccgtcatggcatcttcgctgatcctggcgatgaagaagctgtccacaatattgtaaagtgaactcaccatcatagaaagcaccatcggcagtgccattgacaatatcagttttaacaccggctgttctttcatatatgtctgatccatataatttcccctttctttttccacatacataacatatcaattttattatggattttatgatttctatgcactaaaaaagccacatgaccgaacgcatcagtcatgtggcgaaaaatagattgctccagaaaaatccacacatgttttagaggcacattatagcattattttttgacgaatgtcaaccactgatcccgtgggtttttaacaaatcttattcctgttagattatgtatttggattatatattattctccgaggaaatatttaccgtatgcatccgctgctttgatcgctgcacatacagtctccggagttacctcgaatggcatattgtgaagcgtgtcgttctctgcacaggctgccgttgcaactgccatcaatttctcgtccgtcacttctgtgattcccagttcttttaatgtcacaggcagtcccagttcgatacaccagtcgatgatatcttccagttcttctgccggaatgttctccagtaccagctgtgtaatcgttccaaatgcgactttctcgccatgatacatgtgatggcactcatccagtacggtaaatccattatgaattgcgtgcgctcctgcaagtcctccactctcaaatccgataccactcagcaatgtattggcttcgatgactttttctacagccggtgtacatgctcctgcttccaaagcaagttttgcctttactccttctgccatcagcgtatcaaaacagagttttgcaagtgcgattgctgcctgtgtgacctgtccgcccgcacatgtcgttgctccgcttacctgacaggctcttgcttcaaaatatgttgccagcgcatcacccattccggaaacggtaagtcttaccggtgattttgcaatgatctcagtatccatcagaaccatgtccgggttggccggaaggaataagtactcttcgaatacaccagcatctgtataaataacagacagtgcgctgcaaggtgcatctgttgaggcgatcgtcggacaaatcagaaccggtgcttctttataataagcaactgccttggccgtgtccaggatcttaccaccgccgataccgatcacgacatcacagcctttctcattcatgatgtctaccagtcggttgatctcattcttactgcattctctgttgaaatactcgtacacaggtgtgatctcgtatccttcaaatccggtatttacaacgtccccgatacgtttatatcctgattctgtgatcagtacaagtgcttttttgccatacttctgagcatattcacccagcttcttcagctcacctgcaccctgtacatatttacttggactacataaaatctttgccatgatattaccctcctataatcttcacgttttatatgttattttattaacaatctggttttattgtatgctattgatacaattgtgtcaataaaacaggaggaaaacatttacttttcttagtgtcatatcactatgccctgacagtgatctatctcatgctgaataatctgtgccgtccatccggtatatttctgtctctgctttttgaaattcatgtcctgatattctacttcaatctcctgataccgggtgcattttctcacacctgtaagggaaaggcagccttcttccgtctcatattttccggaacgttttacaatcttcggattgaacattgccatattcatgaatcccatattaacggctatgatacatttcttcactccgatcatattcgctgccatgccgacacagccttcctcgtgcgctttcaatgtatctaacaaatccactgcaacctgcttgtccgcctctgttgccggctcggatctctggttcaggaaaaatatgtctttcataatcggtcttatcatgctttgttactctctttcgtatgtgtcttcatataattatagaattcctgatgcagccgctggaattcttccggtgcatgcatcgcatgtctgtaaagaaatctgttgccaaattcactctgatatactctgcttagaacccctgccagcattcctgtcggcatatctttgatcatataaagctttgccgggcacaacattcccttctgggcgatccacttcaggttctttttcatccgataagctgtcagcgtcatcaatttttcatttgcacagattttttccggatgcctgctctggtaataagcatctgccagcggaatgatcacaccaagatgtgatatctgccagtgatgcatttccggaacgatctgatatggaatgtggctttttctaaatatatatgccagtgcttcttccctgctgctctttcttcctccgatctcaccgaatgttgtcggttggattgctcttggcagaagctgcgcatccagaattccgccttcaatgcagccacccgctcccggaaatgccggaatgatcctaccttttccacagattttctcccacctgccatatggtttaatcgtattaatcatcgtgacaacattcggacttttattcttactgatatcttccagcgctttttctacttgattctcacgtacggtcaggaaaataaactggtagcggtcatccggttttaactcactgatcgtcttaacctcaactttatgcgttcttgtcttgcctctgtaccatagaccgtgtccctgtaattcttttaaccgctgccctcttgctaaaactgttacatccagtcccgctttggcgaatctggatgcgtagaagcttccgataactccagcgccgtagattaggatccgcatggtgtattcctccttggtgtatattcgtatgttctgtatggtttcttgtattctttgatatatatcttctgttatagcatctgttgtaattctaacacccggacttttggatttcaacactgtcccggtttatggtgcatctgatcgcattttattttatgttctaaatttgttaacaatttctttctaattccatcacagttttatcacaattcaattctatactagaaattgttcaagagaacaaacactttaaatctttttcataactttttcctcaggactgcactcctcccaaataatgcagtccttttttaatgctaagaaactgtaacttatattctttcaattct

SEQ ID NO: 2951 - DNA, 232 bp, Unknown
  gut microbiota DNA sequence
ggttccataccataagaaacactaagagagtcagaatcacctaaaagcaaaggaactacgctcaaactcggcattcgcctcaaacacattcgcttcgttcctttaacggtgcttctgactctctaagtgtttctaacggcattccacattcacaataattcttatctattgtttccttcaagtcgtgactggcagcggatgttaataaataaaatgcccggaagtgtaaccc

SEQ ID NO: 2952 - DNA, 2406 bp, Unknown
  gut microbiota DNA sequence
caaatttcgaaaacccaacgcataattttgacgcttaactatttccaacaccttcttcacattcactggaacagcttcctactttttattccgtgggtatcaaatgccttacgaatgaaatgcccggaagtgtaaccgtagtggcttccgctgggttacacttccgggcattttatttattaacatccgctgccagtcacgacttgaaggaaacaatagataaggattattgtgaatgtggaatgccgttagaaacaattagagagtcagaagcaccgttaaaggaacgaagcgaacgtgtttgaggcgaacgccgagtttgagcgtagttcctttgcttttaggtgattctgactctcttagtgtttcttatggtatggaacctgaacaagaagccttatctattgtttccttcaaggactgagaagccgcttccaagttaataaattaaatcccaattaaatctcaaaatcttttatgtaatctttcatatacctgatcgaatgctctctgtcttccatctccttttgttgttgacagtattgcatgtctctttccgtccggttctgtcaggaataatgtctttttaatattgccttgttttcctacttccagtttctccatctggttcagatcatatatctctacatccgtatctacggtcactacataatcttttgcaatcagaagctgttcttcttttaattccagtacatccggtgctgccagctgacggtagaactcttctttgtctttcactctgtctagctttctattgaattcttttcttgcttttgtattcaacactgctaaaacaattcctacacatccaataattgctgccagcatgatattatcaaacgagcagatcaatgccaggcacagaagactgatccagacaattattcctgtctgtagtgatttgattctttttgctgtcagatctgcatatttttgctgtcctgctgtttcaatcgccatacttttttctccttttaccgaatcttctactttttccgggtattttcacgctgttaccttgtactctgccgacacttagttaccagcccatggtcttactgtttctttataatatgtaacattttcagaaagaatctttgcctccgcattctttacctctacttctgtcaccgcacagttattgtgcactccgatgccccagtatttttccagcggttcctttctgatgttattcagtatacctgccagcgccgctccatgtgtggtgatcagtatatttccatacacaccctctgcttttttgtacagactttccagaaactcaccggttcttttctttacatccgcaaatgattcgccaccttttcccggtctgaatcccaccggatcatcgaaaaatttctgaaaatcttccggaagttcccaatgatctcttgcgcagcattttccctcatattcaccgaatgccatttccccaattctggcatccgtgatgatcggaacatccctgccttccagtatgatcctcgctgtttcatatgctctcgacaacggacttgaaatacacagatcgaacggaatatcatgcaatccctccgccgtctcttctgccagatgcttgccaaactgattcagtggaatatccacctgtccctgaatcttttttactttattccaatccgtttctccatgtcttaccagataaagtttcattctaccacttcttcctcctaaaacgacctttttcttcattgaccactaatgccaatataactgacagtataccataccttttcatctttttatagtcaaattctgctgaaaatgctataatatttatgcataaaattctttaaaattattgaagtaaaagggagtatcaattatgaaaaaaattgcaagctttacagtagatcacctgcgtcttgttccaggtgtatatgtttcccgtatcgaccaggcaggcggcaatccgatcactacttttgatctgcgtatgaccagtcctaacgatgaaccggttatgaatactgccgaagttcacacgatcgaacatctggccgccacattcttacgcaatcatgcagaatatgcagacaagaccatttattttggacctatgggctgccgtacaggattctatctgatccttgccggaagttatgaatccaaagacatcgtaccattattaaaagaaatgtaccgatttatggctgattttgagggtgaagttcccggagcttctgccaaagactgtggaaactatctggatatgaatcttccgatggcaaaatatctgtctaagaaatatcttacggaggttcttgaaaatatcactgaagagcagttacattatccttcctgatcaaagttaccggtattttcaaactatgagtaatctgtactacaggctgccggaaatca

SEQ ID NO: 2953 - DNA, 171 bp, Unknown
  gut microbiota DNA sequence
tgtttctaacggcattccacattcacaataatccttatctattgtttccttcaagtcgtgactgacagcggatgttaataaatgaaatgcccggaagtgtaacccggtggaggccactacggttacgcaattgctgtttaattcttaaggcatttgatacacacggaataa

SEQ ID NO: 2954 - DNA, 348 bp, Unknown
  gut microbiota DNA sequence
ttggctgtcagatatagtttgttttgaagttgtcgaactttttctttggagttgttagtctgcatgacattctctcactcttaccctctctacaaacatgaatgaagcagggaaccttcccataaactgcgttttcttgcacaatcattatcggtactatgttcccttccgactcccttccatcagaaatacgatttcgcaagcttatacgctttctctttacctttcggtgatgggtagggtctctccagttccgaactacacttttcatacataccgtttcctatataccgagggattcttccgtgctgttttccagtttctccacacgttccatggttttcgcct

SEQ ID NO: 2955 - DNA, 162 bp, Unknown
  gut microbiota DNA sequence
gagggcatgaccaagcaaggtgataggtaggatgaaagaaatatttcttgtatgcagttttgaaggtatataaaaataaaaaagcaagtaaaaaacccttgtcaaaagagacaaaagggtttatactatataagtattcctcgatagctcagtggtagagca

SEQ ID NO: 2956 - DNA, 17292 bp, Unknown
  gut microbiota DNA sequence
aaaataaaaaagcaagtaaaaacccttgtcaaaagagacaaaagggtttatactatataagtattcctcgatagctcagtggtagagcattcggctgttaaccgaagggtcgttggttcgaacccaactcggggagttttaaaacagagattgatttaatctctgtttttttgtataccaaaatatgaaaaaaattcatcgctgtaagaaaagagaaagggaaaacagatgaaatatatattacaaacagatagtgaaagaattgaaataacaattatcagatccagacggagaacattaggtctggaagtaaaaggtgacggaaccgtaaatgccagagtgccaatgagagcaccaagagaaattgtggagcgctttatcgaagaacataaagaatggatattgaagaagagatgcgaatgggggatgaataaagcggtagattcatctaagattctaccggcagtggggagaaaagagggaaagcaaaagatcaaaaaattaatagaagaacgtgtggcatattacgccaggataatgggagtgacgtatcagagaatttccatgcggaatcagaagacacgctgggggagctgcagcagtcagggaaatttgaatttcaataacagattgctatttgtcccggaggaactggtggattacgtagtcgtacatgaactggcacatcgaaaagaaatgaatcattcgaaagcattttgggatgttgtagaaaaatatatgccagattataaagaacgtcgtgcgaaattgagggaatatcatatagaatcataaagcttggatatatagagatttgtaataaattaaaacatttatagaatttgtgcgaaaaatacaaaaataaacaaaggctttgtcatgcaatgacgatgaaatatttttttaatatgttagaatgttaatctgttaggaatagaaataagaggtctggagtaggtgaaatgtttaaagtaagttattttttagaagtcctgccgatcattgcaagtaaggtgaacgttacgtttgaactgacgatagcggcaactatctttgcattggttgtaggtgtaattattgcaattattggatactacaaaattccggggttatatcagttaaccagggtatatgtttctatcatgaggggaactccggttgttgcgcaactatatttcttctattatggaatagcgttatatagtgcaattgtaagaaatatgacaccactcatcgcagtagcggttgttatgagtctgaatatgggagcttttatgtcggaaagtatcagaggagcacttttatctgtagatgaaggacagaaagaggccgcatattctttgggaatgactaattttcagctggttacgagaattgtaattccgcaggctgtacgtgtggcattaccgccattatttaatgacattatcaatctgatcaagatgacttcacttgcatttatgcttggggtgccggatattatgggagctgccaagatagaaggtgcaagaacgttcagatactttgaaatatatgcagctgtaatgttagtttactggctgatcatatttgtacttggaattttacataaattgttagaaaaaaaatgtgcaaatatgtactaattaggatcttaaatgggaaaccattgagatagatttattattaataaggaaaaagaggagataagtattatgaaaaaacgtgtattagcagctttattagttactatgatgactgtaggaacagttgccggatgtggaagcagttcgaaatctgatgattcagataagaagacaacttcagatgcaaaaagtgatgataaaaaagattctggaaagaaagtaactgtagttacttctggaacaggagagccatacagccttctgtcagacgatggaaaatggacaggtatcgatgcagacatgtgggatgagattgaaaagcgtactggatgggaagtagaagtaaagcaggcatcatttgacgctatgtggggtgaactggatacaaaccgtgtagatgtagttgcgaactgtcttgctgtaaaaccagaaagaacagataaatacaatgcaacaattccatactatggagattctcagtgtattatcgttaatgatgattcagattacaagacagctgatgacttaaaaggaaaaacagtcggatgtacaaatggacaggcagcacagacaattattgaagatatggctgcagaaaaaggatttactgtaaagctttatgaagacagtgcagtaggtatgaacgatctgaagcttggaagaatcgatgcatatgcaaatacaacaacaaatgtaaacgcatttacacacaacaactcagatgcaaaattccgtttctttgatgagcagctccttgctaacaatgtagcttacttccttccgaagacagatgacggagagaaacttacaaaagaacttaacgatgtaattcaggagatgctggatgacggaactgtagcaaagatcactgaaaagtggatgtatgctgacatgacaaaattaattcagaaataagcataagtcaggaagattgaaaaaatatgggaacagaaacacagctggttaagattgaacatttatataaggaatttgatgaaaatacaaaagtattaagtgacatcaatctgacgatcaataagaatgaagtaattgctattttgggaccttctggtaccggaaaatcgacgttactcagatgtctgaactatttgactgtaccgacaaaaggaaagattacgattggtgatatagcagttgatgcggaaaatcattcgaaaaaagatgtgattgagctccgtaaacattcatcaatggtatttcagggatacaatttatttaagaataagacagctctggaaaatgtaatggaagcgttgaccgtggtacagaagaagtcgaaagcagatgcagagaaaatcgctttggaattactggataaggtcggaatgagtgagagaaaagatttctacccgtctaaattatcgggcgggcagcaacagagggttggaattgcaagggcacttgctgttaatccaaatgttgtgttatttgatgaaccgacgtctgcacttgatccggaactggtaggggaagtattaaatacgatcaaatctcttgcagaagaaggaacgacaatgattctggtaacacatgagatcggatttgccagagaagttgcaacgagaatcttatttatggatggcggaaagattgcagcggatggtacaccggaggagatcattgatcatccggagaatccaagacttcagcagttcctgaattttgttaatcgaaaatagaatgtctgaaagacctgcacgagtttggtgcaggtcttttttaaagagcaaagaatgttagtaaaaggagtagaagaatgcaggacataagtgacagaatcaaacaaatcgcaaaagaggcagaaccggaacttatcagtatccgaagagaactgcatcagtatccggagcttggaatcaatcttctgaaaacgcatgagatcatcagcagagagttaaaaaagattccaaacctgaaggttcgtgaacacatggcaggcggatatggaattattgcggagctacagggaaagaaagcgcaggggaagaatatccttctgcgtgcagatattgacgcactgccgctggaagaacaggtggactgtgattataaatccacccatccggggaagatgcatgcatgtgggcacgacggacatgccacctggttgatcggtgctgcaaagatactggcaaggctcacaggtgaattcggaggatgtatcaggttcgcatttcagccgggagaagaggtcggacttggagcagatacgatgatcttggaagataaggtactggaagaaccgaagatagatatggcttttgcagcacatggatggccttcggtacaaagtggtaagattggaatcgtaagaagatatgcgttcggatgtgtaggcggatttcaggttaagatcacaggaaaaaagggacatgcatcatggccggaacagacggtagacccaattgctgtggcaaatgaaatctatcagcatataccgtctatactgacacgtacaattagtggaacggaacctaagatcctttctgttacatatatgctggcaggagagaatggcgtaagaaatattattcctcaggaatgcgaattcggcggtaccatgcgagctgccaaaaaagaagtacttgaaaaaatgggacaggaactggaaaaagaaataaaggcagtgtgtcaggtgtatggagctgcttatgaagcaaagattgaaatacatggtggcagtgtgaagaatgccccgggattgttaaatggggtaaagaatgcagcagcagatgtactcggaaaagacaatgtatatatcattgaagaagataatcttggaggagaaaattttgcagaatatagtagcagagttccatctgtatatatgttcataggaataaaaccagaaggcagagcagagatacctggattgcacagtccggaatatcgttttgatgattctgtactttcaggagcagctgcagcatttgcaagtattggaatcaaaggatgccagggagaacttgaagaagaatagaacggaaaactgaaaaagaagagaggaaaaaaagatatggaaaaattaatatacgtagacagaagaaatacaaattgtaataagtgggatggacagtacaagatgttcggagaagaagggctgcatgcgatgtgggtggcagatatggatttccgtgtaccagaatgcgtcgttgaagccttgaaaaaatatgtagaatccggcgtttacggatattataaaataccggatgcttattatcaggcatttataaactgggaaaaggaacaccatggatatgaagtgaaaaaagaatggattcgtttttctccgggggttgtagcaggatttcactggctggtgcagatgctgacagaagagaaagatgctgtgatcgtaaatacaccggtttattatccgttcctggatgctgtaaaaaataatcacagaagattgatctgttcggatctgaaagaacaggatggggtatatagtatagattttgaagactttgagcggaaaatagaagaaaacaatgtaaagctgttcatattgtgttccccacataacccggcaggaagggtgtggaaaaaagaagagcttaagagattatttgaaatctgtaaagaacatcaggtatatatcatatcagatgagattcatcaggatctggtgttcggggaacataagcatattccatctttgtcagtaggagattatgacaagatcatggtatcgattgttgcggcatctaaaacatttaatatagcgggagcacagaattctatggtcattattccggatgaagaacttcaggaaaaatgggatacttatgtaaaaggaaaccgggtgctgggaggaaatgcatttggatacgtggcagctgaggctgcatatgcaggtggaggagaatggctgcaaagtgtgttaacgcagattaatgagaattatcactatttgaaaacagaattagaacagaatctgccagaggcagttgttacaccgctggaaggtacatatctttgctggatcaatctcggagcatatgtgaaagcagaagatatgaaagaaataatacagaaaaaatgccatctggcagtagattttggggactggtttggtggagaacattttggaacctttataagaatgaatctggcgacatctagagagaatgtagaaatcggtgtgaatgcgctgattcagaacttaatgaaaaaatagttatagagattatcaataagaacaaagtacatagtcctgattttctatttgacagaaagaattttctacgagaaaatatctttatatagggagtgaatggatatgtatgaaatagatgtctgttataagattatttttgaagcaatgctggaagaaaatgcactggaaaagatagcagatagaatcagtaaatatacagctgcagaagtaatatttgtgtcagggtctggaaagatcctggcatattcgcatgcctgtgaaaatgggaaaagagagtgtatacagcaaaagcatattacgcagaaagaatatgaacattacaggaaatatgggtatgacggagaaggacagctgatggtagaagaagtggagctttccggaagattcaagggatatattgctgttatatataaagaaaaaaatgaacagattttttacagagaactggtacaggtaattggacaggcggtaaaagaatatctggaagaagaacagaaaggttatctatatgcgcagccttttggaaagtcggttaccgcatggagtctgttgcatgaagagacactgcctgagaatatggaagaaagaccagagcctcggtatataggtctgttacttcaaaaacaagagatacaggagagggagcttttatgcatagaaagtcttgcagagatttattgtgtgtatgaggatcaaaatgaactctttttattattttccggagtgagtgggaagaatcttgcagagatttatgatagaataagggaacagaaaataccatgcagtgtcagtgaaccatttggagagttaacgtggtgtgcggcaaagtatagattgctgaagagaatgtcactggctggcggtaccatgattgatccaactatgaaacgagagaaggaatggtcggtgcagggcttatatacatatacgttaccgttacttgaatctgcaggactcagcgattacaggattctaagactgattcaggaagatgaagaaaataatacagatctttatcatactttaaaaatgtatcttttgaatggaaataatgtgacagcggcagcagagaacctgcatattcaccgcaatacgctggtatacagattaaaacagataaaagagtgcatggaaatcgatattaatgacaatgggacagcaagagaattactgtcatttatgatgatgtatgacattgcaaggagacataaataatgaagctgatacaggatttaccggagatatttgaagaatttggagagaaaaaaagagaggcatttcttgaaataaaagagtataaagataaaggcattccagtgataggaatgtactgtgcatattttccaacagaacttgctatggcagttggtgcgattccggtaggattgtgttcatttgcaaatgagacgattccggcggcagagagagaccttccaaagagtatgtgtcctctggtaaaatcaagttatggatttgcgatcagtgacagatgcccgttctttcactttgcagacctggtaatcggtgagactacctgtgatggaaagaagaaaatgtatgagctgatgtcggagtttaaaccggtacacgtgatggaactgccaaacagccagtcagaaagaggactggccttttggaaaaatgaaattatccgcacaaaagaatattttgaagaatttttccacaaggtgattacggaggagatgattcgtgatgcggtgcatctaaataatcagatccgtatgtctttgaaaagtctgtgtgagctgatgaaactggatccggcaccggtacttggtgaggatattcagaagatggtgcagggaagtaaatatcggtttgattttgcaacgacaccagcaattgtaaaagaagtcagggagaggatcctgcgggaatatgaagagggaaagcatctgggaaaaaggccgagaatcttggtaacaggatgcccgatcggtggggacagtttgaaagtcattcgtgcgatagagaataacggtggtgtcgttgttgctattgaaaactgcagcggagtaaggacactggcgaatccggtggaggaagatacggacgatatctacgaagcaatcgcaagaaaatacctttctaccgggtgttcgatcatgacaccgaacgacaacagaatagatctgatcggagaaatcattgatgaatatcatgtggatggtgtcgtagagatgattctgacaggatgtcattcaacgggagcggaatctatctatatcagaaagtttgttacggaggaaaagcatttgccgtacatggcaattgatacggattattcgactgcggatcaggcacagatctctacgaggcttgaagcttttctggagatgatacagccaggagaagaaagcagagtagatattaattattgctataaaatagtattgaacggaatcacacagaaaaaaacggcaaaagagatattggaagaaacctggaaatatacaggaattccattaggaatcagagtggatatagagggtagcgaagaatggttcgggacagaaaaagaaacaattgataaaagagaggaacagaggctggaaagagcatttccggaaggcgggggtgccgtaatggcaatcgttccggaagaggtccggaaagaagatgtcacaaaactattagaaattctggtcagaagctattccatgaaaatgcaggcaaaacgtacagatgaaaaagaaattccggatttcttatggatcatagcagaagaatcaaaagatgccgcatatatcgagaaagagttaatgaaagaaaaggagaatctttcagatgtgaaagtgcattattatgaaggaaatgaaatatttatttcagggatccaggggaaagaagtcagaaaaaatgtgattaccatatgcaagcgttgtatggagacggcagaggaaagaatcttaatcgggaatggctttcaggatctgaatcagaaagaagaaaacagaaaacttcaacaatacgtatttgaaatcgctaagaggaaaaattcgagagaatccgttctgcttgtagaaaattattatcatgaactcgcagtatcttatatcagtgacaggctgggagaagactctttatatctggacgaacttgaaaagatcaaagaagaggaccggaataaaggaagagaattatatgagactttgtactggtatctgagaatgaaacgaaatgttgcacagactgcagccaaactgaaaatccaccgtaataccctgcttccaagaatagccagaatcaatgaactaatggatctggatgataaagatggattggaatgtgagaggattctgatgacaatggaaatagagaaacgaaaaatagctgatgcataaagcattggcttttttagttacatttaaagtttttctggtaaaatgcaagacagaaaatagcaacaatagcaataataacagcaacaataataacaacagcagcaacagtgaaaatacatccggaagcagcgaatcagggagaacaggaaatacatcaggcgtaacagaaaatgcatcaggtgaaagtggaaatggatcagggacaacaagaagttattaatgtagatgaactggatatcacctcggttaagaccgggcagacagcaaaaattacattggatgctatcgaaggagaagaatttgaaggtacgatcacgagtgtatcgtcagaagcttccggtggaagcagcagtgaaaaatatccggtagagatcacatttaacaagacggatgatatgcgttaagatatacggggtagttttattgctgtgctttcgcatgccataataattaaaaagcggaatcttaaccattgcgatactgaaattctgagttacacacaaaggttaagattccgctatcacattcattatcattggctgattatgttttgtttctgctttaaatattgcttcgtataagtacagactgcaaagcattttccacacagatccgtatcaatcccggtgctttttctcatgatctgacgctgctttttataacatgcagagacagatacgatatcttcgcgtggcatacccggacgccacaatgtatttttcagtgcatgtgcagggcaataccggacgcaggcatgacaggcaccacactgagagcgtgtgatcggagcatcgcaggttaacggggcatcggtcagaagagaagaaatccttacggcagatccatattgtggtgttaccagcagacagtttttgccgatccagccaaggccggctctggtggcgacagtcttgtgtggcagggaactatggttgtccgaatctaccattatccgatcggttgtcagggcataagcatgatagcctctggagatcagatattcctcaccggcagttacgatggcatttagcttgtcgttcaaagtagtataaagctcgtagtattctctggtcggagcaagctgaagatctttgatgatatgcttcggtagaggaactgcgactgcaattccgaccggatagtcagaagatggaactgcggtcagatccccaattccgaccaaagcagcaccctgcgagattagataatctctgaattcttttgtgggattcataaaatccctcctttcagaacatttccgttcattgacttattgtacattcaattttacaatagaatgcagaagaaagatagtgggaaaggaaactattatggaaagtagaatgacggaattaatggaagcgattcaggaaagtgaaggacaggccgaacgcagggtgcttactttgctgggaggcagatacatttctgaaaaggcactggtcataggtgggaaaattgtctgggaaagcaggaaaaatggttattttcatggatatacagatgagataaagaatattacagaaagtggaatcacctatattggaaatgagaaagtattttgcgatacattgggacaggaaaaacagattgtgatctgtggtgccggtcatgtgtcgattccggtgattaaaatggcagtgatgatggactgcgaggtaattgtactggaagatcgtccgatgtatgcggatcatgcaagactggccggggcgtcacaggttatctgcgaaccattcgaagaagcactggacaagatacagggaagtgcggatacgtattttgtgatcctgacgagaggacaccggtatgaccagatctgtctggagaaaatagccgcaaaagagcatgcctatatcggtatgatcggaagccgcagaagaacagcactggtaaaacaaagtctggcggaaaaaggcgtggatcaggaggtactggatgcagtgtatacaccgatcggtctggatatcggagcgcagacaccggcagagatcggagtggcaattattgcagagattattgaagtaaagaacaggaagaaacggacttatggatattccaaagaaattatgcgtgcgctgactgctcaggaaccgtatccggaaaagaagataatggcaacgatcattaccagacatggttccgcaccacaggggctgggaaccaaaatgctgatatacagagatggccgctgcgttgggacgatcggcggcggatgtatggaagcaagagtcatccagattgccagacttatggcagcaggagagggagaacaggcaaggatctgccatgtagacatgaccggaaatgaagccgaagaagaaggtatggtctgtggcggggaagtggatgtatttctggaaatcgtctaagcgcggaaaacaggatcatcggaggcattaaaaagatgatagaagtagaggtaaaaatacccattgaaaatatagaaaagataaagcaaaaattgcttgaaacagggttcatatatcagaaaaccgttgtggagacggatacttattttatcagcgatcactatgatatgcggaagaaggacaaggcactgcgcatccgtaagacggagaatctggatacgggagaagtaaaagcacagcttaactgcaaaggaccgaaattagaccaggtatccatgaccaggaaagaaacagagattgatatctatgagccggaaaagatggaagacattcttaaagaacttgaattttatccagcgtcttgcagagtgaagaagacaagaggttattatataaaagatcatatgacagcggctgcagataaggtagagaatctgggtaactttctggaattggaaataattgttgcaaaagaagaagaacgagcaggtggattggatatgatatatgagctaatgagaatgttgggatgcgaaaagacagagacggtaagggattcatatttgtcaatgttagaaaaacgaggtaactagcatcagaaagatccatgagggacagataaaaagccaaatttcctgtccccgtggttacccgtggttattgacaaaaattatcgataagtctatactaaccttacgagttgagaaaaattatcagtaacagtggaaataataccactgcctgtagataaatttggaaggaagtacagacgatgacattaaaagaattaccaatcggcaaaagtgcaacattgacagtcgtaggtggagaaggtgcattgagacagcattttctggatatgggacttattccgggggcagacgttaccatggtaaaatacgcaccaatgggtgatccggtggaacttcgtatccatagttatgaactgacactcaggcttgcagatgcggaaaagatagagattacagatgtccgtgatgagattaagattaagaatcagattccgaaagagaagattgatcatccgggacttggagaaggtggaaaatatcatgaaaaagcagatgagaatccactgccggatggaacaacactgacatttgcactggcaggaaatcagaattgcggaaagacgacactgttcaaccagctgaccggcgctaatcagcatgtgggaaatttcccgggagtgacagttgaccgtaaagatggagtgatcaaggaacacagtgataccctggtaacagatctgccgggaatctactctatgtcgccgtattccagtgaagagatcgtgaccaggaactttgtgttaaatgagcatccaaagggaatcatcaatatcgttgatgcaaccaatattgagaggaacctgtatctgaccatgcagctgatggagctggatattcctatggttctggcactgaatatgatggatgaggtgcgggacaacggcggttcgatcctggtaaatgagatggagcaggaacttggaataccggttattccaatctcggctgcgaagaatgaaggaattggcgaactgatcgagcatgccgtgcatgtggcaaaatatcaggaaagtccggggagacaggatttctgtgatgcagatgaccatggcggagcagtacacagatgcctgcacgggatcatgcatttgatcgaggatcatgcaaagaaggcagacattccggtaagatttgcggcatgcaaactggcagaaggggatgaactgatcctggaacagctcaagctggatgagaatgaaaaacagctcctggagcatattgtaaagcagatggaacaggaacgtggacttgatcggtccgcagcaattgcagatatgcgttttacatttattgagaagatctgtgatgctacggttgtgaagccgaaagaaagcaaggaacatctgcgaagtgcgaagatggataagatcctgacgggaaaatatacagctattccatgctttgttgcaattatggcggctgtattctggctgacatttaatgtgatcggagctgcgttgtcgaatctgctggatatgggaatctcggcacttacgaatctggtagatggtgcgttgacatcctggaatgtcaattccgttattcattcgctggtaatcgatggaatctttaacggtgtgggaagtgtgttaagtttccttccggttatcgttaccttattctttttcctgtccattctggaagacagcggatatatggcaagagttgcatttgtgatggataaattactccgtaagatcggactttccggacggagtatcgtaccgatgctggtaggattcggatgtacggttcccggtgttatggcgagcaggacactgccttcggagagagaccgtaagatgacgatccttctgacaccatttatgagctgctcggcgaaactcccgatttatgcattttttacggcagcatttttcccaaaacaaggagcagtagtgatggtagcgttatattttggtggaatactgatgggaattctgatggcgctgcttttaagaggaacgatgttcaaaggtgaggccgtaccgtttgtcatggaacttccgaattaccgtatgccgggagcaaagaatgtagggcagcttctgtgggaaaaagcaaaggactttttgcagagagcatttaccgtaatcttctttgcaacaattatcatctggttcctgcagacatttaacttacacatgaatgtggtggcagattccaaggacagtatcctggcagttgtggcaggaatcattgcaccggtattccttccgcttggtttcggaaactggaagatttctactgcactgatcacaggatttatggcaaaggaaagtgtggtatctacgctttcggtactctttggaagtacggcagaactgacgggagcaattacgccggtggcagcagcaagccttttggtcttctgtctgttgtatacaccatgtgttgcggctattgcatcgatcaagagagaacttggcgcaaaatgggcggcatatgtggtgctgggacaatgtatggttgcgtggatcgcagcatttatcgtgcatctgattggtacgttggtaatgtaaagaggcataaaaaacctcctgtggatggaattagatatgttccattcacaggaggtttttgctgtatatattaaattacatgctctgctttggctatttgttcctttatcttataccttccgctgcgccggagacttgcgaataaagagcctgaaatattgtgccatacactgaagattgccccaggcagtgtggcaaatgggtttgcagcaaagtttgcggtggcaagtgtgatagcaagaccgctgttctgcataccgacttcaatcgcaagggcagttgatttatcatattccacatggaagatgcgtccggcaagtaatccaagtcccatacctgcaagattatgtaagataacgatacagagtacgaggaatccggatgtcatgattttttccgcatttactgcgacgattccgctgatgatcatgacgatggatacaacggagatcagcggaaggatgccggataatttctcaatatgtctgccgatcagtctacggagaaggatacccagaagaaccgggatcagtacgacctttacaaccgagatcaccatcccaggaaaagatacctgaacccatgcaccggcaagtagatataccagaagcggcgtcataaccggtgctgccagagttgaagtgattgtcatgccaacagaaagtgcaacatcaccacctgcgatataagtaatcacattgctggcagttccgccggggcagcatccgaccaggatgacaccaagtgcgatatccgttggcagatgaaggaggaccgagagtccccatgcgatcagcggcataatcgtatattgtgcgataaatccgataatgatctctttgggtctggtaaatactactttaaaatctccgatatgaatagtcagtcccatgccgaacatggcaacgccgagaaagatcgaagtatagtttgtagtccatgcaaatccatcacgccagaagaaggcaatgacagaaaagcagataataatcattccgatatatctggtaagaacagagctgagccgtgataatacctttgtaacatgctccatatcttatacctcgtaactgaaattgtcgatgagtcgtgtctttccgatgtaaactgccatagcaaccaggacatcagcatttacggagtcaacaggctgcatgctgagtgcatcgaccatggatacgtaatcaatacgtgccagtggttcactgtttatgatttcacacatcggttctaatacttcagatgcggtgataccattccggatcagttcctgacctttctttacagcttttgaaaggcagagggcagctttgcgttcttcgcaacttaagtatgtattacgggaagatttggcaagtccgtcttcttcacgtacgatcgggcatccgacaatctggatatcaaagttcagatccagaaccattttgcggatgatagcaagctgctgtgcatctttctgtccaaagtaagcacggtccggttttacgatgttaaataactttgatacaacggtacacacccctttgaaatggatcggacgcgtcttgccgcacagcgtatcagataaagtatcgatactgacaaatgcgtgtggatcatgatacatttccaccggtgacggacagaagatcagatctgctccgatgctttcacaaagtgcactgtcgcggtcaaagtctcttggataagcttccagatcttcattcggtccaaactgtgtcggattgacgaaatcagatacaacaacgatatcattttcctcgcggcagcgacggatcagactggcatgcccctcatggagatatcccatagtagggacaagaccgatggtcttaccttcttttttccagttatttacgagttctcttgttttttcaattgtgttagttacctgcattggtattctcctttattcgttataattcggagagttctcttctgaatacactgtgatctcaggtgattgcatgtaaaaaaatacgttatgataattgagtatctttttattccatgtcttttaacagtccgtgacgttcataattggtcacgcggcttaccttgttctcctcatctacgaatacaaccgcaggtttgtgttcttttgcttcatccggcgtatactgtccgtaagccatgatgatgatcttatctccggtactgacacatcttgcagcagctccgtttaagcagatcattccactcccacgctgtccgctgatggtgtacgtttcgaaacggcttccgttgtttacatcaacgatctggactttctcatattcgagaattccagcagcctccagtaatgcttcatccaccgtaatgcttcctacataatcaagttctgcctgaacgacagtagcgcggtggatctttccttttaataattcaagtgtcatctcatatatcctttccttttaaggaaaaaaattcagccagaatacatctggtcctgagtcttatttcctgaaaatataagctcatttttgttgaaaattatgagattccagtgcttcagttccgagtatggttctgccagggacagataccgtctccgctgttcattataaaaagacagaaaaggtatgtcaatctatgtatacgaaaaaaaaaa

SEQ ID NO: 2957 - DNA, 30310 bp, Unknown
  gut microbiota DNA sequence
tttcctttgcaaggagtgcggcaccaagagcacctgcatatcttccatgttcggtaggagatactgtctgtccgagtttctgtgagagaatctttgtaaaataggtgctgttactgagtccgcctgtcaggatcactttctccggcaggtttttcttcatggcaagctgagccaccttgtttgcaactgaatctacaacaccggctgcgatatcttcccgcttctgtccctcaccgatatagttgatgacctcagattcggcaaataccgtacacagggaactgatcggaagaacagttcctttatccgccatatcaaacagttcctgcagtgtaacacccaggcgatttgccataatctccaggaatttaccggttccggcagagcacttatcattcatctggaagtcctgcaccataccgccggacaccaggatgatcttggtatcctgtccaccgacatcgataattgcacattcatcaccggccatctcacggccgcctcttgcgtggcaggtaatctctgtgataacatgatcagcaaaatctacggcaacacggccatatccggttgcgacaactttcgaatcgttcgataacacatcaataccatcttccagtaaacgatccttgatcgtctggcaggtttctttgctgctccatccggtcggcagtacaaaatgtagatcatgatctccttttacagcaactttggatgcggtagatccgatatcaattccaatataattcataaatactttcctcgcttaacactaattttttaacaatatttgtcccgccgtggattaatatcccgttcaatggcggcaattttcaaaatctcaatatgattctcgtcgatgaatttccggatcgcgtccagatcctcttctctgacgagcagtgagataccgcagcacttactggctacgcgcggcgtaggagcgatggtggccttgataccggcttcttttaatatcccgtacagacgcatcccattgtcatggttgggaaataatacataatgctgtgtcttttgcatgatctgttacctcggttacttatttgttatctaacatttcgataaatgcactgattcgggtacgaagctgtccggcgtcgctgtcggtgtaatccgtttcgattccaagaacagggataccggcttctttcattgctttctctacgaaatatccctcggtatcatacaggttacagaacttaaggttcacatcgatgataccatcaactttgtactctcttgcaagacgtaagatgtcatcaatacgtccttcattcggtgtaaagcatgcacagttgatcttcatgtatctttcggccagagccatgtactggtcttccagggttgtcttgctttcatcaacaagattttcgaaatatctggttccggtacacatctcttcgcagacaatcgctgctccgctggtctctacaatattatgaagcttccagtttggaattgcaagaggagttccggtcagcatgatacgtttggttccggcaggaacaacactcacaccgtctttcactctctgatccagctcgtcgcataacttgtttgtcatctgtgtaaatcttgcaggatcatcatagaatgcaatctgagagatcagaagaacatcacatccgctgatcggaagattctcattcttgcgcaggttgtaaagacgttccagggctttccgtttgttattaattaaggtaatgctttctgccagtttttcagcagttacttcatttccggtaaatttttccacgacattcttaaatgtctcgatttcttctgcccaggcccggatatctttggcgcgcttcatttgtggaagatccatgacatgtaacggtacatctttagaaagaatctcccatgctttcttcttaccatcgcaggttgtctccccaatgaacatatctgcgatacggaagaatggacaggtacggtcaagacgtgcaccgacagatgccttgatcagtggacaggtattggcaggcaggactttctctccgccaggaacccagaactgggatccgccacataatccggtagcaatggcatctgctgcgaatacgatttcatccggtacatatacacagaatgtaccgaatactttcccgccttttttctgatgttcgatcagttccgcaggacggataccatgaatatcggcaaccaccatattataatagtccatagaatccggacggttttcctgtgataaaaatacatccccgaatgcctgcggcagtactgcgcagagctggtcatgcaggtctacatccatcccaagttcttcccacattttacgataatcagccattttaaaatacctccttatagtgtaattgatccgatgttatcgataaaataaccgtaacacgtttggaaggccagggcaatgcataccggaggaattggttatagataattcacaagttcaataagatatatttataaattctatactgagaataattctcgcaacccgtcgatgcagcagtcaatttcttctgtggtattgaagtggctgaaggcaaaacggatagttccatgtggcatggtatgcagggcctgatgtgccatcggagcacaatgaagaccgactcttgtcatgatcccgtaatcctgttccagagaaaatgcaatctcggcattatcatactccggaaaatcaagagagacgacagcaagccggtcctgaatcgtctgttttcccgcaatatgtgcctgtgggatttcctgtattcttttaagaaaatatccggtcagttccattttcttctgatggatagccggaatgcctgcttcttccagataagtcagggcagcgtgaagtccgatgatacccggaagattcatggtaccgctttcgtacttgtccgggagatagtccggcataaggagtgaatctgactggcttccggttccgcctgcgatcagaggcgtcagttcatgatccagtgcttccgatatcagaaagccgccgataccctgaggaccaagcagacccttgtgtccggtaaaagcaagaaaatcaatattgcattcctgcatatcgatatcgacagaaccggcactctgtgcagtgtctacggcaaagaacagatgatgacgccggcagatatcaccaatctcccggatcggcagaatggttccgcatacattggaagcatgaagcatgatgactgcttttgtctccgggcggatcagtgcttcgacagattccggttgcgttgtaccatctgtttcagcagggatcatcgtgtaatgaatgtcctgtgaagcaagctggcagagcggacgcatcacggcattatgttccaggctgctgaccagtacgtgatctccgggtctcaggagacctttgatcagataattcagggaataagtgattcccggtgtgaatatgacatgtctggaatccggcgcatggaaaagtctggcgagctgcatacgtgtgagaagcaccagactttccagctcatacgcaccttcataatttccccggttgatattgaaggcgccggattctaaaagttctgacaaagaagaggcaacttggggtgctttcggccaggatgtgctgccattgtcaaaatatattttttgattcatatcgaaaacctccataagatattatatagttcgtgtagtatttatcgatattgtaacagattaccggatggaaaatacagaggattatcaaaaataatatagctttgtacgttatcatagagaaaacaaatgatgattatagataaaaatgatagaatgaaccgatttattaatatttcctattaggtaaaatgaagtgtgagtggtatgatagtcttatgaaaaatttatcaaaaaatcaggaaaaatacggaggaattttaatatggagttaattaaagaactgccggaagtgttcgaagaatttgccgagcagcgtcagaaatcatttatggcaatgaaaggattaaaggatcagggagttccggttgtcggagcatattgtacttatttcccggcagagatcgcaagagcaatgggagcagttacggtaggcttatgttctgtatccgatgagaccattccggatgcagagaaagacctgccaaagaacttatgtccattgatcaaatcaagctatggatttgccaagactgataaatgtccattcttctatttctcagatgtagttgttggggagacaacctgtgacggaaagaagaaaatgtatgagtatatgtcagatttcaaagatgtatttgtaatggaactgccaaatacacagagtgagatggcattacagctgtggaagagtgagctgatccgtttcaaaaaatatttggaaaagaaattcgacgtagagattacagatgaagctgtattagaggctgtaaaagaagaaaataaagtaagaaaagctatgaaagagctgtatcacgttatgacacttgaccctgcaccgatcaaaggcggtgacctgttcaaagtattatacggaagcggattcaagtttgaccgtaaagcaattccggcagagatcgaagcaatgagagagaagattgaaaaagaatatgaagaaggaaagagacttgataagatgcctcgtattctgatcaccggatgtccgatcggaggagcaaccgagaaagtgatccgtgcagtagaagacaatggtggagttgtagtagcgttcgagaattgcaacggagcaaaatctttcgataaattagttgacgaagagaatccggatgtatatgatgcactggcaagacgttacctgaatatcggatgttccgttatgacaccgaatccaaacagactggatctccttgaccgcctgatcgatgaattcaaggtagacggagttgtagagatgacacttcaggcctgtcatacatataatgttgagtcactctctatccgcaaatttgtgaatgagaaaaagggaatcccgtatatcaatgtagagacagactactcacaggctgatatcggacagctgaatacccgtattgcggcatttatagagatgctgtagggcagagctagatccactcattgaaagctgatcaccgtagcgcaattgggatttaattcaggaaggctgtggatacccgaaccggaataaagcttgaaaaggtgttcctgttcaggttccatcggcgggtcaattctaaaggggcaaaattctgctaaaagcaggctttcaaaatttgaaactcggcatacgcctcagacagtcaaattttgaaaacctaacgcagaattttgccccttaagaattaccaacgcctctttcacattcactggaacgccttttcaagctttattccgtgtgtatcaaatgccttaagaattaaacagcaattgcgtaacggtagtggcttccaccgggttacacttccgggcattttatttattaacattcgctgccagtcacgacttgaaggaaacaatagatatggattattgtgaatgtggaatgccgttagaaacaattagagagtcagaagcaccgttaaaggaacgaagcgaacgtgtttgaggcgaacgccgagtttgagcgtagttcctttgcttttaggtgattctgactctcttagtgtttcttatggtatggaacctgaacaagaagccttatctattgtttccttcaaggactgagaggtcgcttctcagttaataaattaaatcccaattaaattccaattaaagtagaaaagatgatataattataatacaaatatgcccacacggaggaaacgtatatgagtgaatttgtgaccttaaaagatgtcaggaagatatataagatgggggaagttgagatcatggcagcagccggaatcgactttgagattaagaaaggggaattcgcagttgtagtcggacccagtggtgcaggaaagacaacggtgctgaatattcttgggggaatggacaccgctacgtcgggacaggtgctggttgacggtcaggacattgcaacgtattctacgaagcagttgacggcatacagaagagatgatatcggatttgtctttcagttctataacctgattccgaacctgacagcactggagaatgtagaactggctcttcagatatgtaaggatccaatggatgcacaggaagttttggaagaagttggactgggagaaagactggataattttccggcgcagttgtcgggaggagaacagcagagagtgtcgatcgcaagggcactggcaaagaatccgaagctgttactctgcgatgaaccgaccggtgcactggattataatacaggaaaatccattttgaaattattacaggatacctgccggaacagtggaatgacggtgattctgatcacacataattcggcaattgcgccaatggcagaccgggtgatcaagattaaaaacggccgggtggataagatcatacagaatccgcaaccagttccggttgagaccatagaatggtaaaaggcagggacggaagatggcaaaaaagataacacgtaagaatttttatatggagatccgccatagtttcggacgctttatttctattctttttattgttgcgctgggagttgcattcttttccggtatccgggcatctgagccatctatgaagattaccggagatgcgtattttgataagtcagatctgatggatatcaaggcggtcagtacacttggaattacggaagatgatgtgaaggcggtcagaaatgtaaaaggagttggaaaggcagaaggagcctacagtgcggatttcctgaatataaagaataagaagcaatatgtactccacgtgatgtccggggtgaaagatatgaacaagattacggtcagtgaaggccgtatgccggaaaaagtgggagaatgtctggtagatgatcagatgaagtataaagtcggagagacgatcaggcttaagtccgggacggatgacaaggtgacggataccctgaaggtggaggaacttaaggttgtcggaaaagggaattcaccgtgttatatagcattgaatcgcggaagtacaacaatcggaacgggtacagtcagcggatttgtagtagtgccggagaaaacatttcatctggatgtatatacggaaatgtatgtgcgggtgcagggggcggaagatctgactgcatataccggtgcatataaacagaaagtaaagacagtcaaaaaacgattgaaagcaatcacagaagaaagaggaaaaatccgtaaggaagaactgttagataaagcgaatacaaagcttgaaaaggcgcagaaaaagcttgatgacggaaaagctgaatcagagcagaaactttcagacgcagaaaggcagattacagacggagagacgcagatttcacaggcaaaggagacactcgtaagcgggaaggcgcagatggaagatgcgagggagaagatccgtgcgaagcagcaggaattggatgcggcaaagaaaacatatcaaaatggccttcaacagctggagcaggggaaaaagcagtacgaacagggaaaagcagcttatgattcgcggtatgcagaagcacaggcacagatccagacaggagaacgggggttggctgtatacagaacagaacttgaccagggatgggatggatatcagacacttctgaagaacatagaagcattaaaagcacaggtgtcaggagagacagaacaggatcaagagctgtcgcagaaaatccgggagctggaagcacaggcacaggaaacaaagcagacactggatgcgaaagaacaggattaccagacaaagaagagcgaactggacacagcaaaacagcagcttacgaatgggaaagcagagctggatcaggcaaaagcgcagctggatgcaagtgaaataaaacttagcagtgcagcggcaagtatagaatccggacagaaacagttagatgcaggaaaagcagagctggaagcgcaggagcagacgttgaaaaatggtgaagtggaaattgcggaaaatgaagcaaaacttgccgatgccaggaaagaatatgaagaaggaaagaagacatcggaagcagaaattgcaaaaggcgagaaaaagcttgctgatgccggtaagcagatcagtcagatcaagaatccaaaatggtatctatatgatagaagtacactgacagaatatgatggattcggagaaaatgcggatcgtatgcgtgcgatcggaaaagtattcccggttatgttcttccttgttgcagcattgatcagtctgaccggtatgacacgtatggtagaggaacagagaatagagataggtaccatgaaggctttgggatacggaaatttttccattgcatcgaaatatctgggatatgcattccttgcaacggcaggaggaagtgttcttggagtactggtgggagagaaaatccttccgtatattattatctatgcatatgagatcatgtatcctcatattccgaagatatatgtaccataccacatgagttatgctgtgatggcatccgctgcctcgatcgcatgtactatgggagcaacacttgcatcctgctataaggaacttgcagcggaaccggcagtgctgatgcgtccgccggcaccaaaaaacgggcggagagttttcctggaaagaatcggattcatctggaaacggatgaatttcacctggaaatccacgatcaggaatctgatgcgttataaaaagcgtttctttatgaccgtattcggaatcggcggttgtatggcgctgatgctggtcggatatggagtgagggattctgtatatgagatcgcagatattcagtatgaagagattcagctgtatgatggacatatattctataaagatgatgtgacaaagacagagaaagaagagctaaaggagtatctgaaaacagattcagatattcagagttatatggaggcagatatgcggagtgtgaccgcatccggaggcggtaaaaaactcagcgtgtaccagtgcatattaggtaatccaaagattgcagaaaagtatgtggattttcatgacaggaagacgaaagaatcgtatacactcaccggtgatggagtaattgtcagtgaaaagacggcgaaacttctgaatgtaaaagaaggggataccatcaaagtgaagaagggaacggagaagagtgtcactgtaaagattgcgcatatctgtgaaaattacatgggacattatatctattttacaccgcagtattacaagaaggtatctggaaagacggtgaaatataattgtatcatgttccgggcgaagaacggatattcggaggaccaggtgaaaaaggcgggagaaaagatcctgtcaaaagatcaggtactgacaatctcatacctgcttgatatcagagatcagctggatgatatgctggccagcctgaatctggtgatcattgtactgatcgtctcagccggaatgttggcatttgtggtactttataatctaaacagcattaatatcacagaacgccagagagaacttgcgactttgaaagtacttggattctatgatacggaagtagcagaatatgtattccgtgaaaatatcctgctgacgttgatcggatccgtggcaggtgttgtattcggtaagattttgcatctgtttgtaattcagacagtagaagtggatgcggcaatgtttggccggagtatttatctgaagagttatatctacagttttttatttacgatagggttctcattgttcgtaaactgggtaatgtattttaaactgaaaaagattgacatggtagaatcattgaaaagtatagagtaaagtttataaacggtttataaatttcacagaattgttagcactctttttgaaagagtgctaattttctattgacttttaaaataagcagtattatcatatcacttagatgaaaaaatgtagcaaaaaggtgtctgccgacagaagaagcagtaccttttgtcactaatatgatagaaatataaaaagtagaaataggagtgatttacaatggcagcaaagaaaggtagtttgtcaatcagcagtgaaaacattttcccgattattaaaaaatgggtatattccgatcacgatattttcgcacgtgagttggtatccaacggatgtgatgcaatcacaaaactgaagaaactggatatgatgggtgaataccagttgccggatgattataaaccggcgatcaaagttgaagtcaatccagaagaaaagaccctgaaatttacagataatggtcttggaatgacagccgatgaagtagaagaatacattacacagatcgcattttccggagcaacacagttccttgaaaaatataaagataagacaacagaggatgatatgatcggacacttcggtcttggattctattctgcattcatggtagctgacgaagtacatatcgataccctttcctataaagaaggggcaaagccggtacactgggtaagcaacggcggaacagagtatgagatggaagaaggcagcaaacaggaagtcggatccactatgacactgtatctgaatgaggacagtctggagtttgcaaatgaatacagaatgagagaagttctggaaaaatattgttcctttatgccggtagaaatcttcctttccaaggcaaatgcagagcctgaatatgagacgatcgacgaagcagatctgaaagatgatgatgaagtaatcgagcatattcacgaagatgccaagatggaagaaaaagagaatgaaaacggcgagaaagaaatggtagagacagaacctgccaaagaaaaagtaaagatcaaaaaacgtccggtttcattaagtgatatccacccactgtggacaaagcatccgaatgaatgcagtgatgaagattatctgaacttctaccgcaaagtattcatggattacaaagagccactgttctggatccacctgaatatggattatccatttaatttaaaaggaattttgtacttcccaagaatcaacacagagtatgattctattgaaggaacaattaagttatacaacaaccaggtatttatcgcggacaatatcaaagaagtcattccggaatatctgatggtattaaagggagtcatcgattgtccggatctgccgcttaacgtatcacgtagcgcattacagaatgacggatttgtgaataagatctctgaatacatttccaagaaggttgcagacaagctttccggaatgtgcaagacaaagagagaagactatgagaaatactgggataacatcagtccgttcatcaagttcggatgcctgaaagatgaaaagttctgtgacaagatgaaagacgcggttctgtttaagaatctggatcacaaatatctgacattgaaagattgcatcgaggcaaatggaggaaccgtagaagatcagaatgccaagacagatgatcagaatactgagaacaaagaagaggataagacagttatttattatgtgacggacgagatccagcagagccagtacatcaacatgttcaagaaccagggcatggatgcggtaatcttaggacacaacattgattcgccgtttatcacacagttagagcagcgtaatcagaatatcaagttccagagaatcgacgccgatgtaacagcaggtgcaaaggaagaagttgccgaagaagagaaggaagcattccagaagaaatctgacagtctggtagagattttccgcaaagagcttggaaacgagaatctggatgttaaaatcgagaaactgaaagatgaaaatgttgcttctatgatgacgttatccgaagaaaaccgtcgtatgcaggaaatgatgaaaatgtatggcatgaacggaatggatatgggtacaacaagtacactgattctgaatgcaaatcatccgctggttcagtatgtagttgaacataaagacagtgagaacacaagtattatctgcaaacagttatatgatctggcaatgctggcgcataagccgctcagtccggaagagatgactgcgtttgtgcagagaagtaatgagatcatgatgctgcttacaaagtaaagatttgaagttaagattggcggaatgaaaaataagagccgtgcggctgtggaagtgaaatccatggcggcacggctctgtttatatcggaaactgcagatcagtagtcaccttcaatggatctggattttaaaatgttttttacttcctgatcccattctctttcgatggatttgtccatggtgaaagtgttcagagaagttccggtgatacattgtaagtgatgtccatcgtagtggaagttcaggtacagcccccggatctcttccgggcggtatccggtgagaccgtgggcggtcagaaagtacgggacctgatcttccggaagcgcaaggacaatcttgaatcccaatggagtgcgtttaccgcggatgatctggaagcagaagtctcgggttttattccagcgggagtaggtttcttcaggtttttcatcaaagaagtcttcctggagaaagccgctgatggtaaatttgttgaaggtcgtgatctcgccttctatgaaagaaaagttgtcgaaagtgtcttttaagagcagatgtgacatgcaatttttggctgataactggtatacattcataaggaaaacctcctgttaatctatatgatcattttcccctttcaggtataatgaaatgtattcaacattatagcacaaaagacgacagaaaagaggatataaattgacattcaaaaagaaaaacagtaaaataaattggatatacatatttaggatcaacagagaaacgaaagaggagaagatttcgtggatatagagagtaaaacttcaatttatgaagaaaaagaagagactcaggaggtgaatcctgaggagcagaaaagtgaaataaaaagtgagaaagaaaaagaccgggtacttcagactgcagtgatcgttgcggttgttattctggtgattggcgggattacggtggcgcgcaggctcagtaatccacagaaggatacaaagaagggcacagagatcctgaagacgatggatgagatggatgtgtctaaggcagataaaaagattaaggagttagaaacgcaggaacgtgagacagaacaggatgcagaagaacagccggcaagcgaaaaatttgcagattgtctggtcctgggggattccatcacacagggattgtacgaatatggtgtgctggatcaggcaaatgtacaggcagaccgtggagccggtgtgtcggcgggggataatgaaaaactggcagatcatattgccagggcaaaagagatgaaaccgtcagtattattcctttcttacgggatgaatgatgtcggagcgcagaatggagaggcggatggattcataaaagcatacaggccggtgatcagagatctgaaaaaatcactgccggatacgaaaatatatgttaacagtatacttccgacagcgcagattgcaattgatcagaattctgtctatgcaaaaattccggagttcaatcagacattaaaaaaattatgtgaaaaagagaaagtaacatttattgataatacagagctggtgaaacaggagtattatgccggtgatggaatccatatgtcaaccggttattataaagaatgggtaaatcatatggcggaggttgctgaattataatgaaaaacggaaaattagacaagattaacctgttaaaatatttgatggtagtcctcctgatcatttatgtagtatttcttgtgacccgggaaggggataataccgtatccgtagatacgattgaaaagaatatcacaaaagccgtaaaattagaaggaatgaaaaaaggcacaacacaggatctgaaaaaatattacagtctgaatgccaatgattatgaaggaatcagtctgtatattccggatgacgttatgagtgtgaatgaaatactcgtaataaaggtaaaaaacgaaagtcagatcgagacggttgaaaaggcagtggaaagtcgtgtaaatacacaggaaaagaattttgaaggttatggtgtagaacaaacaaagctgatacatgctgcaattattgagaccagaggacgttatgtgctgctggcagtttcaaaggatgcagaccgtatcgatgcggcatttaagaagagtatttgataaaaaggaattagagagatgttatttagcagtattgtttttttatttacatttttgccggctgtgatgatcttatattatttgttgccggtaagattccggaatgtgatcttattgctggcgagtctggtgttttatgcatggggggaaccggtatatctgtttctgatgttactgtccatattgtttaattatttcagtggactggatattgcaaggaatctgcaggataagagagctgcaaagcggagcctggtttttaaccttatcattaatttggcagtacttggattttttaagtatgaagggtttgtattggacacattgaacgggatacttccggtacatatttcttatcatgcactgccgcttccgattggaatatcattttatacattccagatattatcctatatcattgatgtatatcggggaaatgtaaaagtgcagacgaatcttcctaattttgcattatatgtaacgatgtttccgcagcttattgcgggaccgatcgtgcaatatgcagatgtagatgaacagcttgcgtccagagaaatctcaaggacaaaattcggagaaggaagtatgtattttatccggggacttgcgaagaaagtattactggcgaatacctcagggatgatttttacagaggtaagcggacttgcgaaagataatatagccgtgatgacggcgtggcttggagcttttgcgtatatgttccagatttattttgatttcagtggatattcggatatggcgatcggactcggtaagatgtttggatttgaattcaatatgaactttaactatccatatgtgtctaagagtattacggagttctggcgcagatggcatatttcgctgagcagctggttcagggattatgtgtatattccattgggaggaaacagggtatcgaagatcaaacacatcaggaatcttctgatcgtatggtttctgaccggattatggcatggagctgcatggaatttcgtggcatggggactctattatggggtgatcctgatcattgaaaaatatctcctgtcgccggtactggacagacttccggacgtagtccgtcatatttacagtattgttctggttgtgatcggctgggtattgtttttcagctcttcattcggacaggcagcagattatatcagagtgatgtttggtgcaggtgcacatggttttgcagacagagagagtatgtatcttcttacaagcaacctgatcctgtggctgatcctgatatttggctctacgccgctggttcatttcagatacgagcatatgttaagatcaaaaaaatggaatacaacaatcattaacagtgtggtatatgctgcgttgtttattgtctgtattgcatatctggtaacggagacctataatccgttcctgtatttcagattttaggagcaaagatgagacagtcgagaaagaaatgggaaagaaaaagagaagaacagagaaataaagtaattgcattgctgtttattgtaatgatggttatcttctgcgtggtaaatattgcaactgctgacagggaattttcggcaaaagaaaaccgggcactggaacaaagaccgggacttacgatttccggtattgaaagcggaagatggatgaaacagtatgaatcttatgtatcggatcagtttgcgggaagagatttctgggtagctttaaagagccgtattgatctgatcgcaggaaaacgtaaggcaaatggtgtatttaaaggaaaagatcattatctgttagaggatatagccaggccggatgaagaacaattgaaagcaaacctggatgcaatgaaaaagtttcgggagacatataaagatatcccgatgtatatgatgctggtaccgaatgctgcaaatatcgagtcggacaagttaccgtattgcgcagtgacagaagatcaggataaacagttccagaaaataaaggcttcgctcgggacagcttttcagtgggtaaatgtggaagatacattgaaaaagcacaaagcagaagagatatattaccatacggaccatcactggacgacgctgggtgcttactatggatatcaggcactggctgtggctatgaaactggatacatcaaaagcactggctatgaaaccctatgcagtgacgaattcatttaacggaaccttgtcgtcgacaagcggatatgaaacagactatcatgagccaatctatatatacgcaccggatgatctgaaaacagcaccacaggtagttgtaaataacgtgaatgaaaaaaagaaaacagcaacgttatacgatacatccaagctgaaagaaaaggataaatatgcattatttcttggcggtaattatcccgttctggatatcagaacgacggcagatacaacagacagactgttgcttgtcaaagattcctatgcgaatagtgtaattccgtttctgacagcatattacagagaaatcatagtggttgatccaagatattattatgatgatatcagagaagttatgaagaaaaataagatcacaagtgttctgttcctgtataacggtaatacatttgtgcaggataacagtatcagcggggtattgcagaatgattagattgaacaagtatttaagcgaagccggtgtctgttccagaagggaggcagacaggctgatcgagtcgggaattgtgactgtggatggaaagacagcagctcccggcatgaaagtagaagacggacaggaggtccgtgtcggaaaaaaagtggtcaaaagcaaaacggaaaaaacggtcctggcagtgtacaaacctgccgggattgtttgtacagaagacaaaagggagaaaaagaacatcatccggttcctcaattatccggtacgcatcacttatgcaggaagactggataaagattcggaagggcttctgatcatgacaaatgatggagatctgatcaacggcatgatgcgcgcaagatatgcacatgagaaagaatataaggtcagagtaaacaaagaagttactccggaattcattgagaagatgagccggggagtacacatcagagacaaagaaaagaatctggatgcggtgaccagaccctgtacagtaaaaaagaccgggaaacatacattttccattattctgacacagggattgaacagacagatacggcgcatgtgcgaagcactcggatataaggtggatgtgttaaaaaggatacggatcatgaacgtggaacttggagatctgaaaccgggacaggtaagagaattaacagaacaggagttaaaggaattatatgggacagtcaaagaacgagagaatgctggaattagtagaacttctgaataaagcatccagatcttattatcaggatgcgcaggagatcatgagcaactacgaatatgacagattgtatgatgaactgcagaatctggaaaaagaactgggaattacattgtcgaacagtccgacggtaaatgtcggatatgaagttgtcagtgaactcccaaaagaaaggcatgaaagcccgatgctctcactggataagacgaaagaagtagaagagcttaagaacttcgttggcagtcagaaagtattgatgtcctggaagatggacggattgacgatcgtgttgacttatcgtgacggaaagctttataaagcggtcacacgcggtaacggagaagtcggtgaagtggttacaaacaatgcgaaggtattcaagaatgtaccggtgcagatcgcttaccggggggaattgatcttaagaggagaagcggtgatcggatatcatgacttcgagaagatcaatgaagagattgaagatgtagatgcaaaatataaaaatccaagaaacttatgcagtggttcagtcagacagctcaataaccagatcacggcaaagagaaatgttatgttctatgcattcacgttagtgcaggcagatggagttgattttcagaattccagagcttgtcagatggaatggctgaaagcacagggattcacgacggtagaatatcatatggtgaccagagatacagtagaagatgaagttgctaaattttcgtcagagattagtaaaaatgatttcccttctgacggacttgtgctatcatatgatgatatagcgtatggaagatcgttgggaagaacagcaaaattcccgagagattcttacgcattcaaatggcaggatgagatcagggaaacgattctgcgtgaaatagaatggagtccgtcaaggacaggactgatcaatccggttgcaatctttgatccggtggagctggaaggaacgacggtcagccgtgcaagtgttcacaatatcagcattatggaagaactggaacttggcatcggagataagatcgaagtttataaggcaaatatgatcattccgcagattgcagagaatctgacaagaagcggtgtgaaagatattccggaaagatgtccggtctgtcagggtgagacgaagatcagacaggtaggaaatgcgaaagcattatactgtatgaatccggaatgccaggcaaagcatgtgaaggcatttgcattattcgtaagcagagatgcacttaatatagaaggattgtcggaagcaacactggaaaaattcatttccagaggatatatccatacatttgccgatatcttccatctggaccggtacaaagacgagattcagggaatggaaggatttggagaaaaatcgtacaggaaactgatcgaaagtgtggaaaaagcaagaacaaccacgttgccaagagttgtctattcactgggaatcgcagggatcggacttgccaatgcaaaggttatctgcagagagttgaaatatgatgtagaagcccttttgatggttacagaagaagaattaaatgagatccagggcgtgggagaagttctggcaaaggcattcaccggatatttttcagatgcaaagcatgtggagaatttcagaaagcttttagaagagttgacaatcctggaagagacatcaacaaagaaacagatttttgaaggtgtcaattttgtgatcaccggaagcgtaacacattttgcaaaccgaggtgaagtgaaggaattgattgaaagtctgggaggaaaggtgacaggatcggtaacgtccaaaacgaattacttgatcaacaatgatgtaaccagcacatcttccaaaaataagaaagcaaatgaactggggatcccgattatttccgaagagacatttctggaactggtgaaccaggaagaatcatagaaccaggataaaacagagtgaaagatacgacaaaaagtaagaaggagagaataatgaccaatcaggacgataacaatcagaaaatcgaaaaagtagaagacgtcgaagtagaaacaacaaagaagacgtcagattcggatgataagaaacaaaatgatgatgagtatgaaaaagtatgttttatatgcagacgtccggagagtgctgcggggaagatgatcgaacttccgaaccatatctgtgtctgcaatgactgcatgcagaagagttttgatgcaatgtcgaatggaccgatcgattacagtcagctgatgaatattccgggagtacaggtattcaatatgtctgatatggagcagagtattccaaaacagcagaagatcaagaagaaaaaagaaggcgaagaatacaagccgttagtagatatcaggaatcttccggctccgcacaagatcaaagcaaaactggacgagtatgtggtaggacaggaatatgcaaagaaagtgatgtcggttgcggtatataatcattacaagcgagtggcaacggattcgatggatgacattgagattgagaaatccaacatgctgatgatcggaccaacaggttccggtaagacgtatctggtaaagacactggcaaggattctggatgttccgcttgcgatcacggatgcaacctctcttacagaggcagggtacatcggtgatgatatcgaaagcgttgtatccaagctgcttgcggcagcagataatgatgtcgaaaaggcagaacagggaatcatttttattgatgagatcgacaagatcgcaaagaagaaaaactccagtcagcgtgatgtgagcggtgagtctgtacagcagggaatgctgaaacttctggaaggaagtgatgtggaagttcctgtcggggcaacgagcaagaatgcaatggttccgcttacaacagtgaatacgaggaacattctgttcatctgtggaggtgcattcccggatctggaaggaattatcaaagaacgtctgaccaaacaggcagcgatcggattcggagcggatctgagagataaatacaataacgacaaagagattcttaaaaaggtcgcaacagaggatttgcgtgtattcggtatgataccggagttcctgggacgtctgccgattgtatttaccttacagggtatgagtgaagatatgctggtggaaatattaaaagagcctaagaatgcaattttgaagcaatatcagaaactgcttgcattagacgaagtaaaattggaattcgatgacggcgcacttcatgcgatcgcaaaaaaagcaatgaagaaagataccggagcgagggcgcttcgtgcgatcatcgaagaattcatgttagatatcatgtatgaaatcccgaaggatgacaatattggagaggttgttatcacaaaagaatatattgagggaaccggaggaccggtaataatgttgagaggtcaggaagtaccaaggcttcaataatacattttacatatagaatgctaagagagctgtcaatgacagctttcattatgcaatgacacataagactttacttgaggaagaatggaggagaaaggaatggaggaattatcagctattccagtttggctctgcataccctttgcagggctgttgctcagtattgccgttatgcctctgatcaagccggactggtgggaaaagcatcagccgcttgcagttgcgttctggtcggtactgtttattgttccgtttgctgcaaagtacggaatgtttacaatgggagagacggttttggaatgtgtggtaaatgattatctgacatttatcattttattgttcggtctgttctgtgtagcaggtaacattacaattgacggtgagtttgccggatcaccgaggatcaatacggcattgtttgttctgggaacactgctttccagcgtgatcggaacgaccggatcaagcatgcttttggtacgtccgtttattaagatgaattcgtggagaaaaagaaagagtcacattatgatcttttttatcttcctgatctctaatatgggaggatgtctgacaccgatcggagatccgccgcttctgatgggattcatgcgtggcgttccgtttttctggagcctgaagctgtttcatatactgatctttaacatgatcattttactgacgttattctattttctggatagaagagcttacagaaaagatattgcggaaggtagaaaaccagatatcagagagcctggaacacacgttagaattgtaggacttcataatctgatatatgttgcaatgattgtcggagctgtaatcttaagtggaatgcttcctggtatgtctgcattccagaatgcggacggaacggtaaaaggaatccatatccttggagaagtgacgcttggattcccgtctgtgatcgagatcgtgatcatccttctggcagcatttttatcatttaaaacgacaaaagaagaagtacgtatccgtaaccattttacctggggggcaattcaggaagttgcggttctgttcatcggaatatttatcacgatgcagcctgcattaatgatcctgaaggcaaatggtgcggaacttggtatcaataaaccatttgaaatgttctgggcaaccggagcactgtcaagttttctggataatacaccaacgtatctggtattccttacaacggcaggagcacttgggttcaagagcggtgttgtgacgacacttggttcggttccggttaagatgctggaggcaatctcctgtggagctgtatttatgggagcaaatacctatatcggaaatgcgccgaacttcatggtaaaatctatgtcagatgaaaatggtgtgcgtatgccatcgttcttcggatatatggtatggtcactgacatgtctggtaccggtatttattatcgatatgctggtattctttttgtaaggggaggtgcggaacatggaaaataagaataaatactatgacatagcggaacggatctatgatctggacggagaagtctatgaatgtgtaggttcttctcttggccgtacctttacgggagacaaacgtacttgtgtagacagtcttgtgaagctgatgcgtacaaagccacaggggcatctgctcagaagtgagcttgcgctgatcagtaacatggcacgtacgatccgtaaggatgaagaccgatccagactgatgagaaaatatgatgagatattaaaagaaatcgcagaactgccggcaggttttggaaaagtagagattctggatgaaaacagggcaaagctaaatacatcgaacctgcgtcagaagttttcaaaggatgatcatctgatcatctgtatcggaagaacacatggaagtgcgggtaacgatattggatttgcactggcggatgcactcaggatcaactattacgatgcagagatattcaatgaagtattgagacgtctggacgcggagaaagattcggttgtagatgtggcagatctgggaacaaatgagattgagaataaatatcagggatccggacggacgctgaaagaacgtctgaaagattttgaccgttatcatggtctgacaaaagaagatgcaatcttctttaatcagagtgatctgatatgtaagagggcaaaagaagaagatttcattgttatgggacgatgtgcggatgtgatactggcaaataatcatattccacatatcagtatctttattacagctccttttgaacagcgtgtacacagagtcatggaagtcaataatctagatcataaaaaagcagaacgccttttgaagaagattgaccatcagcattcgaaatattacaatttctataccggcctgaagtggggagatgctgtgaactatgatatctgttttaacagtgcaagttatggtatcgaagaatctgtggagatcatcgagcgtatgctgaaccagcatacaaatgcataaaaatattaatgaatgacacgaagtctttcatatacataaaacaaatgtatatgaaaggcttttttcattggaagatagatgtaaagaaaagatattatcggaagattactgggattttattatctcgccatacagggaagatgagttagaaggagtggatacggaaaagatgtgtatccaggagctggatttcggatataaaagtgtgtcgttagacagtcggatgttacttcccttatccttgcggcagtactggtacggtgcgatccccaagtgctatacacttctggatatgcagccgttagatgcagccggaattattacgctgcagaattatccgacgctgcagcttatgggagaggggattatgatcggtttcctggatacggggatcgattatacccatccggtattccgtaatcttgacgggacaacaagaattgcggggatctgggatcagacaattcaggatggggatccgccggagggctttctgtatggaacagagtataccgaagaaagaatcaatgcggctctgcattcggaaagcccgcaggaactgatctcttcggaagatacagatgggcatggaacatttgttgcaagtgtggctgccggaagtgcagaaagcagtggacagtttcttggggctgccccggaggcggtgatcgcgatggtaaagctgaagccggcaaaaaaatatctgaaagaattttttgctgttgcagaagatgcacactgttatcaggaaaatgatatcctggccggacttcggtatctgaatgaactggcccgcagacgggagatgccgcttgtgatctgtatggcaatcggaaccagtttcggagggcataatggtgactctttgcttgcaggagttctggatggctatgcattgctgagaaaccgctgtgtagtaacgggaaccgggaatggggcagcgcagagacatcattattacggaacatttacggagtcacagaatacacggacagcggagatcagggtaggggaaggggtgaaggcttttgtgacggagttatggagtacccttccgaacattgtgacagtgtcgattacatcaccttccggagaacgtaccgggcagattccggtacgtctgggatatctgtttgattttgtatttgcttttgaacggacagctgttacggtggagtacagacttctgcaggagaatagcgatgcacagctggtgtttatccggctgcagaaagcagtaccgggaatctggaaaatagaagtaaagcctgcgatgcagacgaagggggagtttcatatgtggctgcccatgagagagtttctggatggagaagtatattttctggaatcgaatccggataccacatttacagaaccggcaggaggggagcatacgatgacggtgtcttattataacagtcaggagaatacggttgatattaattcgggcagagggtatactagagatgaaagaatcaaaccggattatgctgcaccgggagtagcggttaccggtgcggtaccgggcggaggattcaaagaacgcaccggttcaagtgcagcaacagcaattgcggcaggtggctgtgcactgatcatgaagtggatcagtgatcagccgggagcgggtggagcatcagccagtcaggtaaggaatgtgatcgtgatgggtgcgcagaagcttccggcgatagaatatccaaatacacagtggggatatggaacgatgaacctgtatcattcactggatattttaagacggctgtaaagaagaacgagataaggagaggatacagatggcagatttttttgaagaattcagcagaagagtttcagatgttgcgagtgacatcactaagaagacaggagatacactggagattcagaagatcaaaagtaatgtacgaactttaaagagagcaaatgaaagagatcttgcagatatcggtcgtatggtatatgagaagttccagagtggggaagtatccgacatggattacgtaacgctctgtgaagaaatcgaaaaacgcgaggaagagattgaaaagcaggaagaagagatcgtgaagatccaaggagagatatagatgcacacaagcataccgggtgcggttggaacactgtttgctctggatatggctgtaaaacaatacatagaagaaaatgtaagtgagaaagaggaaaaaaacttttgcgggacaaaagtcctgatcagaaaagtatacaacaaaggctttgcatttaattccatggattccgaaccggataaggtaaaaaaggcgtctgtgataacgacggcagtgatcctgatgctgacattggcagaatcattccgggaaggtcataaggtgactaagacagcatggacattactgagtgcaggagctatcagcaatacgtatgaccggatcgtcagaggtaaagtcgtagattacattggtataagatctgaccataagatattaggtgatgtaacagcgaatttggcagatgtctatatcctgataggatctgtcctgatgtggatgagaagaatcggaaaacgataacaggaaatagaatattggaaaaaggaaaacactatactccatcttctttcggatagaatatagtgtttttgtatttacacctttatatgagaatgaaattaaaatcaggcatgaaaaaagcgggtgatgggaatcgaacccacgtatccagcttggaaggctggtgttctaccattgaactacacccgcaaaatatattataaatcggggtgacaggattcgaacctgcgacctcctggtcccaaaccaggcgctctagccaagctgagccacaccccgatattgtgttgtgtccttaagacaagatgtatcatatcatgaatggagataaaatgcaagcagaaattgaaaaaagataaataaaagggatcggtatctattcagcaaaagaatttttagaagaatttttagaaaaagttaagttgtatctgcagacatgctgttgtataattaagagcgatgtcgaaaaattctttcgaacagatgatgtagaagattttgaagattttcaaaaaagaggactgaattgacagatgaaagtgatgaatcatacagaagaacagcaaacagaaaacaagacttctctttcaaatggtgcaaaaagaaatcggattttcatatatatagcaatagcaggtgtgatagcagcagtgataactgctgcttttactggctattatcttcatcaggagcgtgcagaagagaagaaacaggaagaattattaaaagcagagaaggcaaaaaggcagaaagaaaaaaaagctaaaacaacggaaacagccgaacagaagttagagcgtgtccgcagccaggcagaggaacagggagtaccacagagtgtgatcgaactgttggacaagaatgcagagacggtagattttgtagcagattatgagaagaaaaaggacaagccttatgcagatacgatagaggaagatctttcaaatggagaaattccggaacttttacaatgggatgaacgctggggatatgcaccgtatggaacggggatcgtagcgaccagtggatgcggaccgacctgtatggcaatggtggcagcaggactgaatcaggatgcatccattactccggcgaaggtagcagcatatggaaccgaacacggttatgtagatgaggaaaataatacctactggaggttcatggatgaggcaggtgcgaactggaatctgaacagcgtaggtggcatgctttcagaagaacaggtaagcgctgaactggcacagggacatccggttatctgcagtatgggaccgggagactttacgcagatcggtcactttattgttctgaccggctatgagaatggcactgtaacggtaaatgatccgttcagcattaagaatacgaatacggcatggacatttgccaatatcaaagatcagatcaaggcaatgtggacattttcaaaaaaataagatgctcaatgtggaaaagttctgaaagaacagaagtatgatgtggaaaagtcttggattttatgagaaaggagaacagaatatgagatatgactttacaaaaataatagacagacatggcaaagatgcgattgcggtggatggcttgggaaagaatccgggatttgcgcctgagccgccaaaagacggattcgatgtaatcccgatgtgggtagctgatatgaattttgagactgttccgacaatcccgaaagcaattatggacagagcggcacacccggcatatggatacttcagcccggtggaagagtattatgattcgatcatccgctggcacaagatccgtaataatgtagaaggactgatgccggagtatatcggatatgaaaatggagtattaggcggggtgatctcggcactgacagcatttgcggcaccgggagatgcggtacttctccatagcccgacttatatcggatttacaaaatgcattacggagaacggatataagattgtacatagtcctctgaaaaaggacgaaaagggaatctggcgcatggactatgaagatatggatgcaaaattaaaagccaacaatatccatgtggcggttttctgcagtccgcataatccgaccggacgtgtctgggagcgctgggagatagaagaggcaatggaagtatataagaataacgaatgtgttgtgatcgcagatgagatctggtcagacctgatcttaaaagggagccggcacattccgacacagtcgatcagtccggatgccagaaaccgtacgattgcattctatgcaccgagcaagacttttaatctggcggggttggtaggaagctatcacattgtctttaaccgaatgttacgtgaccgtctggaggcaaaatccagaaagtcacattataatacgatgaatgtactgtccatgcatgcgctgatcggagcctacgaggcagaaggatatacctgggtgaatgaactttgtcaggtattgtcggaaaatgtagagtatgcggtcaatcatatccgtgactattacagaggaatcaatgtcagcaagccgcaaggaacttacatgttgttcctggactgtgaggattggtgtgaagagaattacaagtcactggatgaattgttgaaagccggctgggatgtcggtgttgcatggcaggacggaaggccgttccatcaagaatacggaatccgcatgaatctggcgttgccgctcagcagagtgaaggaagcatttgagcgtctggatgagtatgtatttcatgtgtaaagagccgggaatgaaagaagtgagggaaattggaaaatattattgtatcatttaatgtaatcgcacctgtattttttcttatggtgttaggatatctgttagtcaattatacctctctggcagaccgtaagcttacaaaacaggccaatgcgattgtttttaagatatttttgccgtgtatgttattctataatgtctatcagagtgacatcggggcggagatccacagcaggattaagttgtgtatctgggcggcaggcggacttctgatcctgttcgtactgctctgtctaatcgttccaaaggttgtgaagcaggaaaatcagcagggagtcgtgattcagggaatctttcgcagcaattacgtaatcttcggagttgcggttgtgcagaatatgtatggagcaaaaagtacaacaacggcggcgattttaagtgcgatccttgtaccgatgtataattttctggcagtagttgcactctcgattttcggagaaaagagggagacagactggaagaagattattcttgatattgtgaagaatccgctgatcatatcttcggtgttgggaattatattttcgctgttgggaatcagacttccgacggcagtggatacaacggttcaggatctggcaaagctgtcaacgccgattgcattcatgatcctgggaggagatctggacttctcaaaagtgagaggaaacttaaaagttgcatcggtggtactgacgatcaagcttgtgattttaccacttattatgattccgatgatcgttatgatgggatacagggatgcggatctgttgtcaggcctgctggcatatcagactccggttgcggtatccagttatatcatggcacaacaggcgggagcagatggacagcttgccggacagctggtggtgttctcatcggtgctttcgatctttacgttgtttgtgacgatattgatattgcggacgataggattgcttgggatttaatttattaactgggaagcggcctctcagttcttgaaggaaacaatagataaggcttcttgttcaggttccataccataagaaacactaagagagtcagaaccacctaaaagcaaaggaactacgctcaaactcggcgttcgcctcaaacacgttcgcttcgttcctttaacggtgcttctgactctctaattgtttctaacggcattccacattcacaataatccttatctattgtttccttcaagtcgtgactggcagcggatgttaataaatgaaatgcccggaagtgtaatccggtggaggccactacggttaagcattgccatttaagaaatgttatgttaatatacattcatcgacagctattctgtctgtcggataaattcaaaatatataagaatcgggtcttgtatatttcaaaatagcgttagctattcgtgagggaaatcagaagataattcacagaaaatttcgaaacaaaggaaaaatgaaaagcatatttgcacgattgatgttgcagaaaaaatatattttgcttatactaaaagtaaatatccggggttttttcgtgcaaagtgcggaaaggagtccggatgggaaaagaaaacagagaagtaaaaagtagtgtactgg

SEQ ID NO: 2958 - DNA, 166 bp, Unknown
  gut microbiota DNA sequence
cacaatcttgtcaaaagccttgaaaatccgctaatgacagctgattactgtaaccttccgctgtcacaaccgttacgcaattgccagttaattcgtaaggcattcgacacccacggaataaaaagtagaaagccgttccagtgaatgtgaagaaggtgttggaaat

SEQ ID NO: 2959 - DNA, 604 bp, Unknown
  gut microbiota DNA sequence
gcagatgttattgaagatatattgaggagaagactaagacatttccgatattcattaactacgataagcaggacgatatcagcgataccacgaaatacgaagatcatttcgtagcagagaaccggctgatcgcaatttccaaaagcggaagaagcatggactcggaagatgtgcagaatttcccaaaagcaacagaacgtggcatagatgtgcagctgtttgtgagaaagaataaggatgataagatatccaaggaattctattatctgggccgtgtgatcgcgaccgggaatgcgaagcagtttgtgatgccgaatacggataagacggcggtggagatcgaatgggagctggagactccggtgagagaagatatttatcagtatattgtgaatgaatagagattgttacaggaagatttttgacgggagataaatggtaagatgaagacgattagagttgtggcagcagtgataaaggcagtaaaggaagacggaagaatgatgatattcgcaacgcagcgtggatatggcgagttcaaaggcggatgggaattcccgggcggcaagatcgaagccggtgagacaccgcaagaagcgctgaa

SEQ ID NO: 2960 - DNA, 314 bp, Unknown
  gut microbiota DNA sequence
gaaccactttttacactttcaagaatctcctgtaaggtcatggattcctccttttagaacaccacctgcaccagaaacatatagacaaccgttcccactataatactgagcagtgtatttctcttccacaaatgaagattttgctgttatcattctttttccttatcagcgcccttatttccacgctgatcgtagtcatccaggaaattgtagtattctccatctttatgatatcccataacagtacgaagattaatatcccgcacactgttaaagatattcgtctcgatcacactgcttgtatttctaaactg

SEQ ID NO: 2961 - DNA, 179 bp, Unknown
  gut microbiota DNA sequence
atatcagaagaaaaaagatgtagagccatataaacatgcaattgaagaatgtatagaaaaaggaattcttgcagactatctgaaaagaaaaggaagcgaggttgtaaatatgttaacggctgagtatgattatgagacagatattgaagtacagagaggcgaagcatatgatgagggaa

SEQ ID NO: 2962 - DNA, 158992 bp, Unknown
  gut microbiota DNA sequence
attgaggaataattagttgtaaatacagctgttggtatggccgaagaattcgtatacgatgcttcattcatcaaattgaaagaattgtcattaggttattctttcccgaaatccatactgaagaagactcctttaacttcactgaacgtagcattcgttgcccgtaacttgacttacctgatgaaacatacaccgggaacaagtcccgaaggaggttatgacacaagtatgttctctcaagctatcgattatatgtctgttccttacacacgtacattcggtctttctattaatcttggtttctaatctaaacataaaaagaagttatgaaattctattataaaacacttgcattcgcatctctacttgctctagcagcttgctcagattttgatgaaatgaacaccaacccgtacgaacctccttattcaccgggtacttctaataccgatgtaagtcctgaaggcattgatattgattatgaactgcctgaagctgatataaaagcattaaaagaagcagaaacttcaattggtagtttgttccgtaatctaacgaatgagggaccttacaatgattatcaggtaaccaccaacttaactcatgacatttatgccggctatatggcaaatacatctgccggtttccatgaaaaagcctgcacatacgtatatactgacgactggtccaaaaacagatgggatcatttctataatgaccgtactgcaaacgaatatgcacaaattatcaaagtctgtcatttcgtcaataaagacaaatactggaacgagttctacgtaacccgtatttattatgcattcctcatttctatgcagacagatacatacggtgatattccattgtcgtactacataaaaggaatgttacccccgacacagtatatttcatataccagccaaaaggatgtgtacgatgctatgttcaaactgctggatgaagctatcaccaacatcaaacccgacaaaggtttgaactggggagaaggaaaaggaagtaatgaccgttgctatggaggcgacatcaacaaatggttacgctttgccaatactttacgtttgcgtctggcgcttcgtatttcaaatgtcgatccggatcgtgcccaagaagaagggaaaaaagcaatcgagagtacttatggtttgatgcaaagcaatgcagacaacatgagaactgtaccgaaagttgcccctatcgacaaaggtggtgaaggaggcggcggatctgaaaatatccatgcgctgatattcggttggggagcgcaaatggttatgtcgaaagatttggaaaaggcctataaaaatgaatctgaagtattagatccccgatgcgaaatactgtggtggcgcccaagtccattttcagatcttaaggaagccaaagaaagcaataaggactttgccggatgtccgattggcaatatggatgtacaaggagaggacgcgacaaaaagttactctcctgtaagatgtaataaactgataagttcggatcataataatttagatgataactattggtttagcgaagctcgcgaactggtttggatgagctatgcggagagtcggttcatgttggcagaagctgctctcagaaattggacgacaggctcagttgagcaatattatattgacggaattagagcgtccatggattactataatattgatgaggctaaaaaacaagcctatattgacggattgaagaacaaacaagatgtatccggaagtgacaaggagaaagccttgaaagagatcatcacccaaaaatggatttcgatcttcccgaacggcaatgaaggttgggcagaattccgccgtacagattatcctgaattgctgaatatcgaagaaaacaactcggacggtgacgtgcctgaaggtaagttcatcaaacggatcaaataccctcaaagtgaatcctttaaccccaaccggccgatgggcgacaaccagggaacgaaaatctggtgggatgtggcagatacaaataatgacaatggtcaacgtgtacagccaaacaacttccgataatcagtcactaacaaagtgctaaaactctttgtgccaaagcctgaaaaaaatctaatgacaggaacttgtcttcttagatagaatcagaaaaacagtagattgggaacttctcctttaatctactgtttttttcaactaaatcactccacttgttctttcggataattcaccaaatacaacgtcttcgtcgcacgagtaaacgccgtatacaaccaacgaaagtaatcgggagtcaagtattcatccgtcatatatccctgatccaggaacacattctgccactggccaccttgtgccttatgacaagtgaccgcatacgcatacttcacttgtaacgcattataatgtgggtcagctttcatcttcttcatccggtcacgtttattgggaatatcgatataatcttccagcactgtgtaaaataaccggtcattatccgctttcggtaatgcaggcgaatctgaatgtagagtatccaacaacaaattagcatccaattcaaaatcattctgatcgggaaatctgagagtgacttccgcaaaacggaagccgtacatttcacgggtacgacggacacggcgaacaattgcaatctctccgttggctatgaaatccatttctttatatttctccgtccaataataattattcttggctaccattaacatatctccggaattcaattcatcttcccgccaaagtatctgcgcacgtattccattattatataagttcgcgcgtttattagagcgacaaatcacaatcgtctcatccattccgtcacggtcataacaatcggtcagcttttctatcaattctactcccggaacgacttgtatatccggaaagccggtcacttttatctttggtaacgaatagcattcatctgctgctatcaattgccgcaattgagtcgcattccacaagatgccggattgttgcacctgacgaactacttgagtcaaatcgacctcacgaacttcaagtccatatcctttcaatgcatcggcaaacaacgcgggacttaactcctctcccaccggcggaagctgtgccgtatctcccattaacaaaagacggcagccttgtcccgaatacacgaactgcaccaagtcatccaacaaacgtcccgtaccgaatacactgcccgacaacccttcattagaaatcatcgaagcctcatcaacaataaacaaagtatttgtagcaagattgtcattaatcgaaaaattactgatttcattagaaaaagactgttgtctatatattttcttatggatagtaaaggcagaatgtcccgcataggccgaaaaaacttttgccgcacgtcccgttggagccagtaaaacagacttttgctgcaactggttcatcgttttcaccaatgcccctactagagatgttttaccagtaccggcatagcctctgaggatgaaaacttcatccgccaaggtagacagaagaaactctgaaagagattttacagcaatttcctgctctaaagttggttcataaggaaaattttccttaatttgcctttctaaatagttatttatcatttttgtacgagaaaaaagttcctggaactatcgtatttaaattaatttattctatttttgcgatgcgaatataacaactaaaaacataatttatcatgaaaacagtatttaatattgtattagtgctctgtgctgctgcactgatttacatctgctacaacagcatcatgggtcctatcaattttgaaaacgcaaaaaaagacagagaaaaagcagtcattgcccgtctaattgacatccgtaaagcacagcaggaataccgtatgcttcaccacggaatgtatgctcctaaattggacacattgattgacttcgttaagaatcagaagttgccgttcgttatgaaaatcggacaattgacagacaagcagttggaagacggattaactgaaaagaaagcaatgtcgatcatcgaaaaagctaagaagaccggcagatatgacgaagttaagaaatggggacttgaaaacttcaaacgtgacactatgtgggtagctgtattggatactatctatccgaaaggattcaatccggattctatgaaatttatccctcatggaaatggcgctcaattcgaaatgaatgttagaaacgataccgctaaatccggtgctcctgtatacttgttcgaagtaaaagctccatacgatacttatttgagcggactcgacaaacaggaaattatcaacctgaaagacttagattccaaattaggtaaatacagtggtttgatggtaggttctatcgacactccaaacaatggtgctggtaactgggaataatgattgattttactaaatcaaaacaatatactttatccatccgtcttagtacggatggattttctttttctatctataacccgattcatgacgactctttctcagtgatagaaaaggagattgatacgtctttatctcttacagccaatctcaaggctgtgtttcacgaatcggacttcttaggtcattcttacaaacgggtaaacatcatgctggctagcaagcgttttacgatagtgccattggatttgtttgaagaagagcaggccgaccttttattctatcacaaccatcagaagcgggaaaatgaaacggtcatttacaatattctgaaaaagaataatgtagttattgtcttcggtatagacagaagcgcatactcttttctaaccgaacaataccccgaagctcgtttttattctcaatcgactccgctcattgaatatttctccgtaaaaagcagactgggcaatagcaagaaaatgtatgtttccgtacgtgaggaaggcatcgacatctattgtttcgaacggggacatctcctgcttgctaattctttcgagtgctcccatacagaagatcgtatttactatttgctgtatgcgtggaaacaattagaattcaaccaggaacgggatgagcttcatctcaccggaacccttcccgacaaagaaattctgatgaacgaacttagaaaattcatcttacaggtattcatcatgaatcctgcaactaatattgacatgcaagccttattaacatgcgagtaatcagcggtatttataaacgaagaagatttgatgtgccccgaacctttaaagcacgtcctacgacagattttgccaaagagaatctgtttaatgtactcaacaattatattgatttcgaggaaggagtcactgcactcgatttgtttgccggaacaggcagtatcagtatcgaactggtatccagaggctgcgaccgcgttatcagtgttgagaaggagccggctcactattcattcatctgcaagattatgaaggaagtgcagactgacaaatgtctgccgatacggggagatgtattcaagtttatcaataacagtcgcgaacagtttgactttatctttgctgatcctccttacgccctaaaagaactggaaaccataccggagttaatcttcaagaataaccttctcaaagaagacggattatttgtactggaacatggaaaagataataattttgaagagaaccctcacttcattgaaagaagagtttacggaagtgttaacttctctctcttcagataagatttcaccacagaataacatttaaagtagcggagccaacagacgaacaacagactccgctgccttctgcctccatgaacgccttacccagtttttcaagaatatctgcgtgctttcgcgctgatcctgaaggaatatttctttcatctcaagcgctgtctccacatcatacatgaaagcattcacctcaaaattatgctcaaagctgcggaagtccacgttagtggaaccaaccgtagaaagcatatcatccgaaaccattaatttagaatgcaggaatccctttttataaaagaaaaccttaacgcccgcctgcatcacatcccgcagataggaacgcgacccaagatgtgtaatccagttatcagcacgttccggcaacataagacgcacatccactcctgataaagctgcagtttgcatagctgccaatatttgttccgtcggcaagaaataaggggtctgcatatagaagtactttttcgcaccggtaattgccacggtcaatccctgcataatctccttccatggaccgataggttcacttgtgactatctgcacaagagaagttccgcaagaatctattttcgggaagtaacgggaagctgtaatcaacgtacggtccacaaaataccagtcgagcaggaaagccgtctgtagaccatgcaccgctttgccttcgagcataatatgcgtatcacgccatattccccaagaaaagccacgcatatagcgttcggcaagattcattccgccaacaaagcccacacgcccgtcaatcactacaatttttctatgattcctataatttacccggctggtaaacaaaggaaaacgcactttcaggaagcttctcacctcaatgcctgcattacgcatttcctcgaaaaaacgattgggtacgtgccagcaccccacatcgtcatagattaccctaacttcaactccctgcgaggccttttctatcaatacatccctcaccagacgaccaatggcgtcatcctcaaagatataatattccatgtggatatgctgtttcgccttctgaagttcgcgcaataatgcctgtaacttggtgtagccttccgtatagacagacaccctgttcccttcgaaaggaaaagcctgattggtatgacgaaaaagctggatgagacgggagtattcatagggaatatcggaacagtcctgcgccaagtattccgccataggtttcttcaacaagcggtcgtagctcttttgtccgattatacgctcccgacgctgactccggccgaagaaaaagtaaaagacaagccccacaataggcaggaaaagcaagatgagtatccaagccatagtcttgacaggattccgattgtcaagaatgataatgacaatcgtactgataatggctccgaaatagagtatatcaaaagccacagttgctatctgactcactatatagttccaatcaatcatagaaatctccttctttatagagctacggaacaacaaatataaagtaaattatcggataaacaaaaaagtcccggtgacaactcatcatcgcagcaccgggacttcactattctatatttgctatggcttagaaacgcatgggccgcattccgccaccgcgaggaccatgaccaccaccgtcaaaacctccgtgacgcatatttccgcgagcttctttatttccgaagatattcaggcgatagataaaatgaagcatacaatagctatttacaccattatattcagaaacagaacgcatatcggcagtcaatgaacggctgatattagtctgttgcttcaatatatcataaatctcaaaactgattgttgccgcattacctttaaggaaactctgagcaatttgtgcattccagataagttcatttctgttcatactggcatcccgatagccgcggcgggcattgttcgtgatattggtagacaatgacatattccaaggcatattgatattcgtactggcaccataaccaaaagtgtacggttcctggttattctccggacgcaacttattcttctcaaagttataatttatagaaccgttcaccgtaaactcaaaccagtcattccgaaaagtacctctcacatcttcccctaaattcaatgtagtacttgtattcttatcgtttacagttgtctgttgattatacagataagcaaccgcattcgtatatccgacacgagagaaagtactgacagtaaatcgtttatccttcaaagccgtattaaatccgaacattcccgacgcattccagttaccattgatattttccggtttcacagtaactccaccggtagcctgattataagtagtaccattggtaatgctattctgggtagcattgaagaaagcatgtgccactatcccctgctgcctgtccgcgttataagtattatagaacaaacgcatattatgagagaaagaaggtttcaatcccgggttacccatacggatattcagcgggtttgagtcatcggtgatatccaacaaattctccatacttggctggctcgcacgtccgcgataagtaaagcgcaattggctcaccttcgagaaacgataacggaaatcaatattcggggcaaagttgaagaccgaccgcttcacaatagtatcaagttccgatttcttataagtcaacgtagtattctgcggttgcagagagactccgacattaaatctatatttttctctgataagattcaaccctgcatttatatcatgattataataattatacttggcatatttactcaaatcctgatccctgttattctcatatcccagaggaagttcgtcaccaaaatgccagtcccaaacctgacctttgtcagcatccggtatcagatcataggtgcttctgtcgctttcactatatttatattggaatttataacggaactgcaaaaaagtagctttcgctatcggttcgttataagtcaattctgccgtgtaatcatagttcttcgtaggagatgtggtataccgcctgttatcatcatccggctttccggccactgcgtcaaaatagcgcgtcaatgcttcactaaacgactcactgtcgttatcaccataactgaatgtaccacggaatgtaatgttacgtcccagactgttcaacctcctgttcaactgcaaagaagcattagccgaaagactcttactctctgacatagattcactgttactcgcatttacacggatatccttcaaagggtcatcctcactatcccataccaccttattcaaaaaagcattcggattagacacaaggttaaaagggtcctcattaaacgttcccgattctgaaatcgaatacccatcagattttccataagaaaaattaggacggaaaataatgttagtcaacgtatccggtttccattccagacgaaaatcggcattaaagttagtattcttattacgacctttactgttcgaattagaataggagttgccattctgcaagaaacgttccgaataattagtagatatagcgtctctgtcactaaaattataacgggcactaccgcctagttccagtttatccgtctgggtggcaaagtttgcaccgagcatcttagtggcggtcaaaccgttgctattccggaaccggggtcggcctcctccgcccgaaaatccctggtcattcacgttattggctgatcctatcaatgagaactgactgttttcaacaaaacggttcagcattacattacttgaataacggctttcagtcccgcctgccacattcgcgttaccgaaccatccctggttcattcctttcttcaccttcaagtcaagaaccgtctcctcctctccgtcatcaattccggtaacacgggccaagtcggactttttatcgtatgttttcaacttgtcaatcatattgaccggcaaattcttcaaaccggttttcacatcaccgccaaagaactccttaccgtccaccataatcttcttgacttctttaccattgattttgacgttaccgtcatcatcaatctccgctcccggaagtttctttaccaactcctccagcatggcaccttcaggagtacgataagccgttgaattatactccagcgtatcttccttcaccgtcacctccggagcagtccccgtaatcactgcctcactcaacatcacagcatcaggttccagagcaatattccccatttttttctcaggaacattgtttgacaattgtacaggaacaaactttgtacggaaaccgatataagaaatcttcaacagatatttcccggctttcactttcggaagcgtaaaccagcccttattactactggctataccagcagcataagcactatcgggtaacgacaataattgaacggtggcttgtgctgccggctccttagaatcagattccacaacacgtcccgaaacagaaatcactttattctgtgcgaaaatagagagggtgcataacaacatcagcaccaacccgactgataatcttttcatttacctaaattacgattatattagtagcaataacaatgtctttttgacaaattgaatcgtaaaaggtttaattgaaaggaaaattatcttttgaagaatcgatcaacacgcgctttttgcagaccaaactccaaacaaagcacattaaataccaaaaaagtcagaaaagaagaagtatccacattaatgatatccctttgaatgacacgccacaacattccgccgaatacaaaaaggaaggtcaaaaagactgcattccgaaccgccgcattccgaatctgctccgtttcacggctttcattcttgcttaatgcaaagattatcaacaagcatcctgacatcatcagcaacttcgtacattctttataaaataacagattatgatcggtcaccattccttgtatatacagcacaggaagaatgaacagagctatcaacaagaccaaatatcccacaggacgacaaaatacgggtaataatgctttcatgatttgaacgttttaacgagacaaaagtaagtaaaaaaagatattttatatacatttgcaaagtaaaaaagcaaaagaatcatgagtaaacaagaagttattctctgcgaaagcttggaaacaagccttagccgcgccatagaacagtgtccgcatgacaaattattcatcctcacagacgagcatacccggcgtctctgcctgcctgccttgaaggaactccccgcattgaaagatgcgattgaaatctgcatcggagccgaagacgtgcataagacactagagacactggcttccgtatggatgtcactaagtacccagggagctacacgccactcattgctcatcaaccttggtggaggaatggtaaccgatttgggaggttttgccgccgccactttcaaacgcggtattgcatacatcaatataccgacaactttactggcaatggtagacgcctctgtcggtggtaagacaggaatcaacttcaacggactgaagaacgaaatcggctcatttgccccagcaaacagcgtattaatcgaaacagaattcttacggacgctggatgcacataatttcttctccggatatgcagaaatgttgaaacacggactaatcagcaatactgcacattgggccgaattactgaatttcaatacctcggacattgattatactgccctcaagcaactggtcggccggtcggtgcaagtgaaagaagacatcgtagagcaggacccgtttgaacatggaatccgcaaggccttgaacttgggacatacggtaggacacgcattcgaaagtatggcactggcagaaaaccgtcccgtactccacggatatgcagtagcttggggaattgtctgcgaactgtatctatcccatctcaaagtaggtttcccaaaagagaagatgcgtcagacgatccaatttatcaaggacaactatggcgtattcacattcgactgcaagaagtacgagcaactatacgcgtttatgacacatgacaagaagaacacttccggcaccatcaacttcacactgctgaaagatatcggagacatccgtatcaatcagatcgccgacaaagatacaattttcgaaatgctggacttctaccgtgaatgcatgggaatctgacccagtccggacaaaaataaaaatataaggggaatggcttcaacaccactcccctttcttgattcccttattctcccatatatattgataattgcatcgcaatcatccccactttctcaatccaaatgactcattcgatactgggacaatgacatccccgtatgttttctaaaaaaacgtccaagcgacgattgattagcaaagttcgtcctaatcgcaatttcctgaatattcagactcgtgtttttcaacagagcctttatctccagtataatatattcaacaatccagtctttagcagactttccgctcgtttccttgattaccatggtcaggtatttggaagtgatacataatttgtccgcataaaaagccacatccttattctctttgaagtgcttcatgataaggctgaagaatttatttgccaattcctctttacgggtatccttacgggtattcaccaacatcgattctttctcgtaagcattgaacagttcgagatacagatacctcagtaaatgaataatcaattccctcctgtacgcgtcagtagacatcaccttatcttttatcattcccaaatagttatatatccgcagaacatcacgttcattctgaggataataataatggctccgcatatagaaaaagaaatgcggagaaaagcgcggtacaccacttagggcatcgccgaacatagaggaagatattaccattgtgacagttaaaaagtcctcactaggttcactgaatgaaacaaattgtccgggcaacaatatgattaactcatcaggttgtatccaatgcacgtcttcgtgcacactgattttagccgttcctctcaaactatatacaatcaaagctgattgaatattagaaggataagaagttaaaggaagatacttcagattctcataatacttgaaatcgtcacctaagacatatatctctaacgtttctttgtttttgttgttttgcatttatcacctctctcttaaagactttccacaaatgtataatatccaaatttaccattcgttaaaaaaggaaataaagtattatacagaggaaattacatactaattatttgcattattttataaacaaaacgcccctcccttagttctttaccccagtctgtatttagatttattataaacagaaaagttttttatggcattcaaaaacaaagaaatagctaatgccgcacgtatgagaacaagtatatagcaactcatctattaacaacaaatttctttctgattgacagtaaacttgccattaattgatactaaactgattgtgcaccggcaacaaactataaacgaagccttcgtttttataaatgcaagttccgtttttacaaacgcaagtttcatttataaaaacggaactttcatttatagattgcaattaatgaaaaacaactttgtttcttgataattggaagtttactatgaatggagaggaacttttctcctaatgtccaacaattggtttacggcaagtctgaagaagctgcgcaatactttgtcatccctatcttcaccgagcctcattcttttagctctataacagttagaaaccttattcaagtgaattgataaaacaaaaatcaagcaaattatttgctatttaaaaattaatcagtacttttgcaaccgcaattcgggatgtagctcagcccggtagagtacgcgtctggggggcgtgtggtcgcaagttcgaatcttgtcatcccgacgaattgatcttcaagaggttagagtaaaatctaacctctttctttttattccaggatgaaagctaaaaaatatgggacaagcaacaaatagaacttattataccaagcaacaatgaaagagaatccgaaacatatccatattagcgaatacaactatccattgccggatgaacgtattgccaaattcccgctacccgttcgcgaccagtcgaaactattggtgtatcgccacggtgaagtgaccgaagatactttcacttccttaccggaatatctgccgaaaggaagcctaatgatattcaacaatacaaaagtcatccaggcgcgccttcacttccgcaaagaaacaggtgcactgattgaggtattctgtctcgaaccgattcagcccaatgattatgtactgaacttccagcaaacggaacacgccgcatggctctgcatgatcggcaatctgaagaaatggaaggacgggacactgaaacgggaaatgaccgtcaaaggctttcctattactctgacagcaacgagaggagaatgcaaaggtaccagccattgggtagacttcgcatggaataaccccgaagtaactttcgccgatatcctcgaagtgttcggagagcttcctatcccaccctatctgaaccggaatacggaggaaagcgacaaggaaacatatcagactgtttactccaaaataaaaggttcggtagccgcacctactgccggattgcatttcaccccgcgagtactggaagcattgcaggaaaaaggcatagaccttgaggaactgacattgcacgtaggggcaggaacttttaagccggtgaaaagcgaggaaattgaaggacatgagatgcacacggaatatatatccgtcaaccggaatacaatcaagaaattgatcgaccatgacggttgcgccattgccgtaggcaccacttccgtgcgcacgctcgaaagcttgtatcatataggggtcacattggccgatcatccggacgctacggaacaggaactgcacgtcagacaatggcagccatacgaaaagtacgaccagattcctccggttgttgccctacaaaagatattggggtatctcgacagaaacgggcttgaagcacttcataccagtacgcagatcatcatagctcccggttatcagtataaaatagtgaaagcaatggttactaatttccaccagccgcaaagtaccttgcttctattggtttccgctttcgtgaaagggaactggcgcacgatttacgattatgccctgagccacgatttcagattcctgagttatggagattcttccttattaataccgtaaaaatatctattgtaagttacgatataatcttgctgataagaaaataatagcgactattatgccaagtgataataaccaagaaatgtttcccgttgtcgatgaacagggaaatatcaccggagccgccactcgtggagaatgtcatagcggcagcagattgcttcatccggttgtccacctgcacatcttcaataccaaaggagagttgtatctacaaaaacgtcccgaatggaaagacatccagcccgggaaatgggatacagccgtaggcggacatattgatttaggagaaagtgtagaaatagctctgaagcgggaagtccgtgaggagttaggcatcacggactttactcctgagcttctgactcattatgtgttcgagtccgaacgtgaaaaagagctcgtatttgttcataaaacagtttacgacggtgagatccaccccagcgacgaactggacggaggacggttttggacggtcaaagaaataaaagagaacttaggcaaaggcattttcactcccaactttgaagaggagttgaagaaagtatcccttatttcttctctatccaagtaaggattttctcggagaacggactctctttgggggtaacgaacccaatccagtttccgttctcgtcaattataaacttttgaaagttccactggaccggggcatcctctttcccattcagtttcttttctgtcagccattgataaagcggtgcaatatctttgcccttaacagaaatcttggacatcatcggaaaagtgacatcatagttcaatgaacagaacttggcaatttcctcattacttcccggttcctgccccataaaattattagcagggaagccgataataacaaagttcttatccttatacttctcatacaattcctgcaacttggcatattgtggagtcagtccgcatttggaagctacattcactaccagcactttcttccctttcaaagatgaaagaggaaattccttaccgtcaattgttctcacagtgaagtcataaaaagacttattctgtgcttccaaagaaaccgcacacaccatggctatcaccattaaaataaaagatttcatacctgacacgtattaagttcgttttttattaaacgaaccgatatggaaaaatgtttgattcaaattaggttatttatcaatgttttacccgataccagagaggcagagccgaccattactaatcagcttatcggacgtatgaagaaacgaaaaacatatcatgtttcaatcaagtcatggtcgaaattccaataattcatccatcttcccgtccattatacaaggcaggcatctcgatatcttttccatgctccaattccaccattgcaattcctgcaattgagtgattgtatcggtatcgaaacgtttccgtatctccctggcaggtgttcctcctactatcgtataaggaggcacatctttcgtaactactgcccgtgatgctatgaccgctccatccccaacatgcactccggacatgataactgcttcatacccgatccacacatcattacctatcactatatcacctttgttgtcccaagccgaagcgacattttctttatctaagccccattctccaaagaaaagagggaatgtataattggataaagaacgcaaggtatggttcgcactgttaaaaaggaacttggttccgcaagcaacagaacagaacttaccaattatcaaccggtctttgttaataggataatgatatagaacgttgttcttctcaaaatcaagcgggtcatttacaaaatcattatatatagtgtaatcgcctacaataatggcaggattctttatgactgtattcagatagatagtctgaaaatcattggtgcgaggatatactttcgtattcattgtattataacttcttttatatagtttccgatatagactgacaaaacaccctgcgacttatgtaaagccacagacagttggggacaacagctctttccgttattcaccatccatataagcgaagctatttacagagttgccatttcattgcgttagaagaataggatttatatcacccggcaaatgtacaaaataaacggtccgacactattctcgaatcggacaaatagtagaaatcatgccgaatttaactttatcattcagttgccacaccactttgccttccgaatcaatctcgaccaactgggggtgtttccctttaccggcttcgcggtcgtgcccttgccagttacagatataaagtcccccattctgcaaaggaaagagttgggctacaaaaaagagttgtacaccttctatgtcattggcattcacccggcgaacaatccggttcgattcaagattcagttgcacgaaacaatgagcgtctccacaagcaaccagacagtctccgttgtccagaaaagcagaggaaaaaggagtaccggagagctttacactattcagcagttgaccattaggggcaatttcgcgcacttccgaagtggcaaataaaggcacaagataattgcctttcttattcttgtttatttgacggaattgtgcgtgaggacgttcgatccctgtttcaaactcggttttagaaaggacctctcctttcatatttacctccagaatggtagacggatgaccgcaccaagctactaatgcattaccgtctggcaatatacgtgccgtctgcatctcacatcctgcgggtgcggcgatattccagagttcccgcccgtcacgggttatcatttttgctcctttggagtaggaaaaaagaatttctcccgctttcgtggctgccaccgagttacattcccagcctttttccagaggatattcccagactatttcttttgtgtctttattgattatggcaatcttattccagccggaaccaccgaccaacagatgctgaggggaactgccttgagcaaacggtgcaacaaggaataaagcaactaacaatataaaattcttcatactacacatcattacattcgattagctattctgtttctgccttctcgcgaaagagataaatccaatcagcgcgaccaaaagtgccgacagcaaaagatagacaaacattcctccgacatggtcgttttgtccataggaatgcataccactcaggaaataattcactccgaagaacgtcatcaacacactgtaaaaagcgactaccgaagctatgttgaacagccataggctgtttctgaacggcaccagatgaagatgagtgacaatggcgtaaacgatcatcgtaaccagcgcccacgtctctttcgggtcccatccccagtaacgtccccacgactcattagcccagatagctccaagaaatgttcctatcgtcatcaaagccagtccaatcagaagagacatttcgttgataatactcaattcttttatccgctgtgccagcactgccttcttaagactcatcatcaccagattgaccagtccgagcaggcaactgataccgaagaatccgtatgcacctacaataacagctacatgaaacatcagccacggcgacttgagaacaggaacaagcggatttatctgcgggtccatccagttcagtcccgatacaaacaagatgactccaccgaacaacgtagccaaagcgaaagtcagcagactacgacgcgcgaacagccaaccggcaaaaaccgtagcccaggcaacgtagaccattgtttcatatgaattgctccacggagcatatcctgcaatataccagcgcatccccattccgtacgtatggaaaagaaaaaccgccaggacagccacaccaagtgcccgacttgcccaacgcatccaacgggcacgcttgaataaagaagcaaaagcaaacaccagcaataacccgccaaaaatcagatatcctttcttgcactggctgaacacatccaaacggttatattttatctccgcctccattttcccggaagtgacaccggctatcttattctttgcctgttgataagtggaaatcatacctactatttcatcaggctttgtccagtcgccactctgcaaggaagtctgtacttcttccacataccaagccaacacccggaagacaaacatcgagtcttttcccgaaaaagccgacaaatcatcccccggagcataccacgtatgttgcgggtcgtcttctttcggaaagagattcaacagctgccaattaagcaactgatgaaagatgttaatctgctcgtcaaacttaatcaggtctttatcaaaacgagtccgcgcagcaggcatcgtaccgtatgcttcttccaacttcttctgcaatttataattcccgtccgcatcaaatatatccatataggcgcattgtccggacggcaactgataaaagtcactcaattccttgccgggaacagcaataaatggaatatacgtccaacgttccggcattgtcaaaacactaagaagaaactggtcggaatttaaagaataaaaggaatcagacttatgcagtttcctcaatacttcagacgagaaggtattgacaggaagtacacgccctcttcccgactgaaggggcaatgcaccaaaacgggcagcatgcccgctatcaatgatgtctttcagcactgcctccctcgcttgtaccgaggtctcaccggcatgaaccgtcaaagaagagagcgtcaacaacataagaaagaacgaacaacgcaactccttcaaccgccggctgagtaacataaagcgtgaacgcctgtctacaaaacacaataccagaccgagcaacagaacagcatatccggtgtaagtgatggtacgtccagccacatcacggttgacagaaagcaccgtaccctgttcatcctgatcataagaagcctgaaagaaacgataacctttcacatccagcacattattcatataaacccgttccgaaatgacttctccatccagatgtaccagcaactcactttcatacgcagacgggctggacgaaccgggataacgggttaatgtaaaatttatcagttccacactaaaaggcagcgtatggtaagtcacttcaccggcgtgacggacagcgaagcgattgctcgtctctccctcacgcaaatgaagaataccttcctcaccataaagatgagataccaatgctcccagcagaattagaatgaaagccccgtgagtaactaacattccccatttgcgcattttcagcgaacgttgcctgataacgatagccaaccaattgagtactatcaaaaattgaagaaggaaaaacaaaggagaacagtacaccaccgatcgggctacttcactcccctgatacttctcaataaaagtagcaatcgccaaacctgcaccatatacaagcaacaacacaatagtcgttgttgaagaggaaatcagtcttttcagagtagctttcattagtatattcgattaatcttcgataatgacacggaaaccgacattaaacacacattgataaggatagaatcccttacgtgagtatgctgtggaatatttcggccgttcaatatacgaaccgccacgaaccactttatattcggaaacctttttcggattctctttatacggataagggacataatccgaacgcgtccattcggcaacattgccatgcatacagtataatccgaacggatttgcctcatacttctttcctcctacctgcaccaaacttccgtcatccacattggctgctttaggaaggaacgtataatacttgtaccagggcgattcgggagacatcggctgcggatcgactccactcactgcaaacttgttggttgtcacatcggccaagttatctttcttaccgaaatccgcattcaagttaccaaaccagaaatcctcgtcgcttcctccacgacacgcccattcccattgcgcttcggtaggaagcgtaatgttcagtccggtcttttgactcaatatcttacaatattccattgcgtcattatagcttacgcggataacaggctgctccggtttattagccggataccccggaacgacatgatctttccactgttgatccacataacggctgtcatgctgcgggaatatagtattatactgttggttagtcacttccagttcgcccatccagaacgctttatctatcttcaccttggtagtgggataagtgtccggctccccatggtaactgcccataacaaattcacccgcaggaatacgtacaaatgtcatttgaacgcccggagctatttccaacaccttaacggtctctttctcatcggctagcatttcctttaccctgtccggagcaaacggccacccttttaccgtcaggactttctccttcacaggactcaccttcttgggcattaccggttttatctcacctttgtttttcagttgggcagcataatcggcaatctcttttttccaatccactccggcaccgcccgcatatttatcggtcagttgcttgcggcgttctatctggtcgtatccctgatacgggaacgatttcagaacattagcattgaaatatcctttgtcgggagcattatagtcaatccagttataaattttcctccactccgcatccgtcagttgcacattataatgtccttttttcaaaagacggaccaactcactggtattaggatgatattcataaggataaagtaccaccatatctccctcaccgccctgacgatgcacataaggatgaagattgagataggatgttccatatcccttgccatctttcttgcccccacgcagatcgaatgcttttccctcaccattgtggcaagcgatacaggcacgatccaaaataggttgtacctccagatcaaaagtaaatgaacgggttcctccttccgggggagtgagagcatgcggtgctttctgtgaagcaatcacacgtttcgggattacaacctggttctgatcttcatgacatcccacacaagagacaatctctcccggttgccctgtcagccagctacgcatccattgtacagccactccatccttatccaagggttggatagaaaccggagtattggcaggaattttaaaaataaccgagccgtcttcctccaccggtacggtacccaacatacgtttaatatcccaacccgactggataccatgccagttatggtcagattgtgtctggacataagcatactcataagcgtgtaaacggagcgacttcaccgttccacgcggaatccccttcaatccttcaccttcataaatatcctgtataaagaccgttgcctgcttatcgtccagtttcacccggtcgggtatagcaggcggagtcaccgttttgcgcacggctatcggactgatatatccttccccttccattttatgcagacaagtcacgttatcaaacttatctaccagatagataccccacaaatcattcttatccaattttgcggcaaccagaaaataagtatcattgagtggagaaggcttgataaattgaggccataccccgtcgaccaacctgtctttcacttcttcaacgatgggacggttgcgatgaggaatctcctgcaacataccggcggctcctttacgcgcttttgccgggtcgaacagaataagacgtcccgaacgtgccaccccgtgatgtcccgaaatgattccgacaaaggcagaagcataaccgggtaaaggttgcacgtcaaatgtactgttgggaaacattgaaccacttccatacagtgccttttgctccgtcccgtcaggattcatgttcatcacaatacgggtgtaatagtgagtcaggtcagtatattcccaacgagtatacatcacacgtccgttattcataatcaccggattccagtttgcatcctgatcaaatgtcagacggcggagatttttactctgcggcgtataaagtaccatgtttcctacagggtcgctcccattgacacagggtactccctggtaaccgatgttcgaattggctatgatacgtccatccggcagataagtcccgtcataaaattccaaatcaggttcgggattatcaatcaatttcttacaatcgccgttattcagttttacttcaaacacattccaacgattgtcagacattgtctgggtaaacatcgcacggtctccatcccaatgcagtttcaaatcggcaatggaagaagtattgtcaggcttataaatagtgcggatttgtacttcatcacgcaaattacttaactcaacaatatcggcgttaaaacctttccggcgggctgattcctgattactccagttgttcgactgcgtacccagttcgggagccattgcccgacgatccctgtttcccagttgataacgaacggtcaatatcttatcgccgttcaacaatgggttggccagtaaaatagcacgcttattggctacggccttttccgcatttgccaaaacagcctcatcaccgctatatatattgccgaatccttgctttacttgctgttccagttcggtcaaaataggcaggtactttactgcatcgaagccttcgatccgcttcatgtcctcataagccagacgaatcgcttccatattcagccacttcaattcgctttgcaacagaagcatacgttgcacttgcttatgaagtttttgatatccggtgatttgggtttcgactttcttttcagtctctatttgtcgaatcgtattctttatgtaagaagaatccttcaagtaggcagccagtttcaagacgagcgcgcgctcagtatcagtattcttctgttgagctgcggctgtaaaagtcagcaaagaagaagatactaaaaacaatattaatatgcggtaccagtttttcataacgtagcagtagggtgagtgaaacgcagtccggcattatcgtgatagtttgcccattcacaaacaacggcaccttccggacctgccatcataaagtgaaaagtctccatttctttcaatcgcaaaatatcgcctactttctgtatcacgcaattcttgcttttgacaggcccatgcgtggcgggaatcgccggagcattcggagtcgtttctcctacttccgagaaattataaacccaacctttctccaccatccatgactcatgtttggccggaaagtctgttttcacatgagcgtgttcaggaatcatctgtcccggaagcaaataaatggcatgagcaaagtaaccatatttcgggtcattcacccaaaagatacctcccatacccacattttcaaagtctcccagaccaaaatccgttacccacatattctcggccataaatccggtaaagggaatgttatagtggacaaacatttctttcattgcctctatggcaatctcttgctgaaatacgccgttcttgtagaaatcggcatttgtgtactttttcaaattagtcatagctttatctgttattattaatattatttccgtatttaatctatcgctattccctctatttcaatcaatagttcttccctgcatacaccggcccgcaaataggaaacaggaatattcagtccataactttcaagtcccctgcgagcttcttcataatcagactcgttcttcaggtaaacacgtaacataaccaaacgggcatcacctatcaattgagcgatattctccatagtaatctgcaactgacgttccaaaccgactcccttcagactttcttctcctctgattgcggctgtaccggagatataaaccagacgtcgctcccggaaagtcatactcttggcccgttcaaacttcggggttgtttttttctgccgggcttcttcaagcacctgctcggaataggcgtgggcagcaacttgcagtttattatcaataggagtggcaaaaacatcaggagtgtgaaacattgccgcatccacatcaatcagcacacctcccatgttcatcccgattcccgtagcggcaggatagccgttcgaccaatcacttcctgcataaaacgctgtacgcacattattgaacgactgataatgttggccggctccgtcatatccggtgatttgttctatataattccattgacgaataatgctgttgacaggaaacgattctttctccaaaactcccttcaactggcggaaggcctctaccgaccgctgttccatatctgcacaagggtcatcgccctgaaatcctccggcaaacatgaaacgtcccgactcattttccaacaatacgtaaggaatattatcataatgccgatacaaaatccgttcatcgctttcaggacgatagctatgtacttccatgactaaaggagcatccggtacgggttgcagaacataactaagagccggttcgctgtctccaaagaaatggcgcgctttcgctttgaatagctgacgttgagtgacatattcatcttttaaaaccggcgtaccgaacaagaccaaacgtagtatacgttcttcttcgggcaaccgggacaataaactgtctatcatcgacggaaaatcttccggggaagcagtcaacagggagtaatgtattttatcacaatagttcatacactttcttcttaaagagaatttacatattcagttaattcctctatttctttcttggatactttcttgtcaattccgtgcttgtgaacttcgaacacttcttgcatagtggcagcacgtccgtcaaacaaataaggagccgtacgccaacattctaccagcgtaggtgtatcccatcctttctcaaactcgacatcttcaccaatccgatgcattttcagatccgtatagaaaggaccgttatgacaatcgccacatttcaacttatcaaagacttttcttcccgccttcgctttttccgacaattctccatctactaaatacgggctcggaaccgggcgtaaagacttcatatacgcgtccacacattcggccatttcttcttccggctcatagaactgaatataccggaatcctgcacgtacagctacttcagctttggcacgaatacccgaaatcatattgggaggcgtcacgtggctataaagcaggctcttgcagtttttaggattccctactccatcgttcatcaaatcccagttcataccgtccgtacggccgtctccgggatgacatccgttacaactttgccacccctgataacaatgtcccgcatcattaaagtacttctctcctttttgttctttcgtctcggtacgccccacattcatattaacggcagccaccgagaacgtattcagatctaccatatttaatacatcggcgaaataggtaggaataatcagtttattattcgagagaagaagatgacgtggtccgttgccctgcaaaggaatccttttgcggagtccgtaaagaaaagtcaggtcatagtccaaacgacctttatccgcataattccgaaacttatccaacattcgggaatggtcgattacgcttatttcatgtgtcccgctatgggctacgtagatgtgcttctcatcacaggcaatcccccacacaccggcagcgccccgatcgggttcgtccaccaatacggctccttcaaattcctgcttttctacattgatgatactgaaagcacttgtattcatccacccctgctgtaattgagaggtaggtaccataaaacgccctaaattatgagatacataaatatacttaccgtcgggagtaatacacatatcccgcaaagcattactgccgtttgccagttggatatcctttactttagtgaaacttttcacttcaattacagatacacaagccgccactatgttcaagtccgccctttgtgccggcagaaagttagccacaaatagatatcgtccgtccttactgaatatagcggaccttggttcgcgtaagactttcacgcttctgacaactttacacgttgccggatctatctcacttactgtacctgcaaattgattacatacatagatatgcttcttgtccgccgagaatatcggatagcaagttcccgaaccggtaggaatagctgcttctatctgtcccgacttcaacgacaagacctccaaccgcccggttttctcgaaagtagtcacatacgctttatcaccatcaagtaaaactcctgtgggagtttccttaaacgggtacgaacggagcaaagttttcccgtcggcagcaaatacatccaactgtctggttcctttctgggtcatcaataattctcctttctcgttaacagcagtacctgtagtaaagaaaggagggtttccggctgttgccaaagatatgccgcaaccgagcaagcaaattagcaaaaagttccttatcataatgtttcgtatttttatagcatgatcttttgttatactcttctatatcctagttctgctgagatttgtccggctatctctttgacaatctgcaccgtacttcgcaactgttcctccgtcaaacggtctttcggtcccgaaatccagatagagccacaaggatatcctgtataattcaagacaggtgcgcctacacaaatcaccccgctcaattcttcctcattgtccaaagcgtatccctgttgataaaccttctccaattcttccagataaacctcgcgcgaagtgatagtacgggaattgtaacgagggaaagtcatataagaaagataacggttccggacagtgaccggcagataggccatgattgcttttcccggggcagaacaatgcagttcaaaaggtttaccgggtgacaggacaaagcaaaaagcgtgatctcctcgagcttgttcgataaaaatgcctttttcatcgcccaatacgccaaaacaggccgtttccttcaccctgtctctcaaatcacgtaaatgtggcaagactgtttccagcagattatgttcattcaacgaacggaatcccagagttaacaatttccgggttaatttataccgcttcgtatcttcatcgaaagaaagataatccaaacgtaccaatgtattcaagatacggtaggcggtagtctgtgatatatcaagtgccaccttgattgcctgcaatgtttctccttccgatctcgaagaaagatattcaatcaccgcaatgcctttttccagattgggcactttataattatcgtctgttttttccagactttgctctgtattttccatatttggcaatctgttttccatatttgaaataccattccagcttttggataaaattagggatgttgctataaaatggagctatgaatgtgcaaaaagaagttaagtatgctacataacatatttagagcactaaatatgtatcccataccggtgtttcacctcagccatgacaaaagtactttccaatgaccccagactatcgatagtgcccagtacatttagaataaactcttgataatacttcatattcggagcatgaatcttgagcagataatcataacttcccgatatattatagcattcggttacttcaggaatatcttgtatgattcgcgtaaactctgctgcaatatccctgttcagccgtctgagcttcacactgcaaaacacgacgaatccctgattcaacttttcagcatccagcacagcaatatatttctttatatatccgccgctttcgagccgtttgagccgttcaaagacaggagttgatgaaagactcacccgtgcagccaactcttttgtcgtcaatcgggcattctcttgcagagtacggagtatctgcaaatccactttatccaatttatcaaaagtatccatagaaaaatattcttctaaagggtgaatatcgagaacaagacagtacccttattctatataacggtacaaaaatagtattattttctatatttcagctatatattgttcgatattcctacgccgtctaactttgcaagaaaataaagacaaaatattaaactttaaaaacatacgattatggaaagaaagaacttacacttcgagacattacagattcatgtaggacaggaacaggcagacccggcaacagacgcccgtgcagtacctatctatcagacaacttcctatgtattccataactccgctcatgcagccgcacgtttcggcctgcaagatccgggaaatatctacggacgcctgacaaactctacacaaggcgttttcgaagaacgcgtagctgcccttgagggaggagtagcagggttagcagttgcttccggtgctgccgccatcacttatgctttcgaaaacattacccgtgcgggcgatcatattgtagcagccaagacgatctacggaggaagttacaacctgctggcacataccttgcccagttatggaattacaacaacttttgttgatccgagcgacctttccaattttgaaaaggctattcaggataatacaaaagccgtatttatagagacattaggcaaccctaactccaacattatcgatatagaggcagtatccgaaatcgctcaccgccataaaattcctttgattattgataatacattcggcacaccgtacttaattcgtcctatcgaacacggtgcagatattgtagtacactctgccacaaagtttattggtggacacggtacctcactaggaggagtaatcgtagattctggtaaattcgactgggtggcttcgggcaaattcccgcaactcaccgagcccgaccccagttatcatggagtacgctttgtggacgctgccggtccggctgcctatgcaactcgtatccgtgccactctactgcgggataccggagctactatcagcccattcaacgccttcattctgttgcagggactcgaaacgctgtcattgcgtgtagagcgccatgtagaaaacgcattaaaagtagtaagcttcctgaacaatcatccgaaagtaaagaaggtcaatcacccttcactggccgatcatccggaccatgcactatatcaacgttatttcccgaatggtgcaagttctatcttcaccttcgaaataaaaggaggacaggaagaagcacatcgctttattgacagcctggaaattttctctttactggccaatgtggctgacgtaaaatcactggtcattcatccggcaagtaccactcattcgcaactcaacgcgcaggaacttgcagaacaggaaatttatccgggcactgtccgtttgtctatcggcacggagcatatcgacgatttgattgccgatttggaacaagcacttgctagagtctagtccggaacactgaactttccatgactgccgaacgttataccaatataacattaaaacattgcagtcatggaaaaatatttaatacacagcaacgaactgcatctgatagacgcagagaaaattcaccaagcagtagaaaaaatggtggaatcactcgatatggccgcagggtcaaccactaatttcgacctttacatggtggtggaaaactattttaaggatctggagaaaagaagaaagatcaaccatgtgctggggatgaaagaagacagatacgaactggccgaagatttcggcataaaataaaagaaattccttttccaatcacaccagacaatttttcatctataaaacgagagagcctcactgaagtgaaactctctcgtttttgcatatagcgtagaattatcaatttccctgatgtaccgtaagttgcgggaacgggaagttaatgcctttttcattaaaggtggcataaattgccttgttgatatcaaaataaactccccaataatcggcgctgttcacccatacacgggctactacattcacactgctggcatccaatgcatgaagagcgataaatggagccggatctttcaggatacgtttgtccgcagccaaaatatcagtcacgatctgctgcactttatcgtaatcttcgccatagtcaactcctacaatccattccacacgacgggtagtctgcgtattatagttcgtcactactccgctgctcattgcaccgttcggtatataaatcactttgttatctcccgtagtcaaaatggtatggaagatctggatttcttttaccgttccggaaactccctggctttcaatccagtcgcctactttataaggtttgaataaaagcacgatcagtcctcctgcaaagttctgcaaattgccggacaaagccataccgacagcgacaccggccgaagccaacaaagctgcaaacgatgtcgtttcaactcccaaagcaccgacaacggaaataatcaacagaatggtcagcagaatatttaccagacttttgacgaaagtcttgatactgatatccacttttcttctatccatgagacgtccgacaaagcggttgagcattgaaataaggaaacgtcctacaataaagacgatgaccgcaatcaagatacgctctccggcacgaatggcaaaatccagcagttgttgggtgatgagcgatagtttatctaagccgtcggcattagcaatcgcttctttcattaatttatctgcaacgacctgcgtagaatccgcaacctgtgttgctgttgcttgaaataatagtagcataatttatctgaattaaaatgaataaactgttgtttggttatttcaacaaacgacaaagttacattgttttaagcaaatctaaaagtttttttgcattcttcccgtaaaaggcgtaattttgtcaccgattcactggtaggggtgccttaacatgacgggctgagaacatacccatagaatctgatccgggtaatgccggcgtagagaactaattaataagcaagatgaaaaaaatagtatggagtgtcgtcgctttattgggcgtaggcattactgtccatgcacgaacgagtgcagaatccgacagtttgaaagtaattaacctgcaagaagtgcaggtagtatctacacgtgccacagcaaaaacaccgatggcattcaccaatataggaaaagcagaacttaaaaaagtaaacttcggacaggatattccttacctgttgagcatgactccttctaccctgaccacatcggatgcgggagccggtatcggttacacaaccctccgtgtacgcggaaccgatggtacacgcatcaacatcaccgtgaacgggataccgatgaatgacgccgaaagccataatttgttttgggtaaatatgccggacttttcttcttccgtaaaggatatgcaagtgcaacgcggtgcaggaacgtccaccaatggggcaggtgcattcggagccagcgtcaatatgcagacggaaggtgcggcaatgaaaccgtatgccgagttcaacggctcttacggttctttcaatacgcacaaggaaacggtgaaagtaggaaccggactgctgaacaaccactggacttttgacgcccgtctttccaacatcggtacggacggatatatcgaccgggcttcagtagacctcaactcttactatctgcaaggaggatatttcgcagagaacacttccgtcaaactgattgcatttgccggaaaagaaaagacttatcatgcctggggatatgcaacgaaggaggaaatggagaaattcggaagacgatataatccttgcggggaaatgtataccgacgccgacggcaacaaacattattatacggaccaaacggacaactacctgcaaaagaactaccaactacttcttaaccatagtttttctaccgcatggaatctgaacgtagccttgcactataccaaaggcgacgggtattatgaagaatataaacccggaagcagcctggtggaatacgggttaaaaccattcaacccggacggaacggaaactaacgaaagcgaccttgtccgacaaaagaaaatggacaacaaattcgggggaggtgtattctcccttaattatacaggaaaccgcctgaccgcttccttaggaggtggcctcaaccaataccggggaaataacttcggaaaagtgacatgggtgaaaaactatatcggcaacctgtctcccgaacatgaatattaccgcaacaaatcaaagaaaaccgacgggaatatctatctgaaagccaactatgatctgaccagcacgttaagcgcttatgccgacctgcaataccgccatattgattacacaatcgatggagtaaacgataaatatgactggaataaaaacgccctgcgcccgctagccgtagataagaaattcgattttttcaatccgaaagtcggcttaaactggaatataactcccaatcaccgcctgtacgcttctttctccgtagcacagaaagaaccgacaagaaacaattatacggacggcgatcccgactcctacccgaaagccgaaaaactgcttgattacgaagcgggatatacgtttgccaacccatggctgacggcaggtgccaacttctactacatggattacaccgaccaacttgtcctgacaggtgctttaaatgatattggtgaagcactgaccgaaaacattccggacagctaccgcatgggaatcgaattaatgctcggtatcaaaccgtgcaaatggtttcagtgggacatcaatgccacatggagcaagaatcgcatcaaggattttgtggaaagtctgccgggctatcattataacgcagatgaaacagtaacttcccttccaactgtcctgataaagcataaagacacccacatcgctttttcgccggacttcctgctcaacaaccgtttttctttcaattataaaggcttcgaggcttccctgcaatcgcagtttgtaagcaaacagtatatgaccaatgcggaagtagaagaactgactcttgacaaatactttgtcagcaatctcaatctggcgtacaccttccgtcccaagaagattctgaaagaagtcacattgggattcaccgtttacaacctctttaacgaggagtatgaaaacaatggttgggcttcaagcgattacaccgatacagtggaaaaccggggaaactatgccggctatgccgcacaagccggaacaaacgtcttgggacacgtgtctttccgcttttaatgacatcagcagattatggaactggactttttagaaatattcggtacgctggtcggtttagtctacctttggttggaataccgggctagtatctatctttggatagcaggtgtcgtcatgcctgccatttacatctttgtatattacaaggcgggactgtatgccgactttggcatcaatatctattatctgatagccgctgtctacggttggtttttctggatgtggggacaccggaaaaagaagtgccggccggcagaccagccaaccgccggtcgctccaaagacctccctatcgtgcacactccgtggaaatgttaccttccactggcagttgtatttattgtcgcctttatcggcattgcatggatacttatcgaatataccgacagtaacgttccgtggctggatagctttaccactgccttgagtattgtcggaatgtggatgctggcacgcaaatacattgaacaatggtttgcctggattatcgtcgatatcgtctgctgcggactttatatctataaagacctctatttcacctcagctttgtacggactttactccattatagctatctttggctacttcaagtggaaaaaactaatgaacatacaatgataaacgaacactatactcccgaggcagtgatactggccaacggtgaatacccaacttgccccgttcctctgacaatgctggaagaagcaagttttgttgcttgctgtgacggtgcagccaatgagtacatttcccgcggacatactccggatgtgattgtcggcgacggcgactctctttcaacagaataccacaaacgcttctcccctattatacatcagatacccgatcaggaaacgaacgaccagactaaagccgtccggtatctgcaaaagagaggattccggagaattgccattgtcggagcgaccggcaaacgggaagaccatacattgggaaatatcagcctactgctggattatatgaaaagcggcatggaagtacggaccattactgattatggagtatttgttcctgcaaaagatacacaaacctttgctgctcatcccggacagcagatttccattatcaatttcggagcgaaaggattgcagggagaaggattggtttatccgctaagcgatttcaccaattggtggcaaggcacgctcaatgaagcgacttccgatgaatttacaattcattgcacgggagagtatttagtattccttgcttttatgtaaaacagacatcgctgtgccaagtttgttccaccccattgacacagttgtgccatcggcttggcacaactgtgacacagcgttgtcacaatcgtgccaaggcggtggcacacacccttgtcaggaacccttccagctgttacctgtacgttgaaaaatgcggcaacaggaaagaatacttaaagagaaagcagatagttcttgaaatctgcaaattcctttgtcatctgcaaacttttcttctcgcctttcataaactcctgcaatttgacaggtatctctaccgattcgccgataatgctttctactgtttcaaggaacttggccggatgagccgtttcaaggaacacaccggtctcgccttctttcagtccttcgaccaaggcacggtatccgcaagccccgtgagggtcgagcaggtagtgatgttctttccaggtttcttttaccgtttcgcgaatctgctcgtcagtgtaagtcttacccgaaatctcggcagagatagcggcatgagaattgccgtacaagtcgattacacgggcaaaattactcgggtcacctacatccatagcattggcaatcgtagcaatggagggacggggattgtacttgcctgtctgcaggtactgatagaagatatcattacggttgttggcggcaataaaacgcttgatgggtaatcccattttctttccgaacaatccggcagtgatgtttccgaagtttccgctaggaacacaaatcacagcattagccgcttttccggcacgcttcaactgggcgtaagcatagaaataatagaatgcttgcggcaggaagcgggctacattgatagagttggcggaagtcagggaaagatgttcattcagttccttatccatgaaagcggcttttaccaatgcctgacagtcatcgaatgttccgtctacttcgagtgcagtgatattctgtcccaatgtagtgaactgtttttcctgtatctcactgacttttcctttcggatagagcacatacacatgaataccttccacccccagaaagccgttagcaacagcgcttcccgtatcaccggaagtagctaccagcacattgacattcttctgtccttcttttttaatgaagtaccccagcagacgtgccatgaaacggccgcctacatctttgaaagccagtgtcggtccgtggaaaagttccagagaatagatattgtccgctacctttaccaaaggcacatcaaaacttaatgtatcatatactatctgtttcagtgtatcggcaggaacatcttcgccaaagaacgcatcagcaacacgataggctatttcctgaaaagacaatgtatcaatcgtatcgtagaactcttgcggaagaggtttgacagtcataggcataaacagtcccttatcggctgcaagccctttcaccactgcttcctggagggaagccattggtgcttgtttattcgtactataatatttcataatctgtggtgacttatttcatgaattcttttataaactcgtcttctttcaacacaccgtaactaccgctgcaggcagctacctcgtcgtatacctgcacctcatcgggttcgatgcccggataccagataaggaacgggatcggttcggacgtatgcgtgcgaagttcacagggagtaggatgatcgggcagaacggcaatcgctaccggttcgttccagtctttcactgcttcgtaaataggtcctacggcacgtttgtcgagattctcgatcgtgagaagtttcaggtcgatatccccttcgtgccccgcctcatcgctggcttcaatgtgaagataaacaaaatcgtccgttttcagggcttccagtgcggcagctactttattctcgtaattcgtattataaagcccggtcgccccttccacagcaatacgacgcaaaccggcatagtaaccgattccgttaatcaagtcaacagccgagattaccgctccctttttcacttgcgggaaagtttcggagaaggtaggcatttgcggacgataccccggactccagggccaaatactgtttgcagggtccttgccttctgccatgcgtttcaggtttaacgggtggttcttcaatagttcctgcgatttcaaaatcaagtcgttaaccaagtctgccgtttcctgcgcttccggtgccagaggtttcaccattagcggacggaaaggtttcaaaggcacatcgtgcggaggggtacagtcgagttctttatttccccctttgataaccaacaaatgacggtactgtactcctgtatggaaacgcacgcggtcgttgcctagtttttcttgcagatattgaatcagcacgtccgcttcttcggtagatatatgcccggaagagtgattcttcagaatctctccttccacacaaatcagattacaacgcattgccatttctcccggttgcaggtctacaccgatgcttgccgcttccagtggtccgcgaccttcgtacactttcgggagattatatcccagtacggacatattggcaacctcactgcccggatgaaagccttcggctacggttatcaaccgcccgttacgtcccatgcgggccaacttatccatgtaaggcgttttggcatattgcaggagcgtcttgtctcctaatgacttcacaggccaatcggccattccgtcacccaatatgataatatgtttcataaggcattaaacgtttgcgatgctcataatatcggcaaatactccggcagccgtcactccggcaccggcaccgtacccctgaatcatcatcggatattctttataacgttccgtagtcagcaagatgatattgttactgccttccagaccgtagaacgggtggttggctcctacttcctgcaaaccgacagaagcttttccgtcttccagtttggcaacgaaacgccaatgtttatgctctttttccaatacttggcggcgagcttcaaagtctgcgtcgagactgggcacccgtttccagaagtcgtccaaggaaccttcgaagaagtcgttcggcacaaagagatttttttccacatcttcctgttcgatgcggtatccggcttcacgcgccagaatcaccaacttgcggataacgtcttttccactcaggtcgatgcgcgggtcgggttcggagtaacgttcctcctgcgccattttgatagtacggctgaaaggaatgtcggcgctaatcttattgaagatataatttaatgtacccgaaagtactgcttcgattttcaagattttgtcaccactatgaatcaggtcgttgatagtgttgataatcggaagtccggcacctacgttcgtttcaaacagatatttcacaccgcgctggcgggcgatcgtcttcagttcacgatagttttcgtatgccgaagaagcggcaatcttgttggcagctacaacggaaatattgtgttgcaaaagatctttgtagagtgaagcaatatcgggactggccgtacaatctacaaatacggagttgaagatattcattcctacaatctcgtcacgaattgtctgcagattactgtcttttcctttctgctgcaactcttcacggaaattggcgaggtcgaacccttcacggctaaacatcgctttcgttgcgtcaatgatacctacaacgtgcagtttcagtccgttttccagcattagcttctcttgctgacaacgaatctgctctaccaggcttccgcctaccgtaccgataccgcaaataaacaaattcaagacctgatattcggacaggaagaaagagtcgtggataacgttcagcgatttacgtaatgattttgcatcgacaacaaaagagatgttggtttccgatgcgccttgtgcacaagcgatcacattgataccgttgcgtcccagcgtaccgaacaatttacctgcaatgcccggcgtatgcttcatgttctcacctacaatggcgactgtcgccaagtttctttcggcgagaatcggggaaatttctcccatttctatctctttcgcaaattcttcgttcagcacttcacaagccagatctgcatccgcattgcgtacaccgatagaagtactgttctccgatgaagcctgcgaaacaaggaatacactgattccattcttcgctaacgccttaaagatacggtagttcacaccaatcacacctaccatacccaatccctgaacggtaatcagactggtatcattgatagaggaaattcctttaatcgccttgctatgcggattggagacttcttgtttgatgacggtccccactccatccggattgaacgtattctttattataataggaatattcttatgatatacgggataaatcgtcggcggataaactactttcgcaccgaagttacaaagttcggttgcttctacatagctaagttcggagatagtataagccgttgaaatcacacgcggatcagcagtcataaagccatccacatctgtccatatctccaaactgtcggcattgagcgccgcagcaatgatggcagccgtataatccgaaccgccgcgaccgagattggttacttctccggttgtcttgtcggaagaaataaagcccggcaccaatgctactttcggaatagagctgaaagtctcttttaccagtttgttggtcagatcagcgtcaatcgtatgtttgttatgcttcttttcagttttgataaaagtacgcgaatcgaaccacttggcatccttaatcagctcggcaacaatgatagatgaaaggcgctcgccatagcttacgattgtgtccgaagtcttcggggaaaggtctttaatcaggtaaataccctggaaaatatccttcaattcattcagcaattcgccaatctgacgttgcaacgccacttgcccttctccggcaggaaccacctctttaatcatttccacatgacgataaacaatttcgcggaactcaccctcataggccgaatctccggtagccgccattttcgatgtgtttatcaatttatcagtgatgcctcccaatgcggaaactactacaataaccggttcgccggccgatgccgactctacaattctctttacacttaaaatgctgttcacggaacctacggacgttccgccgaatttcattactttcatgaagatacttattttaatgcaatgtcctgtgtatagttttacagaacgattggttgtttacgaaaaagtttaatttgaattttgcctacttacacaggcgtgaatcacgtagatacacaaatactatccctcaaccccaaagggtcatggtgcacatggatgtgactgtatgcggatagtacttcatcatagtccttgtttctactcttgtttttgataagtgtcgcaaaagtaataataaaaacattcaatctatcactttttcccgtttttttctgataaaaagaatcctacgtttcttttctcctcaatcaacaggcagcatttttatgacattttgctacttatttatcaattatattgttatatttgcgaaaacaatcgcagaaaattagcttatgtaccctttaaatacttccgtattgttaatatacacaggtggaacaattggtatgattgaaaacaccacaaccggtgctttggagagtttcaacttcgaacaacttcagaaacacgttcccgaattgcagaaattcaactttccaattgatacttaccagtttgaccctcccatggattcttcggacatggaaccggatatgtggcggaagctggtctgtatcattcacgaaaattacgaccgctatcagggattcgtcattctgcatggcacggacacaatggcgtacactgcgtcagcactcagcttcatgttggaaggactggacaaacctgttattctgacaggttcgcaactgccgataggggtactccgcacggacggaaaggaaaatctgatgacgagtattgaaattgccattgcacagaataaggaaggaaaagcgcttgtcccggagatctgtatcttcttcgagaaccacttgatgcggggaaatcgcactaccaaaataaatgccgaaaacttcaacgctttccggtcattcaattatccggtactggccgaagcggggattcatattaaatataataatgtacagattcatgtgaacggagaagaacgggaattgaaaccgcactatttactggataccaatgtggtcgttctgaaacttttccccggcattcaggagaatgtagtggctgccattctgaaaatagaaggattgaaagcggtagtactcgaaacgtacggttccggcaacgctccccggaaggaatggttcatccgcttgctctgccaggccagtgcacggggaatcatcattgtcaacgtgacacaatgtagtgcaggtaccgtagaaatggaacgttacgaaaccggatatcagttgttgcaggcaggggtcgtctccggatatgacagtacgacggagtccgccgttaccaaattaatgtttctgttgggacacggctatacaccggacgaggtgcgtgaccggatgaaccgttcaatggcgggagaaataactctataaacttaccggctctatataacgttccgtccggcattgaggaaggtatccggtaccgatgaggacttctttccttaccgtccaacagttaataacatttcagcaataacgatgagtttggaaacggatgattgaacaataaactgattttgccgggatttgttttgcgcgttgaacagattatacatacttttgtattctctagaaaactaataagaatacaatggctaaagaaaagaccgtatatgtgtgtagtaactgcggacaggattcaccgaaatgggtaggcaaatgtccgtcgtgcggagaatggaatacgtatgttgaggaaatcgtacggaaagagccggttaaccgccggccggtatcgggcatagaaacgcaaaagcccaagccggttattcttagtgagatcatagcggacgatgaaccgcgaatcaatatgcatgataatgaactgaaccgcgtactgggcggcggacttgttccgggttctttagtactgatcggcggcgaaccgggaatcggaaaatcaactctcgtcatgcaaaccgtactccgtatgccggaaaagaaaatcctttatgtatccggcgaggaaagtgcacggcaattaaaattacgtgccgaccgtctttctgaggtttccagcgactgcttcattgtttgtgagacttcccttgaacagatttatgtccatatcaaaaatacgaatccggatttggttattatcgactccatacagactatctctacggaaaccatcgaatcgtctcccggaagtatcgctcaggtcagagagtgttcggcatctatcctacgtttcgcaaaggagactcatacgccggtcttgcttatcggacatataaataaagaagggagcattgcaggccccaaggtgttggaacatatcgttgatacagttctccaatttgaaggtgaccaacattatatgtaccgtattttacgcagtatcaagaatcgcttcggtagtacggccgaactgggtatttatgagatgcggcaggacgggctacgccaggtgagcaatccttcggaactactgcttagccaagaccatgaaggaatgagcggagtagcaatcgcttctgctatcgaaggagtacgtcccttcctgattgagactcaggctctggtaagctccgctgtttatggtaatccccaacgttcggcaaccggatttgatatacgaagaatgaatatgcttctggccgtcctcgaaaaacgtgtcgggttcaagcttgcacagaaagatgtatttctgaatatcgccggaggactgaaagtgaatgacccggccatcgacctcgcagttatcagtgccattctttcttcaaatatggatgcagctatcgaaccggaagtctgtatggcaggagaaatcggtttgtcgggagagatacgtccggtgaaccggattgaacaacgtatcggagaggccgagaagcttggcttcaagcgtttcctgttgcccaaatataatttgcaaggcattgatacgaagaagctaaagatagagttagtgcccgtaagaaaggtagaagaggcgttcagggcgttattcggataagacactgatttatgttatctgccttatctttttataatctaaagtaacaataaccaaatgatacaagaataccaactccgcgtacgtcccgaaatcgcagcgaacgaacaacggctgaaagaatatctctctgaagagaaaggactaaatttacgcaatatcaatgctacccgcatcttaaagcgaagcattgacgctcgtcagcgaacgattttcgtcaatctgaaaatacgggcctacatcaacgaaatgcctgaagaagatgaatacgagcatacggtatataatagtgtggaaggaaaaccacaagtaattgtggttggtgcaggtcccggcggattgttcgccgctctgcgccttatcgaactcggattacgcccggtgattgtagaacgcggaaaagatgtgcgtgaacggaaaaaggacctggcgcaaatcagtagggaacatacggtaaatccagaatccaattatagtttcggagaagggggtgcaggagcttattcggacgggaaactttatacccgcagtaagaaaagaggaaatgtagacaagatattcaatgtattctgccagcatggagcttctacggctatactggctgatgcacatccgcatatcggaacggacaagttgccgcgtgtcattgaaaatatgcggaatacgattctcaaatgtggcggagaagtacatttccggacaagaatggatgcgttgattattgagaataacgagatcaaaggcattgagacaaatacaggaaagacttttctaggtcctgtgatacttgcaaccgggcattcggcaagggatgtttatcgttggctcgcagctaataatgtaacgattgaggcaaaaggtatcgctgtcggtgtccgtctggaacacccggcaacactgatcgaccagatacaatatcataataaaaacggaaggggaaaatatctccctactgcagaatatagtttcgtcacccaagttgaaggcagaggcgtgtatagtttctgtatgtgtcccggcggctttatcgtccctgcagccagcggaccggagcaagtggtagtgaacggtatgtcgccttccaatcgtggctcgcgctggagtaattcgggaatggtggtagagatacagccggaagatttcataaatgaagagttgagaatggaaagtggagagttagctgcgcaacaaaatgaacaactactcgctcttaacccttctctcagtagctctcaactttcgatgttcaatacccaacttctccccctgcactttcaggaagaattggaacgtcaatgttggttgcaaggcggcagacgccagacagctccggcacagcgtatgctggatttcacccgcaagaagctaagttatgacttaccggaatcctcatatagtccggggttgatttcttctccgcttcacttctggatgccggagtttatcagcaagagattatcactcggctttcaacaattcggacgcagcagtcatggcttcttgaccaacgaagccgttatgattggggtagaaacacgtacctcttcccctgtccgcatcatacgagataaagagacgcttcaacacgtaaccgttcgcggactattcccttgcggagagggtgcgggctatgccggaggaatcgtttctgccggagtagacggagaacggtgtgcggaagcagtagccaactatctgaatcaatcatccgaacaatagaaaagaatgaactacaaacctgaaatagcaattattgagccgaatactctctgtagcctgggactcaaatccatattggaagagatcatccctatggcaacgatccgtaccttccataacttcaatgagttaatggatgatacgccggatatgtacgcccattattttatctccgcacaaatctatgtggagcataacgctttcttccttccccggaagcgaaaaacgattgtccttgccagtgacagcccgcaattccaactttccggtgttccggtactcaatatttatgagtcggaagaaaaactggtaaagaatatcctgaaacttcatcaacatgctcatcacaacggatatcccgtgaaggatatgcctccgatgattcctgcagaacatcctcaggtacttttatctgctcgcgaaattgaagtactcgtgctgattaccaaagggttaatcaacaaagaaatagcagataaactgaatatcagcctgactaccgttatcactcacaggaaaaacataacagagaaattaggtattaaatcggtatccggtctgactatttatgccgtaatgaacggatatatagaagcagaccggatataagtgtttttactattgactatcaattagcccatactactgagttatatggcatatcagaaagatcggtgtaatctgtccactctttgctgttccaatcaaaatcagaagtggtgcgcccttcttctttatcggaaaagagcacggtgattgtaccgatacggtcaagtctgttagttattgaaacaactttcttatcggacaattgaacaaacggttcttgtaactgtaacttgctgctctccttatccggttcaagaagacggaaactgctgccacgattgtcacctgatgagtaataaatcatgtaaccgaccttcttctggtataataaggaaggactaccgctatcgggaagtgccattccgaaataaaacggaataatggcatctgcttcaatcccttcaagtacataaaagccatttctataattatacaacatgggaacccatttcccgtttcctttccttgccgacaataaaataatctcattaccttgcataaacacacccggataatccccgaattgttcaggagtaaatccttccggaagttcaaattgaggttccggcataggaaaattactccgcgtcttagttgcataattactttgttccaaacctgcggaaacattatataatgaatatcctttacctctctgttgaatggccgcaatatcatttccgctgccaataaccaatgccagtgtattataatcgtagaaacttaaagctttccactcgcctgtacagaaatcaaggaagaagggttgctgcacaccgttttcttttgccagcccgcacagcccataagtcttttgaagattgacaaccgaacggaagtccggatgcgcactcatatcccacgtttttttaccagtgacggtttcttcagcatacgcccgctctattgtcttgtcggtctcatttattccatacagtctgaaatctttaggcgtttgtccatctgcaagtagtacttttcccaacgacattctctcacttgccctgttcaggaatatctcaacacgtgattccggcttgcgataaggcattcggatactcattccattcgaatgcctctctacaatctccgcactgacaggtccaagatacccttccgggaacaagggttctccaagatcccaacgaaagtcaaagtccacctggtcgccttcctgaaaaccatcaccataaatatgaacgatatctcccggtttaaccgtttggttggcttccgtcacccctgcattagtcaccaatatcttttctgacgggccgtccttttcatcgctgcaagaggtcaacgaaaagcagagaagtgttatagcccaagcgaatagtttattctttgtcataatccgtttctatttagttctgttgtcgggcaaagatatgatattatcaggcaaataaagaatatttccgacaaaatcttccggatattcatagcatattttgtttttctatactgcataatcctaataaatgaggattgcctgtcaacgatatttgccgttactttgcaccggacaaattaactacagatgaagacaaagaatattatgattgccctcacgctcctaacgacagggacagcatgggcggaagatttcccgaaagactcactgaaagtggtagatatcgaagaagtggtagtaatcgctactccgaaagagaaccgtaaactacgtgagttgccggtagctaccacattattatctcaaaaagatatgcaagcaaatcaggtacactccgtgaaaaacctgacaggcatcgttcctaacctgttcatcccggactatggttccaaacttactacttctatttatatccgcggaatcggttcacgtatcaacaccccctccgtagggctttatgtagacaatatcccttatatagataagtccgctttcgacttcaactacgctgatatcgaacgtatcgacattcttcgtggtccgcaaggtactctttacggccgtaatacaatgggcggactaatcaagatacataccaaatctcctttcacttatcaagggactgatatccgaatgggagccgccacctacaacgactataatgtttcactgacacattatcatcgtatctccgaccgttttgctttctccaccggaggtttctatgaacatacaggaggtttctttgagaatgcagtacgcaacaatgagaaaatagataaaagcaacgccggaggcggacgcttccgcggtatttatctgccgacaccgaatctgaaagtcgatatgacattgagctacgaatatagtgaccaggggggatatccttataaatatacaggtgttacagaaggagaagaaactcgccccgaatatatcggaaaaatcgccaacaacgaacgcagtagctatcgtcgcggattattaaactccggagttaatatagaatatcaagccaggacatttattttaaatgcggtcacaggctaccaaaacctgaatgaccgtatgtttctcgatcaggactttacagaaaaagacatttatactctggaacagaaacaaagagcaaatacaatttctgaagagatcgtattcaaatcaaagccggagaagcgttggcaatgggcaaccggagtttccggattctatcagtggttacatacaagtggcccggtagatttcaggcaagaaggcgtaaaaactgtaattgaaagcaatgtaaacaaaatatttgaagggcttgctggtcccaagatgcgcatgacagccaataattccatattgggagttggcggtagttttgacactccgatattaaatggagctgtttttcatcagtcaacattcaataatctgtttatcaaaggactatctgccacaatcggtctacgtttagactacgagaaaattaagatggagtataattctatcagcaaccctctaaactttgacttctctttagcaatgggacctatgaatattaccagtaaaggtttggaagctataagctcattcattggcaaggaatccaccgactacgtacaattacttcctaaattcgctctccagtatgaatgggaaaaaggaaacagtatttatgcaactgtatccaagggatatcgttcgggaggctacaatattcagatgttttctgatttagcacaaggagctttaaaaaattcaatgttggatgcattagctgccgacccgaacttttctttaatggcggagagaatattaggaatgaaagatgaactgccggaggtgaaagcaacgactcaatacaagcccgaatattcctggaactatgaaataggttctcacctgactttgtgggaaggtaaactttgggctgaccttgccgccttctacatggatacacgcgatcaacaaatttctcaaatggcagaaagtggtttgggacgtgtcacaatcaatgcaggaaaaagcagaagttatggtgtcgaagctgccctacgtaccagcctgacaaatgagttgagtctaaatgcaagctacggatatacgtatgccacctttacagattatgtaacaaagcaaaaagacagtgagggtaatcttacggataagtcatataacggcaagtatgtacccttcgtccccaagcatacattaaatatcggcggagaatacgctattacttgcaatccccgttctatctttgaccgcgtagtgttccaagcaaactataacgctgccggacgaatctattggactgagcaaaataacgtcagccaatccttctacggtactctcaactggcgcacaaacttagaaataggtgatgcaatgattagtttttgggcacgtaacttcttgaataaagattatgcagccttctactttgaaacaatgaacaaagggttcatgcaacaaggacgtccgatgcaatttgggatagatcttcgctgccgattctaaggaactataaggagggcggagatccccgctcttacaataatttacttcgaataaaaaaaggaagaactgattaagttcctccttttttatttatccaatatcaatgaagcgttatttcttcgctaactcattaattacgtccataatcttctgaccgatttcttctgcagcttccattgtagaagcttcgctatatacgcgaataatcggttccgtattacttttacgcaaatgtacccatttgtctgcaaagtcaatcttcacaccgtcgatatcgttgatttcctcattcttatagatttcctttaccttagcaaggatagcgtctacatcaatttctggagtcaggtcgacacggttcttggcaatgaagtaaggaggataagtagcacggagttcgctgactttctttccttcatgagccaaatggctaaggaacaatgcgataccaaccaatgcatcacgaccgtagtggctggccggatagattactccaccgtttccttcaccaccgataacagcattggttgccttcatctttgttactacgtttacttcgcctacggcagaagcattatattccataccatacttacgagtcacatcacgcaaagcacgggtagaactcaagttagaaacagtgttacccggagtatgtttcagtacataatcggcaacagtaaccaatgtatattcttcaccatacattacaccgtcctcgcaaatcatagccaaacggtcaacgtccgggtctactacaaaagctacatcagcttttccacctttcatcaggttcatgatgtcacccaagttcttttcaagtggttccgggttgtgctggaagtttccggtaggctcgcagtagagtttttctacatgtttcacgcccagacgctcaagcaattcaggaagaataataccgcctaccgaattcacacagtcgatagctacacggaaaccggctttcttaatggcttctacatccactaagtcaagagccagcacgctatcaatatgcttctgattataggtcaggtctttacgataagaacccagatgatctacatctgcatagtcaaattcctcagcttcagcaatacgaagaacttcgttaccttcggctgcattcagaaattcaccatgttcattcagtaattttaatgcgttccactgtttcggattgtgagaggctgtcaggataatacctccacacgcgccttccattgttacagccaattcggtagtcggagtagaagccagatcgatgtctacaacatcccagcccattcccattagggtaccgactactacgttctttaccatttcaccggagatgcgggcgtcacgtcccacaacaatcttattgctttttactttgcaagtcttacgtattaaagtagcataagccgaagtgaattttacgatgtcgagcggattcaatccttcgcccgctcctccgccgattgttccgcggattccagagatagatttgattagagtcataggttttaactaatagatttatttaatgttagtgctttaactttttgctttttcaaacttccagatatcataataatatggaatcacattctgttgcgaaatactatgccccatttttgaaggaataatcaaacgtacatgagcattatcccgcaagtatggcaatgccaacagccatccaccgggaatagctgttccgtacgaatttgctgtccacaaataatcataatcaagaggagtgcttaaaacaattccataagctgatgaattttcgttgacataacggaatgtaaggggagatctataataatcagaagcattaatatattcaggaaggacaacattgaaacaagtcaactcattactcgctatattcttttccagatagcgggcacaaatcacattattattagcaaaagtatcttccggatcatccgcatttccacgatctacaatctgcatatagacgccatttgagaaagcaacatattcatttcttgacagatcggtaattgtatcccgttcgaactcctctaaggagatcacattaattgcactatctttgatgaacttattcaccgcattcttttcatcctccagcatttctgcataagtcttagaattgtcgcatgcctggaacagacttccggctgctatcacagagagaaataaaaatataagtttcttcattatctgttaattagctatattccgcacaaatgtatctcaaaatcattaaaagttgaaagaggaatgttgaaagttcgtatcttttaacctttcaatattcacttttaaccttccgcactcagctttttgctgtgagtaaaggtttatatttctccagtgctttctcaaagacagctttggcctcctccattgttccgaaaaactcaccgcccgaggcattgagatgtccgcctccgtggaaaaattcggcagccaactgattgcatggaaagttccctaccgaacgaagggaaattttaatcatcggtttctccgtatcctcacgcaggaagcaggagaaacaaacgtttttaatagtaagagggatattcacaaacccttcgctatcaccttttatataattaaacttactctgttcggcttttgtcaatgtgattaaggctgcattgtagtccgaataaacagtcatattagacaacacatatcccattagacgcaaacggctttccgagtacgtattatatactttacgatagatatcatccttatcaatccctttggaaagaagttcgctgatgataaaatagatttcccgattgttggagttgtaggtgaatccgcctgtatccgtcatcatacctgtgtagatacattcggctccttctttagagatgtcgctaaaatagcccatacggcagatcaaccgaaagatcaattcggaagtagaagaaatcttcgggtaagacatcgtaatcttacagaattcttccgggtaaagatgatgatcgatcattattttacgtgcgggagaagctgctatcgcatccgccatatcatcaatacgtttcaatgcattgaaatccagacagcagattacgtctgcttcggctatcaacttatccgcaaattctttgtaacggtcgtacaagagaatgtctttgctgcccggcatccaccgaaggaaatcggggaaagcattgggaacgattacgtttactgtcttttcctgtgaatcaaaaaaatggtataatcctagtgaagaaccgatagcatcaccatcaggagatacatgagatacaattactattttgtcagcccgttcaaaccatttggtaaaatgatctattttggcttgttcaattactttcgtcaacatactataatactttatcaagatgcaaatgtacgataaatctttgtacttagagcaaaaaccgcacagaacctttttcggataaagagataaaacgcaaaccagactgtttacattcctcttcaaagagttgcttgcgatgttccgaaagggatgcatctaatataatgcactccggagcaaagagcaacctgagttctttcaaatgaccgttatagcctttgcataagtaaagataatcaatatataacggagtagcggcagatttgttccgccagcgatgatcggtcaccatacaaatgcgtcgtccatggtaagacagtatttgttcccggcagcagagcgcggtatcttgataatcggctgtcacctctaacggcgacaataattggtgatgattccaataatttgttgcaacacgatacaactgccttttatcagaaagactatctccataaactatccgtgaattcccattattgtctatacaatgaactgccggacaaccgcgaacattatagaaaacaatactatccagaggacggtccacccaggacatagacacatgatagacacctaacaataatattgaaaagagacagatcagaagattctttaatccccggtttgcgaaatagtaaaacaccagaccgccggagaggtaaaggccgagtacttccaactgatatagccatattccgtcaatagaagcataaggaagctgttctacccaatgaatgaaagtattaagtgcatccagaagaaacttgacgccctctgctatagaattttgtatccagtgtagcggagtcaggagaagcataacaacggcagaatacaaaatgatggtaaccagaggaatgactactaaattagtaaacagaaaatgagttgaaaaacgggagaaataaaacataacaagaggagcagtgcctagctgtgccgcaatagatacgctcattagtccccagaagtatctcccgatcctactctttaccggaagtaaccgataaatgggtttatatgtcagtagaatagaagcaacagccaagaaggatagttgaaaaccgacatcaaacagccataccggattacaaagtaacataatccatgcagtcgccgccaacgtattcaaagataaagcctgacgattaaaaatatccgccactgcccagatcgaaaacatacaagccgaacggactaccgatggtgaaagtccggtaaaaaaagcgaaagcccaaagaaggataagaagaaatacagcccgcaaacatctgcctgcgttccctctcttcgcaacaggactcaatataaaaaagagcaaggcatacaacagcccgatatgcaacccggacaatgcaagcacatgactggcaccagctaccgaataactttcacgaacagagtcacttagttcggttttatcacctacagtcaaagcagaaagtacagccagtccgtcaccttcaaaaccaagttggcgataaagagaaagtattctgtcgcgacaagaaccggctacctccagaagagtgctcttccgagcaatatttccgttaccggaagataacatttctgaagatgccagcatccattttccggacacgacatatcctgttccactgattcccttccgcatcagataacgggcatagtcgaactcatcgaaattctgtccatttacaggcggagaaatacgagcagacacccataattcatctccccgctttaatccggcagccgccgaatcccgttgcagatatagaataaccttacaatcatctatcgaatgaatagctgtcgaatcacgctgttctttcaacaatacccggcaaagaaaagtatgttccttagtttcaggagtatccgtcacccacccccgataaaccgtttcctctttcgggaaagtatatcccgttgcatgttgtagctgccaggttattcccacccagccacctgtaaaacaaagagcaagaatcgcaattccgaagcaccaacgcagagaatagcgtccaaggaaataacaacctatagagagaccggctaaaaaacaaaaggcaaggattccccaaaagagctccagcgaaccgttgaagaaacgatcaccacaaaaaacgcctgctatccaagggataaccaggcgtatataaggatatctatggagatatgataccacaattctctacaactcgtgtaaccggtgaatcattgcttccggatccggtgctccaaagactgcattaccagctaccaaagcatctgcacccgcctcaacgagacgtgcacccgtttccagattcacaccaccgtccacttcaatcaaagccttcgagccagtctgttcaatcaaagcacgtagttcacggactttttctacggaatgttcaatgaacttctgcccaccaaatccgggattcacgctcatgacaagtaccatatatacatctcggataatgtcctgcaacaaagctacgggagttgccggattaatcgtcacggcaggttgcatccctgcctctctaatctgttgtaccacccgatgcaaatgagggcaagcctcataatgcacattcatcgtatgcgctcccaatgcttttacttccgggataaacttctccggattaacaatcatcagatgcacatccaacggtttcttactcagctttgccacatatttcagtaccggaaagccgaatgagatgttagggacaaataccccgtccataatatcaatatgtacccattccgcctcactgcggtttaccatttcaatatctttcgccaaatatccgaaatcagcggaaagaatggaaggagcgataattggtttcataattcttttattttagattcggtttgtctcgaactcgagacggttcatgttatctattatcaggtcagttcattttatattcgttcgtcagacggaatccacgaagcaattcatccgttttcagacgtttcttgccgggaagttgcaaagaaaggacagacacgaacccatcgggcacagccacctttatatatttcttcccatccgtcacaatcgttccggcagacaattgatgcgcttcactaactttttcgctttcgaaaatcttcacgaccaccacttctccttcaggactgaccaattcactccaggcagccggataaggagagagtccgcgaataaaatcatagactttcttcaccggttgattccagtcgatccggcaagtctctttgaatatcttcggagcaggacgaagctcaccgacaatcgccatttcttcctgcggaaccggttttaccacaccgttcagaatggcgtccaccgtctcaacgaccagctttccgcccaacatcatcagtttatcatgcacaatctctacattatccgtatcggcaataggtacacgtacctgctgaatgacttctcccgtatctatctcatgcttcaggaagaaagtagtgatacccgtttccgtatctccattaattaccgcccaattgataggagcggccccccggtattgaggaagcaaagaagcatggagattgaaagttcccaaccgtggcatactccacaccacttccggtaacatacggaaagcaaccacaatctgcaaatccgctttccattcacgcaacgcctgtacaaacgcctcatctttcaacttctccggttggagtaacggcaaattctgttcgagcgcatattgtttaacgggagaatattgaatcttatgtccgcgtccggccggcttatcgggcatcgttatcacgcccacaacgttatatccgccttctaccaactgacgcaaggcctccaccgcaaaatcgggagtacccatatatactattcttaaatcttctttcttcataatctaatcacttttatctacatagaacccaggccccggtaccttgtcggacggcgggtggttagtcttctgaaaaatgtactaatacctgccggtatgagttaaatatcttcgatttagagacaaatccctgataacgtccttcctcatccaccacgggaagattccaggctttggtatcatcgaaagtctgcatcacctgttccattccgtccgaatcgaatatcttggccggggcggatgtcattaatttattaacagtaaaacgatgataaagttcctgacggaacatgatgttccggatatcgtcgagcagtacaactcccaacagttcgccagtcttcttatccgtcacgggaaacacattccggtgggaagcggcgatagccttcaccagttcgcctaaatccatttcaggatgaaccactacgaaatccttctccacgacattctccattttcatcaatgtcaataccgctttatccttatgatgcgtaagcagttgtcctttctttgccagacgcatcgaatagatactatgaggctcaaatgctataatcgtaagataagaactgacagacacaatcatcaacggaaggaacaagtcgtatcctccggtcagttcagcaatcaggaagacacccgtcaacggagcgtgcatcactccgctcatcactcccgccattcccattaaagcgaaattcttttcgggcagataagctgaaaaagcaagatcattgctgaaatgcgagaatacaaatccggcaatacatcccagataaagtgaaggagcaaatataccaccacatccaccaccaccgttcgtcgcactggaagcaaataccttcaataagataatcaacatcaaatagaccaataacagattgccgtagccgtagaacatggagttgttcatcaccgtatcccactccgccgcagacgttccgttcagcaacaggttgattgtatcgtaaccttcaccatagagaggtggaaaaaggaaaatcagcacactcagcataacaccgccgaaagccagtttcttataaggattgttgagcttaccgaaaactccttctaccgagttcatagcacgtgtgaagtacagcgaaatcagaccgcagaaaatccccaacaggataacgaaaggaatacgttccagttcgaatgcctggtcgagatgaaacttgaacatggcttccgtgccggtagtgatatacgaaacggttgccgccgtcactgcagaaatcagcaacgggagtaaagaagacatagtcagatctatcatcaggacttccagcgtaaacaccagtccggcgatcggagccttaaagattccggcaatcgcacctgccgcgccacatcctaccagcaacatcaacgtccggtgctccattttgaacacactacccaaattggaaccgatcgccgaccccgtcagcacaatcggcgcctccgcccctaccgatccgccgaatccgatcgtaatggcactggcaatggtagacgaccaaatgttatgccgcttgatgcgtccctgcctacgggagatagcatacagaatcttggtgaccccatggctgatgtcatccttcacaatgttacgcacaaaccagcctgcaagaaaaattccgactaccggatacaccagatacaaatagttggcttccgtcgcattgaaattatctgttaagaagttctgtatctggtgaatgaagaacttcaatagtaaagcggcaaacgcagtgaaaatccccaccagaaaactcaatatcaggataaactgtttctccttgatattattttcccgccacttgatgcaacgctgcaataaactaagtttttcctctttcatttattcgcgaattatcttaatcactccacctttgtccagttttataatacttgaggggttcggtctgctcatatcgtcctgacgatagccgacgatatagtctactgccgatttgatctcgtcactgatttcactaaagttggcagctcccggctggccgcttacattggctgatgtagacacgattgccttgcggaactgctggcaaagacgtttggaaaacgcttcattcgtcacacggattcccacgcttccgtcttccgcaagcaggttcggagccaaattgcgtgcaccggaatagataatcgtcaatggtttatcagcaacttctatcaaatcccatgccacatcaggaacatcctgtacataaaaatccaccttgacagacgaatcaaccagcaccagcatagctttgctatcggcacgtttcttaatctcatatacccgacgtacagcttcttcgttagtcgcgtcgcagcctatgccccaaacggtatcggtaggataaaggatgacacctccttcattcatcacctgacaggcttttttaatatcttctatcatttcttgagtaatttcagttgagaataacacgcaaaagtactacttttgcgtcgaattcaaaaagattaagtgaaaacaatggaagaaatcgtatttcaccacacgctacctattcagttgcgcttcaatgacgtagataaattcggtcacgtcaacaacactgtttatttttctttttacgatttgggcaagactgaatacttcgcttccgtatgtcccggagtcgactgggagaagaccggcattgtcgttgtccatatcgaagcagatttcgtcaaacagatcttcgcatcagaccatatcgccgtacagactgccgtttccgaagtaggaacgaaaagctttcatctgctccaacgggtgatcgacacaaagacgaacgagataaaatgtatctgcaaatcaatcatggtaactttcgacctggagagacatgagtccatgcctctgacggaggaatggatagaagcgatctgcaagtatgaaggcagggatttaagaaagaagaaataaaaacatatacctctcaatatcaaaccagctctttccaaccttatcatattggaaagagctgctttgatataagtcatatatatagccgcactccaacaggatcagaatctttatttatcataagagtatagcaaagttgctgtctgtttattacaaacttccgcccatccagtgacaaagttatcgttgcctaacatcaatctataaacgcaagctttgattataaaaatgaaagcttcgtttttataaatgaaggcttcgtttataaaaacagaacttgcgtttatagattgattcctatccgaaaaaagttcaatccttatccaagagaagtttagttttaattccggagaactttgatcttaatgccaaagaagtcatctattaaaaagccaccgtaaacacttaatgccaccattagcaaacttccgattttctatcccctttgaaatattttcgtcatatctacactcacctccggtttttttcgtacttttaccccttgttgggaagaagtgcctttctgacccctgagagcagaaaaagaaaaaacaatatataaaatgaatcacaaatggaattatcaacccattacacccgaacaggcagagacaagccagacattggcccaggaattagggattagcccgatacttggacaacttttggtacagcggggaataacgaaggcggttgacgccaagaagtttttccgcccgcaattgcccgacctgcacgatccgttcctaatgaacgacatggatattgcagtagaacgtctgaataaggctatgggaaagaaagagcgtattctgatttatggagattatgatgtagacggaactaccgccgtagcactggtctacaagtttatccaacagttctattcgaacttggattattacatacccgaccgctataacgaagggtatggcatttctaaaaaaggagtggactatgccgctgaaaccggtgtaggattgattattgtactcgattgcggcatcaaagcagtggaggaaataacgtatgccaaagagaaaggtattgattttatcatctgcgaccaccacgtgccggacgacatccttcctcctgccgtagccatcctaaacgccaaacgtccggacaatacgtatccgtacacacacctttcgggttgcggtgtcggtttcaagttcatgcaggcatttgctatcagcaacggtatcgagtttcatcacttgattcctctgctcgatctggtagcggtaagtatcgcttcggacatcgtgccgattatgggcgagaaccgtattcttgcttttcacggactgaaacagctgaacagtaacccgagtgtgggaatgaaagcaattattgacgtctgcggactctccgaacgggaaatcactgtcagcgatatcgtgttcaaaatcggaccgcgcatcaatgcttcgggacgtatccagaatggaaaagaagcggtcgacctgctcacggagaaagatttctcggttgcactggagaaagcaggacaaatcaaccagtacaacgaaacccgcaaggacctcgacaagagcatgacagaagaagccaacaacattgtcgccaatctggaaggattggccgaacggcgttctatcgttctctacaatgaagaatggcacaaaggggtgatcggtatcgtagcttcccgcctgacagaagtttattatcgtcccgccgtcgtactgacacggacagatgacatggcaaccggttcggcacgctccgtttccggttttgatgtttataaggcgatcgaacattgccgcgacttgcttgagaacttcggagggcatacatacgctgccggattatccatgaaagtagagaatgtggaggctttcaccaagcggttcgaggacttcgtttcgcagcatatcctgcccgaacagaccagtgcggtaatcgacatcgatgctgaaattgatttcagggatattacgcccaggttcttcagtgacctgaagaagttcaatcctttcggcccggacaatatgaagccgattttctgtacgcatcatgtatatgactacggtacaagcaaagtggttggacgcgaccaggaacatatcaaattggaactggttgacaacaagtcgaacaatgtaatgaacggtatcgcattcggacaaagttcgcacgtgcgctatatcaagacaaagcgctccttcgacatttgttacaccattgaagaaaacacgcacaagcgtggcgaagtccaacttcaaatcgaagatataaagccgattgaataagtatcaggagatattaaaacaatattggggatatgactccttccgcgacttgcaggaggagatcatcaccagtataggcgaaggtaaggacacgctggggctaatgccgaccggaggtggcaaatctatcacattccaggtgcccgctctcgcccagagtggactttgtattgtcattacccccctcatcgccctgatgaaagaccaggtgcagaatctgcgcaaacgcggaatcaaagcgctcgccatatattctggcatgacacgtcaggagattgtcactgcgctggaaaactgtatcttcggcgactataagttcctttatatctctccggaacggctggatacggaaatattccgtatcaaacttcgttcaatgaaggtctccatgattacggtagacgaaagccactgtatctcacaatgggggtatgatttccgtccggcttacctgaagatagcagaaatacgggaactgctgccgggtgttccggtgctggcactaacggcaacggctactccggaagtcgtaaaagatattcagtcacggctgaactttcgcgaagagaatgttttccgtatgagtttcgaacggaagaatctggcatatatcgtccgcaaaacggacaataagacgggagaactgctacatatcctgaaaaggatagacggcagcgcaattatctatgtccgcaacaggagacgcaccaaagaaatcaccgaattattaatgcaggaaggcattaccgccgacttctatcatgccggactggacaatgccgtaaaagacctccggcagaaacgctggcagaacggagaaatccgcgtcatggtagccaccaacgctttcggcatgggcatcgacaagcctgatgtccgtatcgtactgcatatcgaccttcccgactctcccgaagcgtactttcaagaagccggacgggcaggaagggacgggctgaaagcctatgccgttatcctgtatgccaaatccgacaaaatgacattgcacaaacgggtggcggacactttccccgaaaaagaatatatcctccaggtatacgaacatctgcaatattactaccaaatggccatgggtgacggattccaatgtatccgtgagttcaacctggaagaattttgcaggaagttcaaatacttccccgtgccggtggacagtgcgttgaaaatactgacgcaagccggctatctggagtatacggacgaacaggacaatgcttcccgcattctttttacaatccggcgggacgagctgtataaactacgggaaatgggtacggaagcggaaactctgatacagaccattctccgttcctacacgggagtatttaccgattatgcttatatcagcgaagacacactggctatccgcaccggattgacacgccagcaaatttataatatattggtgacactgaccaaacgccgtatcgtagattatatcccgcacaaaaagacaccttatataatatacacgcgcgagcggctggaactacgttacctgcacattccggcttctgtctacgaagagcgcaaagcccggtacgaagcacgtatcaaagccatggaagaatatgtcacttccgaaagcgtttgccggagccggatgttgcttcgttatttcggagaaaaaaatgagcataactgcaagcaatgcgacgtctgtctgaatcgtcacgaaacggactgcctgcccgaagactctttcagagaaatgagaaaacaaatcctggaactgcttgcccggaaaagtttgccccctgccggaatagcgaatgccattgaagcagaaagagaagatatcagccgggtaatccaatatttattggaagaaggtgagctgaagatgcaggacggaatgttacatatatcaaaataagttattacatttgcagataaactcaaaaacaacatatcatcatgccgaacttttttaaatctttcttctccggaaagtcagaaacaccggaaagtgaaaaacagaaaaacgaccggaaaagattcgagatcttcaaatatgacggtctgcgtgcacaacgtatgggacgtccggattacgcagtaaaatgtttcacagaggcccttgctatcgaagaagatttcgagacaatgggttatctcagccagctttatatccagacgggcgaaaccgaaaaggcccgcgaactgctggaaaaaatggcaatcatggaacctcatgtgacaaacacattcctgacattggccaatgtgtgcttcatacaggaggactacaaagcaatggaagaagctgccagcaaagcgatcgctatcgaggagggaaatgcagtggcacactatctgttaggcaaagcccgtaaaggacaggacgacgacctaatgacgattgcccacctgacaaaagcgattgccttgaaagatgatttcatcgaagcccgcctgatgcgtgcggaagcattgctgaaaatgaagcaatataaagaaacaatggaagacattgacgccgtactggcacagaacccggaagaagaaaccgctatcctcctgcgcggcaaagtgaaagaagccaacggacaggaagaagaagcagaagccgactaccaacttgtaacagaagtgaatcctttcaacgaacaggcatatctctacctgggacaacttttcatcaaccagaagaagttgacagaagctatcagtctgttcgacgaagcaatcgaactgaaccccaactttgcagaagcatacaaagaacgcggccgcgccaaactgctgaatggagataaagacggttctgtagaagatatgaagaggtcattggaactgaatccgaaagatgaggccagcctgaacggagaattcaagaacctcggcccaaaacaggaagcattgccgggaatcttctgattggcggaagtcattcaacccgttccgacagagggtatcccatgtctttttcattcttttttgcagagaaaacaaaaaaagtatcgctttttgtttgcgtttagcagaaaagtattacttttgccccagaattagaaaccaaagcaaaaaaacaaagactcgtatgagatcatttacttatgcatattacttctttttttacttttactttagccagaaagtagagcgggagtttgtatgtatcaagtgacatgatgcttaaggactgaataagagaaatcaatcatatgaatcccgctccaatatggacgcgggatttttttatataatacatttataacaatgaaaaaaatagcaattcaaggaacactcggctcatatcacgatatcgccgcacacaagtacttcgagggagaagaaatagagttaatctgttgtgccagtttcgaagacgtgtttacctcgatacgtaaagacagtcaggttatcggaatgctagccatagagaatacgattgcaggcagcttgctgcacaacaacgagttgttgagacaaagcggtacacaaattatcggtgaatacaaactgcgcatctcgcacagcttcgtctgcctgcccgatgaaagttgggaagacctgacggaagtcaactcccaccctatcgccctgatgcagtgccgtgatttcctgaaccagcacccacaactaaaagtagtggaaggtgaagatacggcacgcagcgcagaggctatcaagaacggaaatctgaaaggacacgccgctatctgctccaagatagccgccgaacgttatggaatgaaagtccttcaagaaggtatcgaaacaaataagcataactttacccgttttctagtcgttgccgacccgtggcaagtggacgaactccgccagcaccgcacaaacacgatcaataaggcgaacatggtattcacactgccgcactcggaaggcagcttgtcacaagtgttgtctatcctgtcgttttacaacatcaacctcactaagatacagtcgttgccgattatcggacgggaatgggaataccagttttatgtggacgtagctttcaacgactatctgagatacaaacaatcgatcgcagcaatcactccattaaccaaagaacttaaaatattaggcgaatatgcagaaggtaaatcaaacgtataagatcgctcccgccgacagactggcaagtgtaagcgaatactacttctctaagaaactgaaagaagtagcacaaatgaatgcggaaggaaaagacgtgataagtctgggtatcggaagccctgatatgccaccttcggaaaagacaatcgaaacattgtgcaataatgcccacgacccgaacggacacggttaccaaccgtatgtaggtatccccgaacttcgcaaaggtttcgcagcatggtatcaacgctggtatggagtcgacctgaacccgaacacggaaatacaacctttaatcggctcgaaggaaggaatcctccatgtcacactggctttcgtcaatccgggagaacaggtattggtaccgaacccgggatatcccacttatacttctttgagcaagatactcggcgcggaagttatcaactacgacctgaaagaggaagatggctggatgcccgatttcgaaactctggagaatatggatttgggccgcgtaaagttgatgtggaccaattacccgaatatgccgacaggcgcaaacgccactccggaactgtatgaacgtctcgttgactttgcccgccggaagaatctcgtgattgtcaacgacaatccgtacagctttatcctaaacgaaaagccaattagtattctgagcgtgccgggagctaaagaatgttgtattgaattcaattccatgagcaaaagccacaatatgccgggctggcgtatcggaatgttagcgtcaaatcccgaattcgtacaatggatattgaaagtgaaaagcaacatcgacagtggaatgttccgcgccatgcaactggcggctgcaaccgccctggaagccgaagccgactggtacgacggaaacaaccggaactaccggaaccgccgtcaccttgccggtgaaataatgaaagcactcggttgcacctacgatgagaaacaagtcggtatgtttctctggggcaagatacccgattcctgcaaggatgtggaagaactgacggagaaagtattgcatgaagcgagagtgttcatcacaccgggatttatcttcggcagcaacggagcaagatatatccgtatctcgctctgctgcaaagacaataagttagcagaagcactggaaagaattaaaagaataaaaaacaaataagaatatggaactcgaatcaattttattaccgggcatagaagccaaaagaccaatcgtcatcgccggcccatgtagcgcagagactgaagaacaagtaatggataccgccagacaactggcagccaaaggacagaaaatattccgtgccggaatctggaaaccacgtaccaaaccgggaggtttcgaaggaatcggtgtagagggtcttgcctggttgaaagaagtgaagaaggaaacaggaatgtatgtttctactgaagtagctactgccaagcacgtttacgaatgcctgaaagccggaatcgatattctttgggtaggcgcacgtaccactgccaaccctttcgccgtacaggaaatcgccgatgcattgaaaggtgttgatatcccggtattggtcaagaatcccgtgaatccggatcttgagctgtggatcggagctttggaacgtatcagcaatgcaggtctgaaacgtctgggtgctatccaccgcggtttcagcagctacgataaaaagatataccgcaacctcccccaatggcacattcctatcgaattgcgccgccgcattcctaatctgcctatcttctgcgacccgagccatatcggaggaaagcgtgaattgatagccccgctttgccagcaggctatggacctgaacttcgacggtctgattgtggaaagtcactgtaacccggattgcgcatggagcgacgcttcacaacaagtgaccccggacgtactcgactacatcctcaatttactggttatccgcaccgaaacccagactaccgaaagcttgtcccaacttcgtaagcaaatcgatgaatgcgatgataacatcattcaggaattagcaaaaagaatgcgcatcgcccgcgaaatcggtacttacaagaaagaacacggaatcaccgttctccaggccggacgttataatgagattcttgaaaagcgcggtgcacaaggtgaacaatgcggcatggatgcagagtttatgaaaaaaatatttgaagcaatccatgaagaatccgttcgtcaacaaatggaaattattaataaataatcaggtaataaactgaaacttcgtaagctttctgcatagcttctcctccttcgggaaggaggagtacccgtagggggaggtggtaggaaaaataatgaatatacctttttaaaagaaaaatatacctcatccctaccggtacccttccctctgagagagaaagccatacggaaggcagtatatgcgaaactttaataaataagaatatgagaatattaatcctcggagccggcaaaatgggctccttctttactgacatattgagctttcaacatgagacggccgtgttcgacgtcaacccgcaccaactgcgtttcgtctataacacgtatcgtttcaccacattggaggagattaaggaatttgagcccgaactggtcataaatgccgtgacagtaaagtacacgttggacgcttttcgcaaagtgctgcccgtactgcccaaagactgcatcattagtgatattgcctctgtaaaaacaggactgaagaagttctacgaagaaagcggcttccgatatgtatccagtcacccgatgtttggcccgactttcgccagccttagcaacctaagcagcgaaaatgccattatcatcagtgaaggagaccacctcggaaagatattcttcaaagacctgtatcagacattgcgactgaacatcttcgaatatactttcgatgaacacgatgaaacggtagcctactccctgtctatcccgttcgtttcgactttcgtattcgcagcggttatgaaacatcaggaagcaccgggaactactttcaaaaaacacatggccattgccaaaggactgctcagcgaagacgactacctgcttcaggaaatcctgttcaacccgcgcactccgggccaagtaaccaatatccggacagagctgaagaaccttctcgaaatcatcgagaataaagatgcggaaggcatgaaaaagtatctgacgaagatccgggaaaagattaaataatccccggccgatataggtaagatttaacggtcccctgcaaaaaagttctttgcaggggatttttttatgtgtacctttgtatccgcaaaaacggattcacaggagaaaagaaagaatgatagatcaagctaccatagaccggatattggatgcggcacagattatggatgtcgtttcagattttgtcaccctgcgcaagcgcggtgtcaattatgttggtttgtgcccgttccacagtgacaaaactccttccttttatgtttcacccgctaaaggactctgcaaatgtttcgcctgcggacaagggggcaacgccgtgcactttatcatggcgcacgaacagatgtcttatccggaggcactgagataccttgccaagaagtataatatcgaaattaaagaaagagagttgagcgatgaagagaagctggtgcaaagtgagcgcgagagtctgttcattgtcaataacttcgcccgcgactattttcagaatatactgaagaaccacgtagacggtcgcagtatcggtatggcttactttcgcaaccgcggtttccgggatgatatcatcgagaaattccagttgggatattgtaccgagagccacgatgcacttgccaaggaagcgctacaaaaaggatataagaaagaatatctggtaaaaaccggactctgctacgaaaccgacgaccaccgtttgcgggaccgtttctggggacgtgtcattttccctgtccacactctctccggcaaagtagttgccttcggtggacgtgtgcttgccagtgccacaaaaggcgtaaaagttaagtacgtcaactctcccgaatcggaaatctatcataaaagtaatgaattatacggcatttattttgccaaacaggcgattgtgaaacaagaccgttgttttcttgtggaaggatatacggatgtcatttccatgcatcagtccggcatagagaatgtggtcgcttcttcaggaactgctcttacaccgggacaaatccgcatgattcaccgtttcaccaacaacatgaccgtactttacgacggtgacgcagcaggtatcaaggcttctatccgcggcattgatatgctccttgaagaaggaatgaacatcaaagtctgccttcttcccgacggtgacgacccggactcttttgcccgcaaacataactccacggagtttcaagccttcattgcagaacatgaaactgactttatccgttttaaaaccaacttattactggaagatgcaggaaaagacccgatcaaacgtgcagagcttatcggtaatctggtgcaaagcatctccgtcataccggaagcgattgtacgcgacgtctatatcaaagaatgtgcgcagctgctgcacatagaagataaattactggtatcggaagtagccaaaagacgggaaacgcaagcggagaaacgagctgaacaaacagaacgtgaccgccgtatcgctgaaagaacggctaacatgacacaaggcggtgcaactgcatctccctcttccgacaacggcatacctatgcctcctgaagatgtcatgctagctcccgaagtagatggcgacggtaactatctgaacgttccacctgccctgcaagaagacaattacgcttctttcatcccacaggaaggtaaagagggacaggagttctataaatttgaacggttgattttacaagccgtggtccgttacggagaaaagattatgtgtaacctgacagatgaggaagggaatgaagttccggtaaccgtaattgaatatgttatcaacgatttaaaggaagacgatctggctttccacaacccgttgcaccggcaaatcctgtcggaggctgccgcacatatacataatgccggattcgtagcggaacgatattttctggcacatcccgatcctgtcatcagcaaattgagcgtagacctgattaatgtccgctatcaacttagcaaataccactccaagtcccagaagattgtgacagatgaagaacggctctacgaactggttccgatgttgatgattaatttcaaatatgctattgtcacggaagaattaaaacacatgctttatgccttgcaggatccggctcttgcacatgacgaagaaaaatgtaatgccttaatgatacgttataatgacttgagagggatacaaagtattatggcaaaacgtttaggagacagagtcgtattgcgataaattattttcgtcgccatatgtgcggtagcctccgacaggaagcatctcctttatcaaaaccaaataccttttctcattgatgccggagcataactttatccatttcacggcaacttcccctataatgttgttccgtgttggataagattcataaattcttcacgcgtctttgcctggttgaaagcccctgtgaagtcagaagtagtagtaattgagttttgtttttccacaccacgcatttgcatacacatgtgtttagcttccactaccaccattacccccagcgggtttaatgtttcctggatgcattccttgatttgcaacgtcatacgttcctgcacttgcaagcggtgagaaaagatatcgactacacgagcaatcttactcagcccggtgatgtagccgttgggaatataagccacgtgtgcctttccgtagaacggcagcatgtgatgctcgcaaagagagaagaaatcaatgtccttcacaatcaccatttgactgtattcttcctgaaatttagcagagcggagcacctcgtgagggtccatgtgataaccttttgtcaaactcaacattgctttagccacccgttccggagttttcaacaaaccttcccgttcggcgtcttcgcccaacaaggtaataatactgtgataatgacttttcaactcctccagatttggagagacaatttcttcttttcctaacatgatagatttataaaggaatattaacctcgtcttttacaatagaaacttctttaaacacaccagtagctttcattttgcgcatcatcgcgtcagcttcttctatactccggaaatcacccacacgacaaagccaacggggcggattgaacgacgtatacactgccagctccgggaaatacacttttacctgtgatgacacacgataagcatcattctttgcttgacgagtattgttaccggcatacgcctgtatccggaagccggaacccttcatgactttctgttcaccggttgcaggacgttccataccaatcatcgcttcaatgcggggatcttggtgaatggtcacctttccttgtcccggaacgttacgttcgaggcttttcacaatgttctgtgcctgtgcactggcgccagccaaaacaaacagcaagataagtaaagctagtttcttcatttgataattgtatttaggcacggactatataatccgcccgtgcccgaaataagttttaattacgcgttgaaagcatcaatgattcccttgaaatcagatactttaagagcggcaccaccaatcaggccaccgtctacgtcagggttagagaacagttctttagcgttggaaggcttgcagctaccaccataaaggatagaagtgttgtcagcgatttccttaccatatttattagctacgattgaacggatgaaagcatggatttcctgtgcttgttccggagtagcagtttttcctgtaccgattgcccaaacaggttcgtaagccaagataatcttagagaagtcttcagcagacaaagagaatacagattccatttgagcagctactacttcgttctgcttgttagcttcgcgttcttccaatacttcaccaatacagaaaatcggagtcagaccgttagccaaagccaattttactttttcttcgaggatagctactgtttcgccatagtaagcacggcgttcagagtgacccaggattacatattttgcacctgtagaagcgaccatctcagcagaaacttcacctgtataagcaccagatgctttatcagcacagttttcagcgcctacaccaatcttggcagcgtctaccaacggagtaacagaagccaggtggataaacggagtacagatgattacatcacagttaggcttctcattagccaatgcttcgttcagttcttttgccaaagcgataccctcttgaagggttttgttcattttccagtttcctgcaacaatgttctttctcattttgttttttatttaaagggttaataaatccatttccattctttatatcaaagccggacaatcagtctcggtagtatctccactctcctccttccggaagatgaagatagtatcaatttatcaatcatcactgccatcagtaaccggctcctcttctttttgttcttcaccaaccttcggaacgatgttttgcacttcactcttttgcttcttagcttccgcagcttttctggtatttctcctttccctacgacgaacgaccaacacatctactccaagcaccagcagtaatggaataacgaaccacaagaacacaaagccaaccgtatgcacatcattaccgaccttctgttgtcctaacggcagattctccagtttgtcggtcagtacgtattcatccgggatatcctcgtcactccatttgttcagaatagtcccattcttaatcagcatcaatcccgggttagagcgaatcatcgtcttcagtgtaatatcatccatttgacagaaagggtattccgccccggtcttatccttccacagttctatctgctcctccggtgaagaagtgaggcaataaaacttatagccatgctccaccgagtaatcatagacttcattaatcaagtctatattactgtcatccgcttcttcaatccggtgggcgaccaacaggaatgtgtaccccatatcagtcagtacatcttccgtgatgtcctctcccgtattcagttctatcatagagaaatcatgaatagccggctcgtatcctttttctttaaggacagtgcgtgtatcaacaaatgtccatgtgctatccggataattctccagtgtaaattctttattttctccgttcttctccaaaataaagacactttcatatacactcggcttcgctccttccggcatcgtcattccttccagtatattctttcctaccttgtagggacggaagtccaataccggcaaacggtcaagacaatagaacgacaacgtaaacacaaaaaacagcgtgtacagagaaacaagccattccattttttgactgataaagcggaccagcatcttcctgcctttaaacgctccgattgcagcaagcaacaagagtacgttcttgataaatgtctcccaattagtcagcacccaagcatctccaaaacacccgcagtcggacaccggattgaagattgccagatacaatgtcaacggtgtcataaaactcatcaacatcaacgccaacgtggaagccactgttctccggacaccaaagaacaaaaagataccgattgaaaactctatggcagataatgcgatacctcccaataacgggaagaatgaaggaaaccaggaagccattccgaatgcagccagatagtcctgtatcttgtactggaatcccagtggatctactgcctttacaaatccggaaaagataaatgcagccgccaaaataaagcgactgatattcgctattacctcctgaatgatatgtaaattcttaaccttcaaattctatcttaatcaatccgaatacagagtaattaatcatatccatgtaattggcgtcgattccttcggacaccaacgtgttgccagacagactttcgatctgcttggtacggtatattttcattaaaatcaagtctgtgtaagagctgatacgcatactgcgccatgcctcgtcatagtcgtggttcttggcaagcatcagttccagagcctctttgacatatttatcatacaaagccaacgcttcttcaatgctgatgtcggcagactcggcataccccagttccaactgaataagccctataataccgtaattgacaatcgcaataaactcggaacgaattccctcgtcaaccaaagttacaccttttgtttcaatactacgaatccggttggctttgataaaaatctggtcagtcaccgaagccggacgcagaatacgccatgcaggcccgtaatcgtgcagcttcttggaatataagtcacggcaaatagcgatgacatgttcaaattgttgcttggtatctttcattttcttccaaatagtgcgcaaaggtaacaataattaagtgaaaacagaaagagggcactctaaattatattaaagtgccctcttctaaaggtattgttgtattactgttttataagcaatgctgtttatgaacagcgcaaaacttgcccgatgcgcaaagttgtagtcggtttgatacgattcaacttacaaagtgtgctgactgatacaccacgcaacttggcaatacgcgacaaagtatcaccgctcttaactttatgatagcggattgtaccgtcagccacttgcgtgtcatgggaaccggcacgtttcgaaccttgagtcctcctgaacgtataggtatcggctacgatatcttgtttcggaaagtcgaacatataaataggattgattgcgattccgaggaaacgggtttcaaaatgaagatgagaaccggttgagcgtccggtattaccacctaatccgattacttcaccggccttgaccagctgattttcttcaaccagttgtttggacaagtgtccgtatacagtttccaatccattatcatgacggataacgacatacttaccatatcctctgcgctcatatttcacaatacgcactttaccgtcgaaagctgctacaatagtatcaccgatatttactttcaagtccagaccgttgtgcattcttctccaacggggaccgaaaggcgaagtgattttcgtgctgggagtcggcatgtggaaacctgtcaggtcgatcgtgtaagtatcagggataatagcgtttccgtaagcgtgtacatactggttgttccagtttggatagagacttagggcgggatattccgactgttcggcacggatttgcttttgcaatgccaaagagtctactgtttttaatttcttgtctatcggtgcttgacgagcaatcaggtcttgtgagaaagagctcaaactaaccatagccgcaacagctaccaatcctgttttaataatacaattgaaattcattcgttctttgtcaattcaattaatattcgtcatttgcatacaggtagtcaaatgtcgcctgtttgtaatcgaatatttcttccggtttaaaaaatctcgttaactcgatagctgcggtctccggagaatcagaagcatgaactatattttcctgaaagctcatactgtaatccccacgaatagttcccggggcagccagacgtccatttgtcggacccgccaacatacggacagtttgaatagcatccacaccttcgaaacaacaaacaatgacaggagctgtcatcatggaatctttcactctttgaaagaaaggcttgctgctcaagtgggcataatgttcgctcaataattcatcagtcagttgcatcatcttcatgccggccaaccgcagtcctttacgttcaaaacgatgagtaatctcaccaaccaatccccgttggagggtacaaggctttaaaatgaccagcgttttttcaagcatgatatacgacttttctaatggttaaacgatacatttactaaaaaattcttccaaaggtagcattttccgatgaaacgacaagagagttattaactatttttcagatgattagccggaaataagacaaacattcaggcgttaaatccctatgaatagggagaatagaagcaaaacatgttttgcaacacattcccgcaaataaactgcatgtttaaccgtttttcaactaatggcagcccagttaacattcgttttccgcaaggatttgagttgccgccacagtatttcattctccggactctgtgcaccgggatcatgctctacaatatcttcggctatcgcacggacgtattgcagcaattgtccgtcacgggcaatatccgcaattttcaaatcgaaggcgacaccactctgctgcgtcccttccaagtcaccgggaccgcgcaacttcaaatcagcttccgctatttcaaagccgtcatttgtgcgtaccattatctccagtcgcttacgagtatcttcggtcagtttataatttgtcaccaaaatacaataagactggtcggcgccacgccctacccgaccgcgcaactgatgcagttgcgaaagtccgaaacgttcagcattctctataatcatcaccgaagcattcggtacgttcacgccgacttcgatcactgtagtggcaaccattatttgcgctttgcctgaaatgaaaagttgcatttgttcatccttttcggcagccttcattttgccgtgcactttacatacagtacattcgggaaattcttccaggatatgctgatagccttcttcgaggttcttcaagtctattttctcactttcctttattaaaggatagacgatataaacctgccgtccttcctcaatctgcttgcgtacagagcgatacaggctttcccggcgattgtcgaactggtgaacagtagcaatcggtttccgtcccggaggcagttcgtcgatgacggacacatccaagtcaccgtataaagtcatcgccaacgtccggggaataggagtggcggtcatgacgagcacgtgcggcggttgaatattcttactccaaaggcgggcacgttgcgccacgccaaagcggtgttgttcgtcaataaccacaaaaccgagagaagaaaaattaacggtatcctcaataaccgcatgggtcccgatcagtattttcacatctcctgtcagcaaaccggtgagaatggcttccctcctttttcctttgatagagcccgtcagcagttccacgcggatatccataccgaacagtaactccttaatcgtttcgtaatgctggttcgctaatatttccgtaggcgccatcatgcaggcttggtagccgttatccaacgccagcaacatactcatcaaggcgactaaagttttcccactacctacatctccctgcaaaagacggttcatctgccgaccgctacccacgtcattccgaatttctttcagcactcgtttctgtgcgcctgtcagttggaaaggaaggttctttgtataaaacgtgttgaatacgtcgcccactttttcaaagatatagccgcgataccttctttgcctgtctttggcatagcgcaagatgttcaactgtacgtagaagagctcctcgaatttaagcctatattgcgcccggcgtaataaatcgggattagtcgggaaatggatattccgcagagcctctgtcaaaggcatcaagtgatgttccgacaacagtttgggagagagagtctcaggcagaggctcctgtatctgcagaatgacagttgccatcatcttctcaatcgcgtgagagttgaggaagctgcgcttcattttctccgttgtattataataaggttgaagtcccacggaggaaagtttcaagtcatccgtcttgtctacatcgggatgagctagattgatgcgcccgttgaatacggtcggcttgccgaagatgatatattcttcgtgaagtttgtatttgccgaggatgtattttattccctgaaaccacaccaagtccacgactcccgtaccatccgagaaatgagctgtgagacgacgctgccggccttcaccgatcgtttcgaaaccaaggatttcacctttcagttggatatacggcatattgccatctatctcgtgaatgtaatagatgcggctccggtcgacgtatttgtaggggaaatagtaaatcaaatcatgcaaggagtagattcctaactccttatttaatacagccgccttctgaggacctacaccggagataaattttatgtcgcgtgtgactaaatcaaacatttacaaaagagcactcccgactttcaggtcgaaaggagtcgttatttttatattttcacggttacctgctgcaagatgcacgggtacgcccattgcttccacaaccgaggcgtcatcagtaaagaacggagtaaattcctgctcataagcctgcttcaacagttcgacgtcaaagacttgcggcgtctgcaccaatttataatcattgcggctcacagtctcgcttccgacttccgttaaatggcgcagcgtttcaactacatcaacaaccggaatcaccgctttatgctgttctgccaaatcataacaacgacggatcacttctaccgagacaaacggacggacaccgtcgtgcactcccaccagcccaggagcctgcaccaatgccaaaccgttcttcaccgaatggaaacgagtttctcctccgtctgccacccgatgttccacatcgaaatcgtgttcccgacagagctgcttccaaaagtcctgctgctcccgtggaaggactaaaataagttgaattgccgcatcatacttccggaaaacttccagtgtatgcatcaatacaggtttaccgccgacaggaagaaactgtttggggaggtcgctccccatacgcaagccctttccaccggcaacaatgattacatatttcttcatggacaacttagcgtttaacgcacatcgcctctaccagctcgtctactttttctttacctaccaacaagtcaacgatagtcaaagcaaattccatggcagcgcccggtcccatacccgtaatgatatttccgtcacgaacaaccggagcatcgatacattcggcaccttccagatattgctcgaagctaggatagcaagtcgccttcttccctttcagcagacccagcttgcccagtaccatcggagcagcacaaatagcggcaatcggtttgttcttggcggcgaaatcgagaatcaatctacgcaatccttcatgtttatcaagcgtagctgctcccggcattcctccgggcaacaacagaagttcggcatcaaagaaatcacaattatcgaagttgatgtcacaaagaacagatacatcatgtgcacctactacaatttcatccggtgtaacggatacgatttccacattcagtccgccacgtcttagcgtgtcaatagcagtaaaggcttcaatttcttcaaacccgtctgcaaaaaaagcgtatacagttcccataatcctatatttttggttaatgatactatctcaaattaaaataataagtgattgtccctgtctggttggtcactccgtccactgtattgaaacgagctttcctggccgcatcttcggcggctttccgcaaaacagagtttacagtattcgtttgagggttaatgctggttgcaacaacctgtcctgcaggattcacggtaatgttcaccaccacacgtccttcttcctgcacattgtaagcaggcttgggcaaactgcccgtacctaaagaacgtccgccaaggtcaaaagttccgtaaccgcccgttccggtctttgctccggtggaagaattaccttccttactgccttccgttcccgtgccaccggctgatgttcccttgttccctgtcatttgtgaacctttgccgaaagcaccggccactttttttctcgcggcctcttcggcagctttacgttcacgttccgctttcgcttcagccaggcgtttcgcttccgccgctttctcggcctcggtcttctccggcttcttcacaggctttttcggtttcactacttctttcggttttaccgtttccttcttgggctcctccgtcttcggtttcagagtgacggtttcttcttcggtctgcgtcaacaaatcctgttccgaagggagttccggctgagtctgagcaggagccggggcctcttcgtccaacacatcgacatcgaccaacgatgggtcgtcaaagccacgcgcagcatccacattccccatcattacagggattccgcctgcgtcctcatccggttgagggacagtaaagctcaccagaatcaaaagagcaatcactgccacgtgcaccaacaatgcacccaacgctcctacgtattcacccttttttcttctgtccatcgttcttcttatttattttccggcgggcgtgtagccagcaccatcttaaaatgattctcattcgcaatgttcagcacccgcactatttcacgataaggtactgattcatccgcatacaacgccacatacatttcaggctccttttccgcacaactctgcaagaaaggagtcagttcgttcaaggcgtacggcttctccttctcattaccgaaagcggcatagaagttcaggtctttatcaatgatgactctcgtcagcggtttggccgaggtctgctgcttgccttgcggcaacaacacctttatagcattgggcgataccaccgtagaggttatcataaagaatatcagcaacaggaaaatgacatccgtcatggaagccatactgaaattgggcgatactctatttcttctttttaatcccacgtttatgagttattataaagttataagttcggggaatatgaatcacttctgagccggttcgttcagcaagtccataaattccatggtacgagattccatcttgtttaccacgcggtctaccagcatcaccagatagttgtaagcaaacatggcaataataccgacaatcagaccgccgacagtagtaatcattgcttcgtagataccgccggaaagtaatgtaatatcaatatttccgcttccggcgttcgccatttcgtagaatgcgcgcaccatacctgtcaccgtaccgaggaatccgagcatcggggcaccgccggaaatggtcgccattacagtcagccctttttccagtttcgcaacttcaatgttacccacattttcaatagcggcctgtacatcgttgatcggacgtcccagacggctgatacctttctcaatcatacgggccgaaggagtgttcatcgtccggcaatagttaatggctgctttgatctcaccactatgaatatagtctttgatacgttccataaacatagggtcttcttttcccgccttgcgaatcatataattacgttcgaacaagatgtaaaagcagactacggacaacacacccagcacaatcataatccaaccacccttgatagccatatcaagcatattcatttcgggagcgtttacctccgtcagtacggggttggcggtagccagcgagtcagccatattcatagccccttgggctaacaagatcattgcattcatcagcgtagacagtttttatattcctggatagtacgttccagtcccaaatacagtgcatcgctaatcaatgcgtgaccgatagagacttcatccacccagggaatgtttttatagaaatagtttaaatttacaagactcaggtcgtgtccggcattcaggccgatacccagtttacgggcagttttggccgcttcgataaaaggggcaatggctgcttccggattcttcgggaaatccgtcgcatagggttcggtataaagttcaacgcggtcggctccggcttttgccgcatattccaccatttcgggatcagcagctacaaaaacagaagtgcggatacctgcactgttgaactgatcgaggacttcagtcagaaattccagattagctttcgtgtcccaaccggagttagaagtgatctgtgaaggatcatcgggaaccaatgtgacctgatgtggctttaccttcagcacaagatctataaattccggtgacggatacccttcgatattgaattcagtccgcaacaggggacgcaaatcatatacatccgaacgacgaatgtggcgttcgtcaggacggggatgaacagtgatgccgtctgcgccaaaagactcacaatcaagcgccacctttactacatcgggcacattccctccgcgagcatttctcagcgtagcaatcttgtttatgtttacacttaatttagtcatagttctacgtaatatttggcgcaaaaatacaaatattattattagttgcctaataatacgaaacgcattataggttcttttttggttatttaaagtagaaaaccacaagaaaacacagaataagcatacttttgtgtactttccttccacccgacgcatatttgtaatactatgcaaatcattacattttgtgaaagcaccgttgaagttacgggcacttttactatatcgccaaaccgaatattcgcaaactgattggctatctcagaaaaaagtgccaaatttgcaaccataactaatgatgtcgcttatgaaatttgccattttcggaaatacttatcaagctaagaagtcttcgcatgccctcaggctattccaactgttgagaagacaaaaagcggaagtatgtatgtgcagggacttttatcaattcctgaccgcagagttaaaaatggatgttcatgccgactatctgttcgacggggataattttaccgccgatatggtaatcagtatcggaggcgacggaacgtttctgaaagccgcccgccgcgtaggaaagaaagggattcccattctaggaattaataccggacgtctgggatttctggcagacatttctccagaagaaatggaagaaaccttcgatgaaattcaatccggaagatatagcgtggaagaacgaagcgtacttcaactcatctgtgacgacaagcatttgcaagatgccccttatgccctcaacgaaattgccgttctcaaacgggacagttcttctatgattagtatccggacagccatcaacggcgcatacctgaacacttatcaggctgatgggctggtgattgctacgcccaccggttccaccgcctattcgttaagtgtaggcggtcctatcatggtgccccattccaacaccgttgttattactcccgtagctccgcatagcctcaacgtccgtcctatcgttatccgagacgattgggaaatcacattggacgtggaaagccgcagccataacttcctcgttgccattgacggccgaagtgaaacgtgcaaagaaaccacccaactcactatccgccgggcagattacagtgtcaaagtagtaaaacgctttaatcatattttctttgacacgcttcgcagtaaaatgatgtggggggcagacggcagacgataagaaacagattacaggggtattcccgtttcgcatcatttagaattgatacatggctgttctttgccgaaatatctatccgattcggaaagttattcttactcactaagaagatcagagccataagtttcttggtgtttccatagttagaaacttcagtttcaacgcttagaaactctagtttccatacgcagaaactctagtttccttatggagaaacttcagtttccagccttggaaccggagtttcaacgtttagaaacgccctctcatccataaagaatgaatttcatatcctacacgaaaatatttcattgcctacgtggtgttgcagataaagtatctgcaatcgatctgcaacaagtatctgaaacatcatagctatctgacaccaaacaaactgaatcgattttgttacaggtggcagacggtatggtagacggagttcattctatagtcgcataaaaaattgtttgattcaaaaccatatcatatccaccaataaagcaagggcaattaccaacagtctgtcctgaaaggagcagctggcaatcctgttctatcatataaattgcaatccgggttatgattgaatttccactgatatcccggtttttccgttgaaaaatcatcatccgtttggagtaacactcgatcagatgtcttgtttatgtccgattttgtccaggtttgcacaggcttactgataccgttcatacccatatcgattccgttcataggccaatcctccccactagctacaccctaaataggcttctccgttatcatcccacaaaaaacaaggatcttcccacctttcggcaacgtcagtcaatatcatttttccttcccacccagactttacttctcaaaacaaataaaatataataaaaagacccgttttaccaagtgtatttataagcctatcagtttagcgtaaatgtctgcgagcctatcaaattaccaccttcgaagatgtcgacccgataatttccggcatataagaattcttctacatcccagaatacattgatattctgttcttcgccattatattcaatatacttcttgatagaataaaccaatgtacgattttcataagggaaagtattggatgcgctcttggtcagtacatcattatccggctttgtgatacgtatataaatagtacgttcgccattttcggctgtaatattcttcacgacagtaaagctgatagccagtttcactacatccttcaccttcttcgctactttgccgcgcttgttacgtggctctatacgaatattggtagcgtcgagctgagcagccaatgtcactttcttattcaagttcttcttttcttcagaaagattactgatttgttgagaagcctggttatatttcttagttacatcagcaataaccagtttctgctgttccgtcaatttattcaaagagtcaatctggttaatataaccaatcataaccttacgcaaagtagccaattcttttttcaaacggcgaatttccgttgcattcgtacttttcacagtacgaagttcttcgagcagtcgttgagtctttaactgttcctgatccagcaattgagctagagaatcattggagatcgtcatcttcaactcatcatattgttgtgcaaaacgggtgtattcattttccagatcttctttatccaactgaaattcctgtaccaactcccggttagcttgtttctcagtaaataacaaataagtaataccaataatagctatcaccagaatagccacggctgcaataagaagactttttttattcatagttcagtgtgttaattgataaccgccgcaaaagtaatcatttcgtaacagagtaacatagaatgaggtattttctttaactaaaattattacggaaaaatttctttaatcaggattatcgttgtaattttgtcgcgcaaaatagataaaacaaattatcaactttttaaatatatagtattatgtcaaaagtaaccgtagtaggcgcaggtaacgtaggtgctacatgtgcaaatgtacttgcttttaatgaagtagcagacgaagtagtaatgctggacgttaaagaaggcgtatcagaaggtaaagcaatggatatgatgcagacagctcagttgctgggcttcgactctacattggtaggctgcacaaacgattatgctcagactgctaactctgacgttgttgtgattacttcaggtattcctcgtaaaccgggtatgactcgtgaagaactgatcggtgttaatgctggtatcgttaagtcggtagcagaaaacctgttgaaatattctcctaacgctatcattgtagttatctctaacccaatggacacaatgacttacttggcattgaaagctctaggcttgccgaagaaccgtgttatcggcatgggtggtgcactggatagctctcgtttcaaatatttcttgtctcaagctatcggttgcaatgctaacgaagtagaaggtatggttatcggtggtcacggtgatactaccatgattcctttgactcgtttcgctacttataaaggtatgcctgtagctaacttcatttctgctgaaaaattggaagaagttgctgccgctactatggtaggtggtgctacactgactaagttgctgggtacttctgcatggtatgcaccgggtgcagcaggagcattcgtcgttgaatctatcctgcacgaccaaaagaaaatggttccttgttcagtattcctggaaggcgaatacggcgaatctgatctttgcatcggtgttcctgttatcctgggcaagaatggcatcgaaaagatcgttgaactgaacctgaacgaagacgaaaaagctaagtttgctgctagcgctaaagctgttcacggcactaacgctgctttgaaagaagtaggtgctctttaatctaaagatcccctttaactttatataagcaagaaagttcctattcttttaaaaggtgtcttctttgtagaaagacacatggtaagaataggaactttctctttttagttctccgccgatttcttcactgccttcatacagtaatagaacaaccaaaatgaatctcggtaattgatttccaacattttctgattcatcgttcctcctttcaacaaagcatgaaatgaattaaaatccttcactacctcctgtcccaccggatagcgacgcaatatgtccggatgttgtgttgccagtaccagcaacgcttcttcgtaataacggggaagcttgacgctaaaaggcttgtacaacaaactgaataccttatagaacttatccacatcttttgatatcaacagcccgcaaagcaaataatccacagctttccggttttcgggataacggtctaccatacgtgccatatccgaaagaaaaggatgcgcacctataaaaaacggagacgtattctttccactgttaatcttatcttccacaccggctaacgccaagtattcacccagcaactgtgcctgtttcgtgtggcaacttgtatgcttcattacttctacatacttggcaagcattcgattgcgaccttgatggacacaagcgtccacaattgctctcatagaacgaaaactgttcccgtagggagaaagaattcctgcctggaaagcattatgaagcaattcgttatccagttccaaagcacggaagaactgcatattaaaattacgacagaattgcttgtctacacgttcataaaagaaacaggcaggttcggtcactccataagcaaacatccgttccggcaactgtcccttttctgaaagagccaacaaaatccagcgcaacaaagaagaattctttttcgtcatttccggagtcacattctgtaaaatggcatcccaatttctattctcagcaaggtggtctatgcgagaaatgaattccgtttccttctgcttttcatcggtcacttcacggtaaacgatgaaacccaacagtaaacaaggcacgatgtaagtgaaaaaaggagaagaaaagaaataacgttctccccatgctaccggagcctttcttcggatcgtaagcaaccatacaagcaacgttaacacagcagaaatgctacaccaccacatcgaacggaccaaaagcacatcagcaaactgcccgctcataaaccagataaccggaatgaatgaaagccacaacaatcctttattgcgcgtcaaacgggcgatgatacaatcggctgaaagcaacacaataagcacaaacaacatttgcaccaaagctccacttgtacggaaccggaagaattgtaggagataagcccctacatattgcgcccaatcagaaggaagggaaagttgtataccggcaaaatcaggcgtgaaagagaaaaaagagtttccttccagtaaccaaagataattaggaaaaacaatataccaaatcagaaaaattaccggacagaccagtaataaatgaaataaaaatatcttcttcatagcatcttatttttgagggaagaataaagcattaagctgtttctgtggcaatgtcacctcccccttaataaattcgggaatattataggacttcgtacgtaacacattatgttcaacagtagactgagggagcaggaaaggtttatgtatgtttcccttttcatccatccaagcaatgaaaagccttgtatagcggccgtctagcctacggctactaaacaaaatccaacgaccgttcgacgaccaggaatgatagctctcagtctcggcactattcagaattttaacgtccagttcctcaccgtcagatagtctcagcattttcaaatctgcctctttgtgccaaatagggaaagtggcacaagccgctttcgtgtacagcaaataacgtccatcgggagacaaacgcggaaaagagacactgcctccatcgcgctccgcattgtatatcgtatcaattcgttcgccaaacgttccggttgcctcatcaaaatcgactttgcaaaggctataatgcaaattttggtaatctattggcatattcttaggtaaagcgccacaataatagagcgatttcccatctgccgaccaggcaggaaatgtctcccaatgtgcttcgtccataaagcgtttatccgtcagtaccttcttggtctgagtgtcatataaaatcaagtcagactgaagatcatacacttccagcgccttttcaccttcactaagaaaagactgacgggtgagattggaagaaaacacgatatatcgtccattgggatgccacatcggataggttccgcttttcttgggaccggttgtctccaacggtagtttgctcaattcaccatctttccataaagcagtgccaccaccttctcccctgacatgaaatatcatttgttgtggagaataattagcgaaagaatgacagttcatgcacttacttttatccgcacgattagtagcaatctccttttcttcgaacgaagtgagattcctctgataaatacccagcatattccaaccttcatatcccggttctatcagccgataagcaatccattcgtcaatagcatccgatgcaacccgaaccgtgaaaggtttatatcgtaccccttcaggagaagacgaattccatacggacactgtgatttccagatctttgtccttcagtttgtctaacatttccttccactttttcttcgggatacgaacctcatgcttacccgtgactgtcagaagattgacaccttcacccgcaaaatcggcacgtatttcttgtgcacccttcacttcgaaatttaaaggcgctatattataaggtatagccgtaaacgtataatcaggaaaaacagacggataactgttactgacagtttgtgcctcttttacattttcgcaggatataaacaatcccacacttatcgctccgataagccatttaatattcatgatgtgttgtattattgattgcaggtaacattttctgcaaatatatataaaactggaaacacaaacgaacaaacaaataacaaattagctgttggaaggaaaatatttcaaacaacagcccgttattaaaaaaagctaattcattttgtgctttcaaagaaagcatatacttttgcatcgttgtttatgcaattattgttcgtgataacaagttcaaaaaaacagactacttcaataaacaaattacataagaagcgggttattaaaatagaagtatcaccttattaatatgcaagatgcgatgaaaaagctatttcttctgacaatactgctaagtatgacttttatagtaaaagggcaaactttactaagcttggatagttgccgcgcattagcccttgccaacaataaagacttgttgattagcaatgaaaagataaatgcggcccactatgagagaaaagcagcatttaccaactacctgcccaacttctcggcaaccgggacctatatgagaaaccaaaaagagttttctctattaaataaagatcagaaagctgcgctttcgggattagggactaatctggcaggtcccatacaacaggctgctacacagattgcaacagcacatcccgaacttgctccattaatatcttcattaagcggagaactcggtgccgttttacctgccctcgatcaagtaggaaattcattagtagatgccctccgtacagatacaagaaatgtatatgccggcgctatcacactgacccaacctctctatatgggtggtaagatccgcgcctacaacaaaataacaaagtacgccgaagagttagcccagcagcagcaccaaggcggtatgcaggaagtaattatgagtactgaccaggcttactggcaggttatttcgctggtaaacaaaaagaaactggcggaaggatatctgaaacttctgcagcaactggacagcgatgtggaaaagatgattgccgaaggagtagcaaccaaagcggacggtttatccgtacgggtaaaagtaaatgaagcggaaatgacactaacgaaagtggaagacggattaagccttgcccgaatgttgttatgtcaactatgtggcattgatcttagctctcccattacgttagcggacgaagatatggaagatattccgttactcacaacagatactcatttcgatatgtctaccgcttatgcaaatcgtccggagatacgcagtctcgaactggctacacagatttacaagcaaaaagtaaatgtaacccgtgccgaacatcttccttcgattgcactaatggggaattacatggtcaccaatccttctgtcttcaatagttttgagaacaaattcaaaggaatgtggaatgtgggtgtcatggtacagatacctatatggcattggggagaaggtatttacaaaaccagagccgccaaatcagaagcacgtatcgcacaataccaacttcaagacgctagagaaaaaatagaattgcaagtcaatcaagctgcattcaaagtaaatgaagcaggtaaaaagctggtgatgtctaccaagaatatggaaaaggcggaagaaaatctccgttacgccacactcggcttcaaagagggagtcattgccaccagcaatgttcttgaagcccagacagcctggctatctgcccaatcagaaaagattgacgctcaaatagacgtaaaattaacagaaatctatctaaagaaatcattaggaactcttaaataactcatattatatggcaactacaaaatcacaaaacagcaatatgctgcttgcattccttaccctgctgggagttattgcaatcgttgcagtcgttggttttttcatgcttcgcaaaggacctgagattatccaaggacaggctgaagttactgaatatcgtgtttcaagcaaagttccgggacgtatattggaatttcgcgtgaaagaaggccaacaaataaatgccggtgacacactggctatcctggaagcgccggacgtagtggccaaaatggaacaggcgcgtgccgcggaagctgccgcacaagcgcagaatgaaaaagcaatcaagggtgcccgccaggaacagatacaggctgcttatgaaatgtggcaaaaagcacaggcaggagttaccattgccgaaaaatcatacaagagggtgaagaacctttatgaacaaggagtaatgcccgcacaaaaactggacgaagttactgcacagcgtgacgccgccattgccactgagaaagctgcgaaagcacaatatacaatggctaagaacggagccgaacgtgaggacaaaatggctgcggaagcactggttaaccgggcaaaaggagctgttgccgaagttgaatcttatattaaggagacatatctgatcgctcctgcttcgggagaagtatcggagatatttcccaaagtaggcgaactggtaggtacaggcgcaccgattatgaatattgccgaactcaacgatatgtgggtaacgttcaacgtacgtgaagacttgctcaaaaacctgactatgggaacagaatttgaagctgttgtacctgcacttgacaataaagccatcaaactgaaagtatattatctgaaagatttaggtacttacgctgcttggaaggcaaccaaaacaaccggccagttcgacctgaaaacattcgaagtgaaagccagccctctggagaaaatagaaaatcttcgtccgggtatgtctgtcatcattgataagtaaccatgaaagagagagaaaaaaaatatatagcattgtggcaggtcatgcaaagagagtgccggaggttagtatcacgtccgctatatctcttttgcatggtgatagctccattgttctgctatgtatttttcactactttaatggattcgggacttcccaaagatcttccggcaggtgtggtagatatggatgattcatctacctcccgcaacatcgtgcgcaatctggacgctttttcgcagacaggtgtcgtcgcccattacagcaatgtgagtgatgcacgtattgccgtacaggaagggaaaatctacggattcttctacattccgaaaggtctgtccgccgaagcgcaaagccaacggcaacccacaatttccttctataccaattattcttatctgattgcaggctccctgcttttcagggatatgaaaatgttgggagaactgacagccggtgctgccgcacgaaccacactctatgcaaaaggcgccacggaagatcaggcaatggggtttcttcaaccgatcgtgattgatacgcatccattaaataatccatggctgaactactctgtatatctatgcaacacattgataccgggtgttcttatgctgcttatatttatggtaacggtttattctatcggggtggaaatcaaagaccgtaccgcccgtgaatggttacgcatgagcaataactccatttacattgcactggcagggaaactgcttccacatacagttgtttttttcatcatgggtatattttataatgtatacttatacggtttcctccatttcccatgcaatagtggtatcttccctatgattttcgccacactttgccttgtactagcatcgcaatgttgcggtatagtcatgataggtacattacccactctccggcttggattaagttttgcctctttgtggggcgtcatttctttctccatttccggcttctcattccctgttatggcaatgcaccctgtactgcaggcgctcagcaacctattcccattgcgtcattattttctaatctatgtcgaccaggcactcaacggatataacatggcttactcttggagcaattacatggcactattaatatttatgatgctccccttctttgtggttcaccgcttgaaggaggcactggtttactataaatacataccctaaatgaaagatataaaattaaaagacaagatagcccaaggcatcaacgacctgttttatatctggaaacgggagtttcagactactttccgcgaccagggggtactaatattctttatactcgtcccattgggttatcctttgttatatagctttatctatgataacgaagtggtgcgcgaagtcccggctgtcgttgtagatgactcacattcctctctcagccgtgaatatctccggaaagtggacgccacaccggacattcaaatcgtctcttactgtgctgatatggaagaagctaaacagatgttgaagaaccgacgtgcctatggcattatctatatcccttccgattttagtgacaatatcgccaaaggaaaacagacgcaagtcagcatttactgcgacatgagcggactgttatactataaatccatgctgattgccaacaccgccgtctcactggatatgaacaaggacatcaagattgcacgtagcggaaacactaccgaccggcaagatgaaatcactgcttatccgatagaatatgaagaaatctcgatcttcaatccgactgccggattcgctgcctttctgattcctgccgtcctagtattgattatccaacagacattactgctgggaatcggccttgctgccggaacagcccgcgaaaacaaccgtttcaaagaccttgtacctatcaacaggcattacaacggaacattacgaattgtactcggtaaaggactaagttattttctggtttatatattggtagctttttatgtactatatgtcgtaccaagactattcagcctcaaccaaataggacagcccagttcattagtattatttgtggttccttacctgacagcttgcatcttctttgcaatgacggcctcgatcgccattcgcaaccgagaaacgtgtatgctgatctttgtcttcacatccgttcccttgttgtttatttccggaatttcatggccgggggccgcaatccctccattctggaaatacgtctcctatattttcccctctactttcgggattaatggttttgtgaaaatcaacaatatgggagctacgctaagtgaagttgcctttgaatataaagctttatggttacaagcaggcttttatttcttaactacttgctgggtatatcgttggcaaatacttatgagtcgtaaacatgcaatagaaagatataaagaattaaaagagaaagagaatttatcaaagcagataaataactgattgaaacaacaaaagagagagatagtaacggcgcccccttttataaggaggatacgccgtttttctttttataaggagaaacccataaaaaaatcccccgcccaaagagagtataaggcgaaggattttcagagatattataaagagagtataattctattagaatttgtaacctacaccgatagagaagttgatgttcttcggagcaccatcaccatcatatattttagtcaaaccaaattctccagtcaaatcaataaagaatttattgatttcataagcaacacctacaccaagacctgcatcgaacttctttgcaccttccattaagatatcaccgtcttcatctttagtgtctttaaagaaatcaatcttttcaccccctgctttatatttaccagcaataccaaagccaaaataagggcctgcttttaccacaatattttgattgtcagcaattgcaaatctcgcagcagccattacaggaatttccaaatacataggattagctttcaactcatccattttagctcctttctgggtgaacatcaaagaaggttgaatagaccacatatcagtaaactgatattccataccaacaccaacattaaacccaactctcatgtcagtgtcagaatctccggtgaaattactcatgttcataccgaccttagcattccaagaaatctgagaataagaaacgatagaaacaagtgcaaatagcacaaaaatcaaaccttttttcatatcatttattttttagtgtaccttcctcctccctctggttggcattattaattaacttctttgctaagtgcggggaatcttccgtaccttatcaacagtatcgaaacgcacctttcatatttaacgtctgttttacagccacaaatatatttcatttattttatataaaaaagtctccaatgacaccttttttccacaaatgttattaaagtgtgattatttaggcaaaaatagcgcctatccaaccaatttttatgcttaaataattttccgattactccttaatcaaaatattattgcagtaatcatacatttacaataattaactgactaattattgctttattacgaaatattcgtagatttgcgaagtaatcgtaattaaacaacatctccatggaaaagttaacaatacaagaagaagaagtaatgatctacgtttgggagttacaaagctgtttcgtaaaagatatcgttgcgaagtatccgcaaccggctcctccttatacaacggtagcatcgatcgtaaaaaacctcgaacgaaaggggtatgtcacatcaaaacgtgtgggaaatacctatcaatacactcctgccattcgagaaaatgaatacaaacgtcactttatgagtagcgtagttcgtaattactttgaaaattcctacaaagaaatggtttctttctttgccaaagaccaaaagttatcgactgatgatctcaaagacattatcgaactgatagaaaaaggaaaagataattaatagtaaaaagatatccattatgactccggaattagcctattttctaaagataaatgtagcaattgctttgttctacgccttctatcggttgttctttcataaagacaccttctttcactggcgacggatagccttgttatgtttttttgccatttccttgctctaccctttactaaatattgaagggtggataaaagcacacgagccaatggtagcaatggcagatctttatgcaacaatcatacttccggaacaagtcgttaccattccacaagaaacagagattaattggcaagagctaatcaaacttctcacaggcattatctattggagcggagtattactactgaccgcccgtttcttccttcaactaggaagtatcatgcgactgcattttcaatgttccaaaagccaattgaaaggagtgcgtgtacacctattaaagaaagaagcaggaccgttctctttttttcattggatattcatacacccacagtcacataccgactctgaaattagtgagataatcacccatgaagaaactcacgcccgtcaataccactcgatagatgtattaatcagtgaaataatgtgcatattctgctggttcaatccatttagctggcttatgaaacgggaagtcagaggcaatctcgaatacatggcagacagccgggtattggagacgggacatgacagtaaatcataccagtaccacttgttaggactggctcatcacaaggctgcagcaaatttatcaaatagtttcaatgttttaccacttaaaaatcgtatcaaaatgatgaacaaacgaagaaccaaagaaataggaagaacaaaatatatcatgtttcttcccttggctgccctgttgatgattgtcagcaacatcgaagtagtagcccgtaccacagaaagatttgcaaaagaggttatggaacaggttaacactcctcagccggaaattgcaaatatccccgaactgcaaagtgaagaaattcagcaaacagtcgctctgccggccaaaaaagaaatcgcaaagtcaacacctatcgctcaaagcaagagtatacccgattctgtggtatttgaagttgtagaagtaatgcccgaatttccaggagggcaacaagccttgatgcaatatttagctaaaaacatcaaatatcctgtaacagctcatgaaaacggaaaacaaggacgcgtcattgttagtttcgttgttaaaaaagacggaaacatatccgacataaaagtagcccgaagcgtagatccctatcttgacaaggaagctgtaagagtaattgccgctatgccccaatggaaaccgggtaaacaaagaggagaaaatgtaaatgtcagattctcagttcctgtaatgttcaggctacaaggtccagctccttcaaagggaaaagaaataaaacaagctgatctggaagaagtagttgtagtagcgtatggtccaaaagaagattctaatgccaacgcaacagacgcaacatcaggtacagcactcaaagtagcggaagtaatgcctaaattccccggaggaatacccggtctgatgcaatatcttgccagaaacatcaaatatccgactattgcacaaaagaataaggagcaaggcagagtcatcctacaaatgattgtcggtaaagacggaagcatatccaatataaaagtattgcgtagcatatctccgttgcttgatgcagaggcgatccgtgtagtgagcactatgcccaaatgggaacccggacaacaaggcggacaggccattgcagtagaatatacccttccgatagtttttaaattacaataaacatttccccggtgccgcgcctcctcccccataccgggggagataaggcgttcatcggtatcggaaaaaagatacatctttttctacttttttgaggatagtcacaaaaatatcgttatatttgttcgaaataaacactattcgtatgaaaagattctcatggattatgggtttgatactctgcgtagtttgcaccgtacaagccaaagacagagttatcgagcgcccaccttttctagcttggagctcttcaaatattgaagttgacaaaattgtcatgagtgacacagttaccactgtatacatcaaagcattttatcgtccgaaatactggataaaaatagccagtggcagtttcctcaaagatgaaaaaggggccttatacccgatccgcaaaggtgtaggcatcacattggacaaagaattctggatgcctgaatccggtgaggcagaatttcagttacttttcccacccataccagcaaacgtaacaagtctggatttctcagaaggagattttgacggagcatacaaaatatggggaatacagttgaatgaaaaagatttccgtaagtctgcattacccaaaggagccgttattcataagataaacaaaaaggcagaactgccggtacctgaatttgcgtatggaaaagcaacattaaaaggacaagtgacagggtatcaaaaagatatgccaagctccggacagttacgtttaaacgacccgatcaggtggttaaattatgccgaagaagtaactatcaaggaagacggaagttttcaggttcagacagatgttattaccgtaactcctgccacccttgttttcccctttgcacaaattccttgcttgctggctcctggaaaagaaagtactatcatcgttaacacagccgagtgttcacgccaacaatcacatctccagaaagacaacaagccctatggcaaaaaagcttattatggaggttatctggctgaccttcaacaagagttatcagacaattctattccaagtaacttggttgacaacccgagcaagattgtcaaagatgtagccggaaaagatataaacggactaaaagattactttttagagaaacgtcttaacacctacaaacagatagatgaagcctctctcagttctgctgccaaagaaattctgaaagccaatacggatattaccacagctatcggattatttatgggaaaagacattatcatgcgtgcccatgttgtcagtcagaaattaaacagagaacagactaaagagtattacacaaataccaaaatagaatttccagtcgattatcttgatgtactcaaagattttacactcaatgagccggtagatttgtacgccccggaatttgcatacggagcaggaatattcagttccagaaaagatcttatggaagagaagttgggtaccaaccaaggaatcttgtttcaaatgggagaagcatacaagtgctatcgctccatagaagatttcacaccattgactgccgaacagaaagcagtccttgaagccctgccttctcctgcctacaaacagttgttgacggtccttaatgataaactactcaagaagatagaactgaacaagcaaaagaccggatataaaatcaatgaaatcgggaaagtaacaaacgaagaactcttttcgactatcatctccaaattccgcggacacgtactgctggttgacttctgggcaacttggtgcggaccgtgccgaatggccaacaaggctatgatccccatgaaagaagaactgaaagacgaagacattctttacctgtatatcacaggagaaacctctccgaaaggcacttggaagaatatgatccccgatattcacggagaacatttccgcgtaacaaatgatcaatgggcgtatctgatgtctacgtttaaaatcggcggagttcctacttatttcgtaatagatgcagaaggaaatacgaccttcaagcaaacgggattcccaggtacagacacgatgaaaaagcaactgatgaaagctttaaagaagtaatcgtaaagtacatcaccttgatcataggaaacgcctccatagtcttttcgaaaactatggaggcgtttttatacgattacggaagcttgtcgtcatcacaagcgattcaatctctgtccgtcttgcttatttatgcatctcaacaatctgtgtcggagccatttctacgttccgccgatcaacctgacgcaccacactggcagccaacgacaagaaagcacgaccagtcaccgaatcttcatccagtgcaacaggcgtaccattgtctcctccttcgcaaatactctgcacaataggaatctgtcccagcaaaggaacattcatctcctccgccaacttcttggctccttccttaccgaagatatagtatttattctccggaagttcggcaggagtaaaccaagccatattctcaactaatccgagaataggcacattcaccttatcattagtgaacatattgattcccttacgggcatccgctaaagctaccgcctgcggagtgctgacaacaatagcgcctgtcatagccaacgtctgcacgacagtcaaatgaatatcactcgtgcccggaggaaggtcaatcaggaaataatccagttcaccccaagaggcatcgccaatcaactgtttcagcgcattgctagccattccaccacgccacaacgtagcctgatcggggtcgacaaagaagccaatagacaataacttcacaccgtatttctcaacaggaataatcaagtcgcgaccgtcaatacgttcggcatacggacgcgcgtcctccacctgaaacattttcggcatagatggtccgaagatatccgcatcaagcaaaccgaccttataacccaattttgccaaagcaactgccagattcgccgagacggtagatttgcctaccccacccttaccggaagatataccgatgatattcttcacctgcggaagcagctttcctacttccggacgggcagcctgcttgctttccgtcgcaaccgtaacttgcacatcaggcgacacataagtatgaatagctgtttcggcagccttcaccatagatttcataaacggatcggtcggcttctcaaatatcaatgagaaactgactgacataccatcaatccggagattatcagcaaccatctccgcttccaccagattctttcccgtaccgggataacgcaccgtagccagtgcatccaatattaatttaggataaagtgtcataattcattcagagttgagagcggaacgtcgaacgttccactcaattattctttatttactagtctgcaatccactccgcttactacgattataactgcggtatgaatccagttcaatttccacatccggttccttcaactgtccttcttgcggaaggcggaatttgatatacttgatatttaacccccggtcgagccattgttgttcatagtaggtcttgataccaagaatatcgtctaccagatccgaatgatataaatcctccgtcataaactccaccggaagcccgttcgtttctatcatatactttgtataagtgaacataaagttactgtccgtcttcaggtgaatgataccgttcggtttgaggaacttccgataccgttccataaaataggtcgaagtaagccgcttggtcgccttcttcatttgcgggtcggagaacgtaagccatatctcgctcacttcgccttcggcaaagaaccgttcgatgatttcaatgttcgtgcgcaggaatgccacattcttcattccggcctgcaacgactccgttgcccccgtccacatacgggctcctttaatatctaccgcaataaagttcttttcaggaaacatcttccccagaccgaccgtatattctccccgtccacagcccagttcgagcacaatcggatgatcgttcttgaaaaactccttgtgccaatttcccttcatgtcaaaaggcacattatccactgccgaatacggatattcgaacacatgcggataactcgccatatcggcaaacttctctaatttattctttcccattcaatctttataagtttctcaccacagagaacacaaaagacacagagattataaatgaattataaggctccgtgtcctttgtgtcctctgtggcgaaagatagtactattcgacaattgtcacccaaccatgcgtatccggttcatcaccgtactggataccccgcagcttgttgtacaatttcgtacaaatcggtcccggttttccatccttggagataacgtatgatttgccattctccagatcatcaatacgttcaatcggactgataacggcagccgtaccgcaagcgccggcttcttcgaacgtagccagttcttcttccggaatcgggcggcgttcgactttaattcccatatcttccgccaactgcatcaagctcttattagtgatagaaggcaggatagaagttgatttcggcgtgatatacgtattatctttaataccgaagaaattggcagcaccacattcatcgatatatttcttttcttttgcatcgagatagaactcgcaagagtaccccaggtcatgtgctttcttgttggcacgaagactggctgcatagttaccacccaccttgtaaataccagttccatgaggagcggcacggtcgaattcacgaatgattacgtaaggattggtagagaaaccacccttaaagtacggtcccacgggagtcacaaataccacaaacatatattcgtcagccggatgcacacccacctgagcacttgttccaatcaataacggacggatataaagagaagcacctgtctcataaggagggataaaacgttcgttcagtttcacaactttcaggatagcttctttaaaacgttcggtaggaagctccgccataaggattccctggcaggtagattgcagacgcgccgcattttcttccagacggaagatacgcacttttccgtcttttccacggaatgctttcagtccttcaaatgcttcctgaccatagtgcaaacaagtagccgccatgtgcaagttaagatattcttcactgctgacttccagttcaccccacttaccattgcggaaattgattctcacattgtaatctgtcctcatgtatccaaacgacagattcgcccagtctatttctttcatattgtaacgtattagtttattttcttatgcattgaattgcaaaaataacctttattcttcagactgttgcttttcttgcaataatttttcgacttcgcgatccgctttcgtcagtttttcggtgcaaaaggcaataatttcattggcttctttgattttttcgctcaagatgtcaatatccaattcattgttgtctatctgcctgacaatcttttcgagacgctccatagcgccggagtatgtttctttttttgctgccacagtgatatgtatttaatggttgataataaaactctaaatataccgggttcggaacgttcgctaccggacggtggactgcacttctcctttcagaagccgggtggtcaactgatcgcccggctgcagtaaagatgcatcggttaccgcttttccatcctttagcgtgatgctatacccccggctgagtaacttttcgggagagttatccgcaacgcgctgttgcaatagttccagccggtgccgctgacgggacagcaagttttgcgtcacctgcgacaagtccttccgggctgtcagcagggtaaaacgggcttcggacagcttccgatgaaccagtgcaggaatacgggcttgcattgtaaccagccttctctgctcctgttccagcaaagtataagctccttgctgaagacgggcggacaattcttcaagacgttccgccgcctctcctacccgttgaattaagagttcggctgcggcagtcggagtctttacacgagtatgcgccacggaatcgagcacggtgtcgtcacgctcatgtccgataccggttatgacaggtaacgggaactgcgcacaggctgctgccagcaggtaagtatcaaatccggataaatcggaagcagctcctccgccccggataatcacgactacatcaaactcgcttatacgggcattgatgcaatccaaggcggccaaaacggattcttccacctgattaccttgcatcaaagccggaaatagctccgtgtaaaagaagaagccaccggaattatgtttcagttgatgacagaagtcgccgtagccggctgccgtagctgaagaaacaactgcaatacgttggggaagaaccggcatttccagctctttgtttaacgtcagtactccttcttcttccagttgcagcagtatctcacgacggcgacgcgccatatctcccaaggtataagtagggtcgatatcgagtaccgtcagactatacccgtagagttcatgaaattgcacggtcaccttgaccagcacttttattcccgaagtgaacagctgtccggtagattcctcaaaataaggtttcagcaggcggtaaatattattccagatcataccgcgtgccttggctacgagactattgctacgcggatccttttgtatgaattccagatagcaatgtcccgtcgtattggaacgaacgtcactcagctccgcctgtatccaatattcatcgggcaagcactgctccaggctgcggcgaacaagcgcattcagttctaaaagagaaagcgagtccataatcaacggcgagtgtttaccgtagattgataagctttccacaaatcaggaatgccgtatccatatatattatcggggaaaactgcccggtcgcccgaccggcgtaccagttcgataatctcttttgcagtcagctccggacaagcctgccacagacaagccaccattccgcacataatcggagaagaaaaggaagttccgttagcatggcgcaaattaccgtccgttcccattacatccgagcccagacctacggcaacaacatccggcttcacccgtccgtcggccgtattcccaacagaagagaacggagccagaactccatatttgttcaccgcacctacggttatcacattctccgcatctcccggaggcgtaatcttcttccacgaaccggacccggagtttcccgcactgcatactacaacgattcccttatctgccgccttcgccgcctcacgggacatcaatgcataatgtccgttcaaatcacgatagcggtaattcttcgccgggtcatcaaatgaataatatccgagagacgtatttaccaaatccactccgacactatcggcaaattcgatagctgccgcccagtaatcctgttccaccaaattctccgaatactcgtcctcactgcgaagcaaccaataagaggcctcgggagccgtaccaatcatcacattcggctgattcattgccatacaggaaagcacggacattccgtgactgctctctgcatagatatcggcttccggattcacgaagtcacgagtacccagaatattgatatttttcattgcctctatcttgtcaacattatgaaatccggcatcaataacagcaatcgtcatcccctgccccttgaagcctgcttcatggagacggtccgcatggctcatctttatttgagtaattgcgggaccgtaaaggctgtccgtacgtaaaggtttattaatcaatgaatctctctcagaagctcgtttggcgacacctctccaaactctctccgtggaacggacgaagggcaacccggctatttcagcaatcaacatactgtcattacaggaaacagtgacgaaattatcccattttcctgtaacaagcacatgaacgcctttcttgcgtatcgcatccacatatttcttacataccggcaggtcagtagaatctatctccaatccctgtctttttctccgttcaatagatttcttggataaatacatctcaggcttttgcaaagagtagtccgtagccgctttgtctttcagactgatacgatacttcagggtatcccccggcgtgaattgcgcaaaagtacccaaacaaatattcaaggcaaaaaccaataatacaagtttcttcataagttatctttgttttaatcaatcaaaatccttcgttctccaaaatcaccaatccgattcctcgttgcgaagcaataaaagctccgcccagtacccgccttccgtcatagaacacagcagattgtccgggggcaatagccgaggccgtttcaagaaatcgcaccaacagtcgtccatccgccaaccgcttcacccggcaaggcaacggacggcttcgataacgaatccttaccgtcagattctcgcattggaacaattcccgttcatccacaatcttatcttgctccgtcagcatataatccgtccgcaactgttcggcatcgccaagcattaccgtatttttctgcggattgattttcaacacataagccggtttgcccaacgcaatctccaggccttttcgctgaccgatcgtataatagggcgcacctttatgctgccccaacttcactccttcggaattgacaaaccaccccggtcctatttcgttatccagttccgggcactgttcacgaaggaagtcacggtaatcacctttaataaagcagacttccatactctctccttctttggacttggcttcgtagcctttatcagcaaggtattcgcgtactttcactttcgtataatcccccaaagggaaaatacaacgcctcaatacatcctgccccagttgccaaagaaaataagactggtctttcttgtcatcatctccggctactatataaatatccccgtttctctcttccaagcgggaataatgtccggtagcaacccaggcacaacccagcttgtccgcccactccgtcaggacacgaaacttaaataaagggttacacatcacacacggattcggcgtacgtccttgcttatactcgtctatgaaattctttacgatcgtctctttgaaagggatacgctcatccgccacataatgttcaatccccatttgcgcagccagctctctggcgtcttgcggctcgtcgccccatacacgcatggttactcctactatttcgtatcctcgctcctgtaacatcagacaagtggcggtactgtcaataccgccgctcattccgactaatactcttttatttcgttctttcatccgaattctgaaaattatatggcaacaaatatacgggattcttcggagaatataaatttattgcgaacgaaacatcatagatgtagagaatactattttactgttcttctgaaatattatttgttactatatcttttcacaaactgctagttgtcacaaagtttgaggaaacaattcaggttgcttcaaattcggctgaataacccgaacccaaatttctttactcggcaacgggcgaccaggtaattgataactaatctgtaacagattctccgaaataaattcaaatttcagtttactatctgctcctgttagttccggatcagttatcgatttaaagattttttcaacataagtacagtcagatgtttgagcataagttcccattgccgttataacagctctctcatccgttattgctaaatgtatattgaaaaagttcttatccgatgataatattttcatataaggtccggtttggatatcaaactttccgtatcctaaaggttccacatgagtacaaatttgccagactccttccaaagacgcctttatattcttattcaccttcagtccttcatttgaagaggaagaattattttccccactcaatcggaaactaaccgggatagtatatgacaccgggactttcttccctttttctctaccgggtacccattttcctggaattccttttactactcgaagcgcttcctcgtccaacaacgggtcaactcctcgcacaacctcaaactgtgatgttttaccattcttctttatcacgaattgcacaagtacagttcccgatgctccttttgctcttgcataagccggatactttaccgtttttgctatatattgcattattccctcctgcccttttggatatacaggcatttggtctacatacatataaactccatcttcacgaacttgaagcattttctcctgagctgccatttgaatattgctacatatccaaatcaatactaaaaaactaaatgcgaactttttcataatacttaatttattggtgatttaaaacgttactttttatactatgtctttctttgtacattcactagagataacctatatcaagatatctacgatgatattcctcccagataatcatccttcataaataggggtggtttaaaaagagctaaagaaacaccggtttttccattatacaggtcggaaaaggcgaatgaataaacattcaacagaatatagtcagttatttcaggtataaggtcaacagtcattgtactttctcgttttggttgtgtacaatataaatacacctcataacttcctaaccccacattaactatataagaattattatatttaacatttcaggaaataaaacactgctaagaagtgtattcatccaggcttatcatgcaatccgtctcctataaaagcctaatattaccccttgtatcatctaataatatcatttttcatgtatcgcccttgccaggattggcctcaagacataggtacttcttctgataaacacctgcattccaagcatattagctatatagtttatatgttttcccttagaaatcatcaagagctcactactgtgaatcaacaagctatcatcagtaaacaaataagctaacatacgtaaacaattttgctaacttatgtgagtttttgaagaacattgagagtttacagaagaaaacctaagcactaatgtatagtatataggagaattgtgtagtatagccagtcaaccaaaatcaagaccagacacgctatgagggtaaaagttaccctcaccttaccctcatagttaccctcatacctgtaaccatgatgaataaagggattaaggctatctatgaaagtatgagggtaaaatgtatgtataatttttattagtgaagctgtctttcctcaaaacgatacttaattgaagtgattttataaaaaagaagttgcttttctgaataaaattgcctatatttgaaatataccaaaagcgagaacaattatggctaaccccagattaccgggcatttccgagaacgagcaagccttattgtatgccaaactgaatgaatacaaccgaggcagagcctctttcaaagaggagggtgtttacttggtggtgttaccccgaccggggaaaccaaactattccctttggctctattctcccctgcccgaaaaacagtcgattctttacatacatgatctgtcaccggatattaacgagtctctccgagtggccagtacgatgttctattactcgaaacgctgccttattcttgtggattataatgagaaaagaatgcagagtaatggtgacgatctgatcttcttcgggaaatatcgcggacacttcctgcatgaaatcctaaaaatagccccttcctatttaagttggatagcctataagtttactccaaagattcccaaacaggaacgtttcgtcaaaatagcacaggcgtatcactccatacacctggatataatgcagagaaaatcgagagagaaacgttcgtcaagccggtatctgggagagctgggagagaaactgacagacttgaaactgaaagtgacccgtgtgcggctggaagatgacccgtacaagacaagagtaaacggaaccaccccacagttttttgtcaaacagatactcacactgaccgatgcaagcggcaacttggctgttatgagtattccatctaaaaatcccagtgcagtatcatgtactctatccgggatagaacatgaataccgactgggagagattatctacatcgaatcggcgaaagtgtcacgccgatacgaaagctatggttctaaatatacacgccttagtcatgtgaagtttaccaacctcaacgtttagtccaatcgtccttgacaaagcttgccggataagagactttatccacgatgccgtctttctgacggatccaggaagtaaatgtacgggcgccttcatccaatacgatgatacgggcgccgttcggcaaatggttatacacagtgttcccaccggtataacgcccgtaagccaataggatgtttttccacatgaccgcgtaatcattatcgtggtcgtgtccgacaaatactcccattacatctcccgcttctttcatagcggcaaacattcccgtgtttattctcggcgaacaagcctcttccattcgagtaccccgcagagctgcatttttgtcacggacagcttcatgatattcgggcagaggaatatggaaaaaggccagagcgggcactggttggccaccgttctgagctttataagctgcgctttgctggcgataccaatttatctgatcgaacgtaagccagttatatcctttcacgtctttcaacggtgaataggaatggctgtccatacaataaagcaaagctgcatcttttttaggatcggaagaagacttcactgtcagcacataatccggtgacaaagcagttccccggtcgggcattaaattccccggaacggtacggattatatcgtacaattgcgtccgggtcaatccttgttcatcatcatgattgccaaaagtcacaacgaaagggagtttacgtttggacacctgctccagaaccttcaacataccggaatctgccggagcggaataaatcacatcaccggtgaaaattaccacatccggttgttcggcatcaagcacctggtttatacgttccaacgctacatccgaggccggattgccatatttaaaatgtacatcggtaaattgtactattttaaacttaccgtctttattaaacttcaactcgctcttttgagccatacagaaagtagttaagaataaagcgaacagtgttaagcagaaatttaaagttctaatcatgttttatttattttagggggttaatcagtcttctctatcagtaccgtagcataagcggagataccttcttcacgaccggtaaatccaagcttctcggtagtagtagctttgatcgagatatcatctgcgtcaatccccattacgattgccatcgtctcctgcatcaaagggatatgtgccttcagcttcggacgttccgcacaaatcgtcgcgtcaatattgccgaccttatatcctttgccggcaatcagttccacggtctttttcaacagaatcttgctatcaatatttttaaactctccggctgtatccgggaaatgataaccgatatcacgcatattggccgctcccaataaagcgtcgcaaacagcgtgcagcagcacgtcggcgtccgaatgtcccaacagccctttcgtatgctccaaaaggacaccgcccaaccataactcacgcccctcgaccagttgatgtacatcgaagccaaaacctactcttattttcataaattgtatactaaacgtttttttgatgaacagatgaatcagcggatatagaaatccagcagcttctcaccttccagatatccctgcaaatgctgtccgatactgaccggacctacaccggcaggcgtacccgtaaacaggagatctccgattttaagcgtcacaaaacggctgacataagcaatgatatcgtctatcttgaaaagcatatctgccgtacagccactctgcacttccttaccgtcaatcaggagattaaaattcaggttctggatatccttatagcgatctaccggaacaaaagtaccgatagcagccgatgagtcaaagcctttgcagagttcccaggggttgccctgctcgcggaacttccgttgaaggtcacgggcagtaaagtcaatgcctacggtcactgcgtcataatagcggttagcaaaacggggagcgatattcttccccagccggttgatacggaccaccagttccgtctcataatgtatctcgttagaaaaatcgggaatgaaaaagggtttactatctttcaggatagcggaatcgggcttcataaaaatcaccggttccgtatttatctgtgtatgtcccagttctttgttgtgccgggcgtagttcattcctactgcaataatcttcatttatttctcgttaaagttcaatcggttaaacattacagccaagtgggcataaagggaagtattctgcaccacaatattctccggtacgcgaatacggaacggagtaaaattccataccgcctttatacctccgtctaccattttatttgtaatttcctgagctatattaataggtactgtcagcacaccgatattcacgtcatattctttcatctttgcttcgaaatcatcagaatgaaaaataggaatgccattcaggtcttttcccaccaattcggggttgacatcaaaagctgccacaatctccagtccgaaatgatgcaaacccgagtcccggagcaaagcggcccccagactacctacaccaaacaagaaggctttatgcatattggtaaatcctagaaagctctctaatacctcaatcagtgcgtcaatgttataccccactctcgtacgccccgatatattgacgtacgacaaatctttggcgatttgggatgcgtcaatatttatttccttagagatttgtgtagaagaaacgtattgttctcctttttctttcatcagttttatattagacagataccagggaagtctgcgcaaggtaggctccggcactttatccgcctcttttggtatataagtgctcatacttcttacattatttggtattttgcaaaagtacattattttttgagactgacaacccaatatcgcaaaaccttaatagagattaaacaaaacaatgaaaaccaatgcaaattttgctcttttccataagtttgatacttttgggaagaaataaaaagaagaagcatgaaaaagaacgattggaaagacaggctgaatgtggtgtattccacgaaccctgattttggctacgaaatggataatgacgaagaacaggtcactctcgataaagacaaacaaaacctccgagtttccattgacaagaaaaaccggggtggtaaagtggtaacattaattaccggatttgtcggtacggagaacgacttgaaggaactgggcaagctgctgaaaagtaaatgcggagtaggtggttcagctaaagacggagaaatcatcatacaaggggatttcaagactaaggtcatggaactgcttgtcagggaaggatacacgaaaacaaagggtataggaggctaacttatttaaaagatataagaaatgaagaaagttactttattttgtgtagcagcgttattctcactgctgtcgtttgcacagaacgacaaaggggatatagtcaaaacaggcgacaagatgcctgctttcacccttacttcgaccgtcaacggaacagtaaattccgcagacttgaaagggaaagtagtactcattaatatctttgccacttggtgcggtccttgccagagtgaactggcagaagttcagaaaaccctttggcccaaatataaagacaacaaggatttccgcatgatagtgatcggacgtgagcataccgatgaggaattaacggcatacaacaagcgcaaggaatttacgtttcctctctacccggatcccaaacgggaagtcacgaataaatttgccagtcagtacattcccagaagttacctgattaacaaagaagggaaagtgatatccgctactgtcggttaccaaaaagaggaaatggacaagttgacgaaggaaatagacaaagcattgaaataacaaaaaaaatgaggctgtcctcagaaaaaagatttgaagacagcctcctatattctcagtttcctgactgattattcagctttcaaagtgaaacgcttgaagtcaacgattttcagttcaggatcagctgctgccaacacttctcttactgtcttcttagcgtccatgatatcttcctgattcaacaggcaaacttctttcaagaacttacccagacggcctttagcaatgttctgaatcatttgttcaggcagatgtgcagccttttcagcagaaacggtagcaatgatttcttttgccttcgctacatcttcagcagtaatccagcctttagccatgttgctttccatgtgttcttcgctgtccacatgagccgggttgatgttagctttcttcagagctgcttctacagccttctgtacctgttctgcttttgtcttctcaatggcaacttcgatttctttctgttttacttcttcagaaacgccatcttcatcaatggcaatcgggttcatagcagcaatctgcatagctacttgtttagccaactgatcgttaacttccttgttgaaagcaacaatagtgcaaagaccatttctgttcatgtggttgtaaacagcagtgcatacaccttctacagtcatgtaaccatcaagttccattttttcaccagtgataccgctacgatcaactactgcatcctgtacagtaccgttacccatcggcaatgcttttacttcctccaaagtcttgcatttgttagccacagcaagatcaagaatatcctgagtcagcttcacgtaatctgcattctgagccacaaagtcagtttcacacttcaaagcaatgataacagcacggtcaccggtagtcttagccaaaacgcaaccttcagcagcttcacgctctgaacgcttagcagcaacagcttgccctttcttacggataatttccattgccttgtcgaaatcgccttcagcttcagtcaatgcgtttttacaatccatcataccagctccggtcattttacgcagcttggtaatatcagccatagttacagccataataatttcttttatttaaatgaataataattttcaaaacaaaaaatgtgccaatctgccaatcaagatgcaagtgtataagcatacccttgcacattagcaaattggcacattattatattaagcctcttcgtcttccttcaagaaagcagcagctttagctgcgttgatagcttcttcgtcagatttgtcgagtcttgctttagctgatttcttcttgcctttgttagcaggagcttcaccggcagcttccatatcgatcttttcagcttttctttcttccaagccttcgatcatagcagcacaacaagcatccagaataacttctactgatttagtagcatcatcattagcaggaattacgaaatctacgtttgaaggatcagaattagtatcaacgataccaaatacaggaatacccaaacggttagcttcgcgaactgcgatattttctttcattacgtcgataacgaacaatgcagacggcagacgagtcaagtcagcgatagaacccaaagtcttgtccaattttgcacgttgacgagagatctgaagaatttctctcttagaaaggttagaataagtaccatcgttagtcaatttgtcgatagtagccattttcttcacagccttacggatagtcgggaagttagtcaacataccacccggccagcgttcgattacataaggcatattaacagattgagctttctcagctacaacttgtttagcttgttttttagtagcaacaaaaagaactttcttgcctgatttagcaatctgtttcaaagcttcagcagcttcgtctacttttgcaactgttttgtggaggtcaatgatgtgaataccattgcgttccatgaaaatataaggagccattgcagggttccactttcttttaaggtgtccgaagtggcatccggcttccaataatgtatcaaaatttgttcttgacatcttgtttctctttaaatcgtttactttcttttttgttttttctaaaccaaccgccgggtagtctatgagtagagtcccagtagtttagatactaaacatattcctcggtcaggcagcccattaacgcttgctgaactggaatcttctacgagctttcggctgtcccggtttcttacgctcaacagaacgcgggtcacgagtcataaagccttctgcacgaagagcagctttatcttcagcgttgattttaaccaatgcacgggcaattgctaaacgcaaagcctgagactgacctgtgaaaccaccaccacacaagtttactttgatgtcatacttctcagcagcaccaatcttgttcaatggttgttttacaacatactgaagaatagttgatggaaagtactctgcaaggtctctcttgttaatagtaatctttcctgtaccttcgcttacgaaaatacgtgcaattgcacgtttacgtctgcctaatgcatttactacttccattatatcttatttatatgaattaatatcaatcattttcgggttctgagctgcttgtttgtgttcgctaccagcgtaaacatacaagttgttcagcaatttagctcccaaaatgttcttaggaagcatgcccttcactacttttttcagtaatctctcttcaccgttcggttttgcaatcaaacgggcaggagtcatttctctctgaccaccagggtagcctgtatatgacaaataaactctgtcattccacttgttaccagtcagttttactttgtctgcattgatgatgataacgttatcaccgcagtctacgtgaggagtaaagtttggtttgtactttcctctcaacaattttgcaacttttgctcccagacgacccagtgtttggtctgtagcgtcaacaataacccattctttggttacagttgctttgttggcagaaatggtcttgtaacttaaagtatccactctaattttgttttttaaatgttactactaaaaatattcttcaccacttattagtcttccccggacaaaggacgactaacttgctatgaattaatctcttatctttttgtgataataatcggcttgcaaaagtacggcttttctttgaattggcaaactatttcttgctttttttgaatatatctaattggcaaacaagaagaaatagaacgaaaaacaggcataaaaaagtctgcatatcttctcctttaaagaagtaatatgcagactataataacaatcaaattatctttatctcacaatatcttccggaaatttggccggcatacttattcttttccaggtttcataataccaggtgttcaattcatttccattcaagtcattcttgatgaagtattttaaatgcagataatcgctatcctttatttcaaattccagaatattgtcctgattatccaacatcggaagatgaatattcttctcgatactttctctataagaatcatctgtcaactgcttccatgacccatatcccgtaacaattgcactggaaccgggaataatagtgaagttcacgattcttccatcatcactcaataccttaaatgtattactgggtttcaactctcccggaacatcgggagactccgacacataatggcaaagttgccagattcctttcaactcggccaccttgaatttagttttcttttgggccatcgcacctgttaccgccaacaacattattgaaagcatggtaaagaaatagagttttttcattgccgtattattttagttaacactcttgaatgcgtatgtccaaatataaagatttattttgagaatagaacaataaagtgcataaaaaaactcgcataaccaaaagattatgcgagttttacataaatataccgaaatattagaaatcagcatttctcggtgtacgcgggaacggtatcacgtcacggatgtttgacatgcctgttacgaaaagtaacaaacgttcaaaaccaagcccgaagccggagtgaggacaagtaccgaacttgcgggtatccagataccaccacatatccttcatcgggatatgcatttcttcaatacgagtcatcagcttatcataatctgattcacgttcggaaccgcctatgatttcaccgattttcgggaaaagaacatccattgcacgtaccgtcttaccatcctcgttttgcttcatatagaaggctttgatctccttcggatagtcagtcaagattaccggacgcttgaaatgttcttccaccaaataacgttcgtgttcggaagccaagtccacaccccaataaaccgggaactcaaatttgtggccttttgcaacagcttcctccagaatcttgataccgtctgtataaggcaaacgtacgaaatcatctttcaatactccttgcagccgttcaatcaatcccttatcgaacatatcattcaggaatttcacgtcatccgcacagttatccaacgcccatttcacacaatatttaatgaactcttctgccaagtccatattgtctgcgatgtcgttgaaagcaacttccggctcaatcatccaaaactcagccaagtgacggggagtattggagttttcggcacggaacgtaggaccaaatgtatagatagctcccaaagctgtggcagccagctcaccttccaactgaccggaaacagtcaaacttgcctgcttgccgaagaaatcatcatcataagagatagaacctctttcgtctttcttcaagtcatacagattcatggtagtcacctgaaacatctgtccggcaccttcacagtctgaagctgtaatgattggcgtatgaaaatagaagaatcccctgtcatggaaaaacttgtggatagcaattgccatgttatgacgaatacggaacaccgcaccaaaagtattggtacgcggacgcaaatgggcaatctcgcgcaagaattccatagagtgccctttcttctgcaacgggtatgtgttatcgcaagtacccagcacttcgatttcacgagcctgcacttccaccttttggccggagcctaccgattccaccatttcaccgttcacgctgatacaagcgccggtagtaatcagtttaagcatctcttcatcaaaattagccaaatctactacgacctgcaaattatttattgtagaaccgtcattcagtgcgataaagtttacttgtttgctacctctgcgggtgcgaacccatcctttcacattgaccatagcgccgatatccgtacgcttcaacagatcaacaatttttgttctaccaatcttttccatttaacttattctttttagatacaagaagacgaggtttaaaacgcaagattcattttttcctgctttctttccccgtcctctgtcaagttgttatttattaacttattattcaaacgaacccatgcggaggtagtttacttctgcttccgacaggtaacgccagtctccgcgacgcaaaccttttttagtcagtccggcgaagaatacacggtcgagttttactactttataacccagtgattcgaaaatacggcgaacgatacggttcttaccggagtgaatttcgatacctacctggtctttcttgaaatcatcggtatagctgatagcgtctgcatggatttcaccgtcttccaactggatgccggctgcaatctgatccatatccgcttttgtcaggttcttgtccagatgaacatgataaattttctttttcagaaatttcggatgtgtcagcttggaagccaagtcaccgtcatttgtcagtaacagtacaccagtcgtgttacggtcaagacgtcctaccggatagatacgttcgttacaagcgccttttaccaaatccattaccgtacggcgctcctgcggatcatccgatgtggtaacagtatctttcggcttattcagcaatacatataccttacgttcgatgctaaccggttcatcgtggaatttcacgacatccgagcgtttgatttttgtacccaattcagtaacaacttcaccatttacagaaaccacacctgctgtaataaattcatcagcctcacgacgtgaacaaacaccggcattagccaggaatttattcagacgaatcggttcgttcgggtcaacaaactgttccttgtactcgatttgtttctttatgctatatttagcattcgggtcataatcgccggtacgtggacgaggacggtaaccgccctgacggtcattattgaatttcggacgatagccaccaccgttgttgctgcgatagcctccaccttcgccactattgaagcgaggacgatacgggcggtcaccaccttcgcggttgtaaggacgctgaggacggtcgccaccttcaccactattgaaacggggacgatacggacgatcaccataagagcgttgttcgccgccttcacggttgtaaggacgctgaggacggtcgctgccgtcagaattcggattaaatctcggacgatacggacgatcaccaccttcacgattgtaggaagggcgttgaggacgatcaccataagaaccaccttcgcggttgtaaggacgttgcggacggtcgccaccttcactattgttattgaagcgaggacgatacggacgatcaccgccttcacgattgtaagaaggacgttgcggacggtcgccataagagcgatcaccatacgaacgctgtgggcgttcgcccccttcattgttggcattaaatctcgggcgatacggacgatccccaccttcacggttgtaagaaggacgatacggacgttctcctccctctctgttgtacgacctgttaccatcacggccggcacctgtattctcttcattgaaagaattttcgcgccattcttcgttttctgtgctcatttttttattcgaataaaattagactttggcctcacggcctatttaaaaaacacgtttattgtataagtaaacaattaaagccccgtataagtatgcggagtaattgctcttaactcttttttaatatcttcgtttacattcagttcttcgataaactctttgatagaattttccgtaatcgcctgatttgtccgcgtcaaagctttcaacgcttcatacggatgcggataagcctcacggcgcaggattgtctggatagcctcagctactacgctccagcagttatccaaatcacggtaaatagccggttcattcaataatagtttgcgaagtcctttcaaagaactctgaattgcaatcacaatatgcccgaaaggtacgcctacattacgcagaacggtagagtcggtcaaatcacgctgcaaacgggaaaccggaagcttcacagccaaatgttccagaatggaagtggcgatccccaagtttccttccgcattttcgaagtcaatcgggttcactttgtgcggcattgcgctcgaaccgacttctccggcttttatcttctgtttgaaatactccatagagatatattgccagaagtcccggttcatatctaccattatagtattgatacgcttcattgcatcaaaaacagcagagaggttatcatagtttgaaatctgagtcgtatattcttcacgttccagtcccagtttttctgcaacgaaacgattaccgaactgtttccagtcatactgaggatatgccacatgatgtgcattgtaattgccggtagcaccgccaaacttagcggtaatcgggcaagccttcaacatagccagctgacgttccaagcggtaaacgaataccattacttctttacctaaacgggtaggagaagccggctgaccgtgagttttggcaagcatcggaatatcagcccaatctgttgcataagtttttaactgtgcaatcagttcttcaatcaacggataatacactttatcgagcgctttcttgatagaaagaggaacagacgtattgtttatatcctgagaagtcagtccgaagtgaatgaattccttatagtcatccatcccccccattttgtcaaattcttctttcaggaagtattctacggccttcacatcatgattggttacactttcgatatctttaatacgctgtgcatctgcttccgaaaagttacggtaaatattacgcagagtttcaaacacactgttatcgattccttttaattgcggcaaagggagttcgcacaaggtgataaagtattccacctctacctgtacacggtatttaatcagtgcaaattcagagaaataagctgccaaagctttagttttgcctctatatcgaccatcaatcggagatatggccgttaatacatcaagttccatacgttttcttagataattatcagactgcaaaattaactctttttcctgagttataaggcaaaaggacaaagaaagtttgtataaaagaggtaagaaataaaaaaagtctcacgaatttcttcgtaagacttcccttttggtagtgggcgttgacggattcgaaccgccgaccctctgcttgtaaggcagatgctctgaaccagctgagctaaacgcccttacacttccgtttcaaaagcgatgcaaaggtacggcattttttgaaatctgcaaacatttatcgaattatttttcaaactttttatgtataattccgtgaagttactgattatcagcccgcaaactataattatttttttcagtccctacgtcggattacacgcgccggattcccgactgcgatactatcatcaggaatatctttcgtcacgacacttcccgctcctatcacacaacgatcaccaatcgtcacaccgggacatataatagctccgccaccaatccagcagtcctcaccaaccgccaccggataagcgtattccttggagcctcttctttccaaataatccatcggatgatgcggtgtgtaaatctgcacacaaggcccgataagcgtatgagcaccaatcgtgatatatccgccgtccagaaatgtgcagttagcattgacaaacacatgctcgcctagcttgattccgtccccatgatcgcaatagaaaggcggacaaataaccgaagtttcaggaatcctcggcaccagttcttccagtaatttcctgtacccttcatcatacgtactcattccccgcatacgagccaacaatttcttggcatgctcaaaacgcacctgcaactccggcgaagacatatctgccaacaggccgttacgcatcttttcaacttccgtcatactctttatcctccctgaccattaataaatacaaaccgcctctcatccgaaagagcctcatcaaactcgaagccttcccacgaaaatcctttcaaatcttccggattctctattctatttttcaagataaaacgcgtcatttcaccacgagacatcttggtatatattaccaccgtagccagttttccgttcttccacacatgaaattcaggggtcacgacacgcacttctttctccacccgtttccagtcaaacaaacttttcatttcgtcactggccagattgcataaaatacctcccgcctgtttgatgtcttgtataaacgtatccgtcaggcgcgaccgccaataagaaaacatcgtctgattacccaactccggcaataccacatctccttcgagacgataggggcgaatcacatccagcggacgcaacaaaccgtaacaaaaagatgtcagccgcaaatgttcctgtgcatattcgagttctgaggcagagaagtctttcggattcaaccgcttgaacacgattcccgtataagagaacaaagccggcaattccggagtttcttccgcatggaaagcctgataacgcttataattctctactgctattttagcattcacacgcaacaaacgttccagatcgccgacagcaaactgcgacatctgcaaagctatctcagaggcttccttttgaaaacggggaaccgtagtcaaaggaaccttcacctttgaaacatcactcattgtcttggcacaagataaaagcacaagcatatttcaactactaattacaagttactaattacgaagtagcaaagataaaaaataaaacaagaaaacccgctattaacaggctgtcaatagcgggcacttattaagaattataatagttcttatttgtattcctgccagctcttaatctgaatatcactcagcttcaattcacagaacgcttcgataaaggcacttgccagacgggcattcgtaatcaacggaatgttatgatcgatcgcaccgcgacggatacgataaccattcgtcaactcacgtttactgtgattcttcggaatgttaacgatcaagtcgaacttgtgatcggcaatcatcttcattacattgttttccgcacccggtttttcatccggccaataaaccggagtcgtatctacaccgtgagcattcaagaaggcagcagtaccggcggtagcataaatctgatatcctttggcaaacaacatacggcttgcatccagcaaatcaactttagacttcattgctccggaagagaacattaccgccttttcaggaatcttaaagccggtagcaatcattgagttcagcagtgcttcggagaaatcatcaccgatacatcccacttcacccgtagaagacatatctacgcctaatacaggatcggccttatgcagacgtgagaaggagaactgcgatgctttcacaccgatccagtcaatatcaaaagccgatttatcaggacgcgagtatggagcgtcaagcatgatgcgggtagccgtttcgataaagttacgtttcagtactttagatacgaacgggaaactacgagaagcacgcaagttacattcaatgactttcacctcgttattacgagccaggaactggatattgaacggaccggagatattgagttccttagcaatctgacggctgatcttcttgatgcggcgggcagttgcaaagtatatcttctgtgccgggaacaccagtgtagcatcaccggagtgaacacccgcaaattctacgtgttcagagatggcatattctaccacctcaccgttctgtgccacagcgtcgaactcaatttcttttgtattctcgaggaactgtgaaacaactaccggatattctttagatacttcggcagccattttcaggaagttttccaattcttcatcatcatagcaaacattcattgccgcacccgaaagaacgtaagaaggacgaaccagcaccggataacctactttttccacaaagcctttcacatcttcgagactggtcagctcctgccaagccggctggtcgatacccagttggtcaagcattgcagagaacttgttacggttttcagcacggtcgatagagatcggcgaagtacccaacacaggaaccgactgacgataaagtttcatagccaagttgttcggaatctgtccgcctaccgacacaatcacaccgcgaggttgttcgaggtcaatcacatcgagcacacgttcgaacgaaagttcgtcgaagtacaggcggtcgcacatatcatagtcagtagaaaccgtttcagggttgtagttaatcatgatagacttgtatcccagtttgcgggcagtctgaaccgcattcaccgaacaccagtcaaattcaacagagctaccgatacggtaagcacccgaacccagcacgactactgatttttcattcttataatagttcacatcataaccttccactgcatacgtcatatacagatagttagtcagttccggatgttcggaagcaatcgtattgatgcgttttactgccggaagaatccccatagctttacgatgagcacgtacagccaagttttctttctccatgtttccagtcgggttcagtacgaaacgtgcaatctggaagtcagagaagcctaagattttagcttcacgcattacgtcagccggaatatcttccaccttattatatgtagacaatttagctttgtagtcaacgatgttcttcagtttaccgaggaaccaaggatcgatctttgtcagttcatggatacggtcaatcgtatatccttcttccaaagcctgtgcgatagagaacacacgcaagtcagtcgggcgggaaagttctttatcaaggtcatcaaaatgcagttcgtcatttcctacaaagccgtgcatgccttgtccgatcatacgaagacctttttggatgatttcctcgaaagagcgaccgatagacatgatttcacctaccgacttcatgcttgaaccgatttcgcgggaaacaccggcaaacttcgtcaagtcccaacgaggaatcttacagatatagtagtcgagttgcggagcaacataggcagaattcggagtacccatttcgccgatctggtcgagtgaataacccaacgcgatcttagcggcaacgaatgccagcggataaccggtagccttggaagccaatgcggaagaacggctcagacgagcgttcacttcgatcacacggtaatcatccgtatccgagttgaacgcatactggatattacattcacctacaatgcccaagtgacggatacattttgtagacaattcctgcaacagtttcagttctttatcgtcgagagagcaggtaggagccacaacgatagattcaccggtgtggatacccagcgggtcgaagttttccatgctggcaactgtgaagcagtggtcgttggcgtcgcggataacttcaaattcgatttctttccagcctttcagggattcttccaccaggatttgtttggagaacgcgaaagaactttcggccagtttcaggaattcttcttcgttggcgcagataccgctaccaagcccacccaatgcataagccgaacgtaccattaccggataaccgatcttacgtgcagcagcaatcgcgtcttccatgctttctaccgcctggcttaccggagtcttcatattgatctcgtccagcttcttcacgaacaagtcgcggtcttctgtgtacatgatagcctctaccgatgtaccgagtactttcactccgtatttatcaagaataccttgtgtgtaaagctcagcaccgcagttcagtgcagtctgtccgccgaatgccagcaggataccgtcggggcgttctttcttgataatttcttctacaaaataagtagttacgggaaggaaatacactttatctgcaattccttcagaagtctgaatggttgcgatgttcgggtttaccaatactgagctgatgccttcttctttcaaagctttcagtgcttgtgagcctgagtagtcaaattctccggcttgtccgattttgagtgctccagaacccaaaacgagaactttcttgatttccttttccatttcttttgttgttataataagttgttgtttctaagttcatccataaaaaaaatgcgttaccctcaaaaaaggattaacgcattaccaaagaactaaaatatcgtttttggagaaaagagaagaagcctgccgtttccgggtgaaaaacatccgaatggagataatacttgcttctgatttcctgttgattcattgtcggttttaaaatttgtgcaaagtaacgacatattttgcacatgacaaaaagaaacgttcacttttttacagtgaagtgcccccattttgatacatctttcagtttttatctgtatctttgccgctcaatctattataataaggtaataacaatgggaaaagagaaaatcatacttactggtgaccgtcctaccggaagactccatatcggacactatgtaggttcactgaaacgcagagttgacctgcaggacgcgggtgattatagtaagatgtttatcttcattgccgattcgcaggcattgacagacaatatagacaacccggagaaggtacgtcagaatgttatcgaggttgctcttgactatctggcatgcggaatcgacccttccaaagctactatcttcatccagtcgcagataccggaactatgcgaacttagcttctactatatggaccttgtaagcgtatcccgcctgcaacgtaacccgaccgtgaaatcggaaatccagatgcgtaacttcgaggcaagcattcccgtaggcttcttcacttatcctatcagtcaggctgcggacatcaccgcattccgtgcaacgactgtccccgtaggcgaagaccaggaaccgatgctcgaacaggcacgcgaaatagtccgccgtttcaactatatctatggtgagacattggtggaaccggaaatcctgttgccggacaatgctgcctgcctgcgtctgccgggtactgacggtaaagccaagatgagcaaatcactcggcaactgtatctatctgtccgaagaaccagaagaaatccagaagaagatcatgagtatgtataccgatccgggacacctccgcgtgcaggatccgggaaagattgaaggcaataccgtcttcacatacctcgacgcattctgccgtccggaacattttgaacgttatctgccggattacccgaatctcgctgaactgaaagcacactaccaacgcggtggactgggagacgtgaaagtgaaacgtttcctgaacgctatcatgcaagagacactggaacctatccgtaaccgccgcaaagaattcagcaaagacattcctgccgtttacgagatgttgcaaaaaggatgtgaagtagccagagctgccgccgccgaaacactggcagatgtcaagaaggctatgaagattaactactttgacgacaaggaattgatcgaggaacaggtaaaacgtttctcacaagaataagtcgtcaacagataggccaattaataagtaaaggctgccgttctataaaagagcaggcagcctttatcattgttataagtacaacgaagattagtccgtttcggcttcatcatttttaaagaatactcctttcaacttctgatagaggaaggaaagtatcagcagtatcagtccgagaataatttgtaatgataacaaagaccaatgctctgctcaacttccccacttccgaccggagtatggagaatactggaagcaaaaagatgaaataaaacatctacataaaaatatcagatttgccgtgtgtattcaataaaaataaagcctgctcatgaacttatcacgttctttcccctcatctttaacgtatctgaaacagaaaaaagccggacagaaaaatcatttttccaaaaagcaaacgatcgtttgctttttctatttcttttctctacttttacggcaatattaatcaacaattccattattcataaactcaaaaaagaaaaacatgaaacatctaacccttttctttgcattcggcgctctccttttcctctcttgtcaaacggtatccgcgcgtggtgtaaaaattcctttcggtgatcgtgaagtcttaaacaaagtagcagacctgcccgacaccgaagaatataagacagacaacggcaactacattgatctggggaccattcatcaggagttcaacatcgcttacatccttcctctctatatcgagcaggagccccgcctcgtaggatattgcgaaaaagaagacacttattatgaactgacggaagaacaactctccgccattctgaaagagaataacctggacggtgaaaagctgaataaagtcggtttctactcccgatatggcggcaagatagtaggactgatcatcattgcccttatcatctggggattcatcccaagtaagaaaaagaaaacagaaccggtagaagtataaaacaaacctaattaatcacattaaaaaacagataagctatgtcaatttacacacttattccgattattttcatcgttctctatgcagggtactggtattatgtaaagaacaaaaactcgcaacaagcacaagtggtaaacaacactgatttcaaagcggaatttgcaaatgccgaacgatataaaaacagcgtactcacttccgaactgcctttcctccaagaagaaatgaagcaagaaaagattgacgctttcaattatgccagcaccgaatatggcgtgggatccgcccttaaagacggggttaaagataaactgaaaggaatggctaccttgggaaccgtgcgtttcaacaccgtgcaaactcccaaataccttgttctcagcggaaacagccttcatttattcgatacggacacagaaggggaaatcgaccggcatcttgtattcaaccaatcccgcctcgaaaactccagacttaccgaaatcccaatggaaggacaagtaaaagcacaggcccaagcccggggaaacaatgtaaaagcatacaaactgtctttgcagaccgatgacaagcctatcgagctcatcatctactcctgcctgatctttaccaatataccggaaatccctaccgacccgcaggaaacggtacaagctatcgtgatcggcaacgatttccttaaacaactgggcgacagatatcctaatctaaaagtatctctgccaatattcagctaaagaagtactcacataacgggaatgcctgtattggcaatacccgaaaccgataatcgaaggttcgcaaaccggtagcacacaggtttgcgaacctttgtttatttcctctctacccaccgacagctttccgttcaccaatgacgcgtccgaaataaagcctttaaaattaggttagcaagcctttatgtagtaactttgccataaggaacaataacagctaacctatgctggctgttacgctagtcactgtcagcctgtcagccaataaaggttagccgacaggccaatagaaattagccgatgaagatgaagccggattaatcggaaggaagtataggaaatacgaatcagaactacttatataaacaaaaggaactatggccatatcatttgactggtacgagaatccggtatcaccggacaaaccagaggagaaaagatttcatccgcgcatcatcgccaacggacagatagacacgaaagacctccgcagcaggatccaatcccggtgtacgctgaacgaggtggatgtaacggcagtgctggacgcactatcacaagttatgggtgaagaactgtgcgaaggaaggcaagtgcacctggacggtatcggttatttttatccgacactaaccgccaccgaagaaatctccgccgatactccccgccggaatacgaaagtgaagttgaaaggcatacagttccgttcagaccaaaaactgaaaaactccgtcggccatataaaaatcaaacagatgaaaagaattatccactctcccaaactttcggagacggatatcgacagccggttgagaaaatatttcaccgatcatcagatcatgcaacgttcggattttcaagatataacgggtatggttcgctcaacagccatgattcacatccgccgcctccgcacggaaggcaagttgctgaacatcggcatacccagtcagccgatatacgtaccggcgccgggattttacggaaagcccgcagattatcagccggtgaaataatgggattgcgacaggcggttacgcagaaagtggctgacgcctgctcccactttataaacatagaaatttattaatcttaatacagacttattaattatgaaaagccccctcatcatcgtatgctgcctgttaatggtatgcgtgtttgccaccgcccaagagccctgcccgcaagtgatccctgcccttcaacaatggaaaggaggaaaaggcgaactggctctgcccgccgaaggttcaatcgtgctctcgcctgcggatgaagcgacgctctcgcctaccgcacaaatcctggcgcaagacttaaaagaactgtttggctggaactatgtcatcaaaaccggaaaaccagccgggaaagacatctgcctctcactgtcgaaaccggacaaggaacttggtgaagaaggatatacgttaaccgtaaaccgctatgccggtatcgccgcccccaccggtcagggcgtattctggggaacacgtaccctattgcagatactccacaacgaacaaggaaagctccccaaagggacggcacgggattatccgcttttcccaaaccgcggctttatgctggatgtggcccgcaaattctttacaatggattatctgaaacaatacgtaaagatactttccttctacaagatgaacgaatttcagattcacttgaacgacaacggttttccgcagttcttcggcgatgactggaaccgcacctacgccgcattccgactggaaagcgaacgctttccgggactgacagccaaagacggttcatacagcaaacaggaatttatcgacttgcaacgtatgggattggaatacggtgtgcgtatcattcccgaaattgatattcccgcccactcactcgccttcgcccactacaaacccgaaatagcaagtcggaagtatggcatggatcatctggacctttacaaaaaagaaacttatcaattcgtcgacagcctgctggacgaatatctgtcgggcgacaatcccgtatttatcggagacctgcacatcggtaccgacgaatacaacaagaaagaagccgaacaataccgctacttcacagaccgttatctgaaatttgttgagaaatacggcaaaaatgtacgtatgtggggcggactgaaatggcttcccggcaagactcccgtaaaagcggaaggtgtcacggtcaacgcgtggtcgtatgactgggtggatcctgttgtttccctgcaagaggggtacaagttgattaatacttgtgacacttatctctatatcgttccggcagcaggttactaccgggatttcctcgatcaccagtggatttatgagaaatggtcgccgtggataatgaacaggaaacagacacttcccgaaggtactcccggcgtattgggcggtatgtttgccgtgtggaacgacaagtgtggaaacgggatatccgaacaggacgtacacttgcgcagtttccccgccatgcaggtgctcgccgagaagctgtggaaaggggaaaacaagaatgtcacctacgaagcatttgcaaagctgtgcaaaacaactcccgaagctccgggaattaacctgttgggcaaagtcccggcagaaaccgcactgaccgaagcaggaaaagaactttcttttaatgggaaagaggccgtcagtactcctttgcaggaagtgggttatccttatagtgtggagttccagctctgtccggagaagacgaatcctatcagcagcattctcttccaaggtccgcactcggtagtatacaccaactgggagaatacccgccgaatcgctttctcccgcgacggttacacctttgttttcaattcctaccgcctgccggccgatcaatggactacgatccgcatcgaaggtgactacaaaggtacttcactttatataaacggtgcattgcaggaacggctcgaaggacgcaccatgcaagtttaccggaaggaatacgaccgcatggaacacatgacttatcaggaaacactgatcttcccgctgcaacaaataggtgattcacgcaacggattcaaaggaaaactaaaaaatatccttgtccgccagcagcattaagcgtggagccgaaaggagaacaacaaaagagagcgactaaaaaaccgcagtatcccaaaatcgaggataactgaaagtcgatagtatccgaactctcctccttcgggaaggaggagtacccgcagggggaggtggtaggtaaatacacaagaagtggtaagtaaatacacaaattgattattgccaacattgtgtatttacctaccaccccagctttcagccacccttcccgcaggaagggagttgaagaaactaccgactttttatagtcaagttattcttttatttttcagattctaccaatacaacacggttcagaatcggttgaccgaacttatcgacaccaccaccggcagcgactttcaagttatcagccgggattccatacttcttcaccagcaaatctttaacaacctgtgcacgtttcaagctcaacttttcgttgaaagccggagtgcctgttgcagaatctgcatatccgttaatagtataggtagtacccggaaattctttaatccggttggcaagatatgataagttcatttcttcttgtggagacagtctgtccgaaccaatcttgaagaatacagtacgcggagcgatattaggatctgtaatcactacttcttcagtatcttctacctctaccggctgctgtgcattagccaactgctgttgcaactgcatattagcggcagccattgcattcatctggtcacgcatctgattcaattcgatttcagagataatctgtggcgtaggacgttggaatccgcgggtcgggaaatagtaagtcacaccaagcgtagcacccagaataccgtcatagtctggtcttcctccatgttcgccgtcaaatttgccttccaagcctgttgcactcagttccagattcaagtcaacggcattcgacaagcggaagcggttgatgatacctgcattgaaagtagcggcattggtatgaggacgtgaataagaatgagcccaaccggcaccgatataagggatgatttcatatacacggttcggattgtaaccgccgaaaagtgcattcaagttaatcatcaagtcaccgtgcaggttcatatagtcccaccgttgtttgtatgaaccgtcagctctcggaccgcccactacataattggcagtttcgttggtcgtgaatcctttagcttgcagaccgctgtactgcatacgcaatccgaatcccggagtcacccatttaccgacagacacattaaatgtaggagcaacacggtctctgaatttaccgatatggtcattgttgccatacagcacctgtgcacctcctccgacggagaagaaccagttactccagaaagggttcgttattacttgatatttatcttgcacctgaataacctcgtattcagttacagtcattgtctgctgcgcagaagcgacagacgcaacgccggcaaaagccagcaacatcagaatctttttcatatacctaatagttaagtggttatttaaatctttttctttgttgaactatttaaataacacgaacaagactaaaaggttttaggaaaagatgattttatttattttatttgaataagcgttcgatatcttcctccttgattgttgtcaaaaccgttttcccgtccggcgtgtaattcggtgagggacaagcgaaaaggctgtctacaaggcttaccatttcctcattgctcagtacctgaccgtagacgatagccgccgcacgtgccagtgtcagagccagaatattctggacttcttccttgacatcattccctttttccatagctgtatgtagcatattacgtaccaattccaccggattcagtccttcgatgcctgaaggaataccgttgatagcatagctgcctccacccagatcgctcagatcgaaacctactgccgacaaatcatccataatgctttgcagtacggcagcttccgaagcgggcagctgtaatatttccgggaaaagaacaccttgtgatacgccctgtttctgctggatttgaaccatataccggtcgaaaagtacacggatatgcgcccggtgctggtcgatcaacatcaaaccggacttcacggaggtcagaataaaccgtcccttaaactgcaaatgctgattacccttctcaattacaggctcactggcatataaggtcgaagaggccgccgacattacagtttccgttctttcttccataacggcactttccccacccattgaagaatcctcccaatccatttccggctccggctggggattattcatcttactggctttggtcagaccgccataaagatcttcccaatccacctttgaacggctgtatgctccgccgccaccgcctcccgtagaaaccttgaacggattataatccgaattatactgtaccgtgggaggtgcagaggatagattttgttcgaatgcaggaatgtcgggcatatcttccgtatcaaaatcaatggaaggaatggcgctgaacttacccaacgactctttgactgccgccgaaaggatttgccagattgcctgttcattctcaaacttgatttcggtcttcgtcggatgaatattcacatcaatattagccggatcgacttcaaaataaatgaagtaagaaatctgttcgccgacaggaatcaactgttcgtatgcatccattacggctttatgaaaataaggatgccgcatatatcgcccgttgacaaagaaatactgatgggcacctttcttgcgggctgtctccggtttggctacgtatccggaaatcttcaccatggtagtattcacctcgatattcagcaactgctgattgagtttcttaccaaaaatagccataatgcgctgacgcaacggagaaaccggaagattgaaaagctcggagtcattgctgtaaagggagaaagctacttcgggatgaaccagagcgatacgttcaaattcggcaaggatattactcaattcggtggagtttgctttcaggaatttacgacgggcagggatgttaaagaatagattctttatggagaagttacttcccttggaacaggataccgcttcctggctctctaccttagagcctgcaatcaccagtttcgttcccagttcttccgactcggggcgtgtttttaactccacctgtgccactgctgcgatagaggccaaggcttccccacgaaaccccattgtacgcaaagcaaacaaatccgccgcttcgcgaatcttcgaagtagcatgacgttcgaaagaaagacgggcatctgtttcggacattccttttccatcgtcaatcacctgaatacaggttttacctgcgtcagtcaccaacacatgtacattctgcgcatctgcatcaatcgcattttctaccagctccttgataacggacgccggacgttgtatcacttcaccggcagcaatctgattagctaccgaatctggtaacaaatgtattatatcactcatagttcgttaagcagtaaatcagttaagtagtcgactactaataaattctttcctttagaaactccagcttcccgttgccaaataatgccacagatagataaggaaagcaatgataatcaatatgattccgaaagagacaggtttacgcccgctagccttccggcgtttcaggtgcgttgttccttcaacaaacttgccacggatatcttccggcttaaattctttttcaggaagcattcccaaatcgcgcttcgctttctcttccattttagcgagcttctcctttcgctcgtctacataaatgtattgatgattaaagccacgaggttttctcatcgaattgaaaaacattcccatactacttcatattaattaagtttcgcttatttgtctttggccgccggtcagttgtcggtttcagcatttcgccttcccgcttgcctctccagttgaaaatatcctctttattcagcggacgcacataatcaaaccaggagaatgtaggcagacgtaacttatcgggcggtatctgatccatgggatacatcgtaccgttggactttcccacaaataatcctttctccatcttcttgtctttcatataaagatggagcaagctcccttccagacagttgaatccggtcatcgtgctgtctttttcttccggataaaaggccgtcagcacattaccaatcacttcgatatgccgcatatccccattttcaaaataggctttcatctccttaccggacacttggttataatgaatggagtctttcatctctaccgtcaacgcctgattgataatgtgggcccagtcgatagtactgtcattcatataaatcttgatctgctcaccaagcaactgctgaccttcattccaaagaatagggtcaacatacatagtcatgcaagaatcttttgagttataaaccagtgaatcgcatactccctgcacatccgtacgatacatacgtactttatgataagctttcatcaaccggtacagagaatctgtattcaagttataggaaaccatttgcagagtatcaccatgcataaaaagactgtcaccctgcgaatagtcaatggccacggcacgcttggtagcaaaagcagagtcggtcagttcgttatagaaacagtaatcgcccgtcaacatgttcttgttgatcgtatctgtcattttcacattgtcgaatgcttcaccatatccggccaaccggtcataaaataagctatcacccaccaatttcttcccttggtttgtcaatatggaacggtctaacagttccgcttgttcggtcattgtattatagaatccacgctccgaatagatatgattattatcactaacgatattcgaaggtccgagaattacggcaatcttattttctgtgttataccttaatgtatcggaagtcaacacaaacttcggattaaccaacttcacatcatggttgaacacggattgtttggtagccggactgtattcaccccaatcggaagtcaacacattttcctcgtccatcaacgtccccccctcgaaataatatccgaggtcataaagacggtcgtagttcaaactatccgtcagcagcgtcgtgttccggtttatcatctttacattttcacggagctgcgcaatctgagtcattccatcatagtaaagataatcaccgtaaatgaacaacgtatctccctgctccatacgtacattactgaaagcctcaactgaattggttttctcaaagatcaacgcactgtcacaatacatatacatgctatcgtgacgcattttcacattaccaatcagcacttgcacatcaggacgagctaacttatccgcctgaccttcatcagcatggagcaaataaaccttcgttttcttattctccggctgcttcttcgttgttttggatgtgtctgcaaccgattttgtagatgttccggttgccttcgttttttgctctgtaggacgcacctgcgctacaagacatacgccaaacaggcatagaaagcctattaggagccatctatgcctgtcttgtttatcttttttattttgtttcagcatataaagtcaagctgttaaacatcaatccttcttaatccaacccggatacttgaagtcacacttctgccagttttcgttgatacgtacataagtatgtttctgcttatccagaatccacttgtgcaacatttcttcgcggcgtttatccattacaatttctttcaagtcctgatagtcctctgcaatagtcgctttatgaccgttaatttttgccttcagtttcacaatcgcacaaacttcctttccgtctttctcattaatcattgtaaatgctttggaaatctctccaacgttcatcttgtctaccactttggcaacatcctgaggtagatcctgcatttggaatttagaagtagtcactcctgaattttcattgatattcaccatgataccatgattattacgagtatctttatcatgtgaaataacggcagctgcttcatcgaacgagaacttatttgcacggatatcatcagcaatagaatccagacgtgcacaagcctctgtcagttctttttccgaaactttcggacgcaacagaatgtgacgggtattgacacggtcaccacgcttctcaatcaactggataatatgataaccgaattcagactcaacaatcttggagactttcttcggatcctgcaaactgaatgccacattcgcataagaagggtccatcataccacgtcccatgaatccgcattcgccgccttttatggcagatgccttatcctcggaatacaaacgggccaacgttgagaagtcgatttctccttttgtcacacgatccgtatagtcgcgcagccttttcttcacatcttcgatttctgcaacaggaattttaggttgcagcgtgataatctgcacttctacctgcgtcggaatgtaagggatactatcctgcggaaggtctttgaagtaacggcgtacttctgccggagttactttgatttccccgactaatttctgctgcatcttctgtactgtcaatccgtctcgtgcattatcacgcagtgtttcacgaatctgagcggaagtcttattgaaatactcctccattttctctcttgaaccgatctgctgaatgtacatattagtcagcatatctactcgctggatgatttccgcttcggaaacctcaatactatccaactttgcctgatgcaggaataacttctgaacagcgatttcttcgggaatcacacaatatggatcgccgtcgaatctgcgtccattatacaaggcgtccatacgagcctcttctacatctgattttaaaatagcttcgtcacctactacccaaactacttcatcaaccacgttgtcctgggcataagttaccacgttagcaaaaactgccaggacaagggtaacaacaaatctaaagttcacaaacttcttcattctttgtatttaataattatatataatcttcttcttgtctaccgcctgctgatacaggtcgctttttacttgctccataaaattcacccgtttctgattgaccagcaaatctttcacttccgatcgggcaaactcatacggtttttcctctcctactccacgataatcgctcacattcaggaaataataaaatgccgtatctttcaattctacctgacggtgtttgtttacatattcttccggtgtatctacttttaacggaatcatgtcgagtatatctgtcacggagacccatttgtcatagaaatattcatatttcaccgcattttgcaaactgtatttttccagactctctactgcatcctgcttctctgtcttataccatctgcggacattattcaactggggagccgttaacggcactttgataaacaatcccttaatcaacggattctccagcttaaacaattctttgtttttctcataataatctgcaatttcctgttccggaatatcatttatcaacttctgattaatcagttcctgctgataagtatgcataatcaaagctttccggtagttctccaccaacttttccacatccacattatcaggaatgttgttcgcagctttttcatacaacaagatttcctccgcccaactacgaatatagtgttcggcgaaaagaatgctatcatcttttgacaatccaacaggaagtacggacatcaaatcttctttatataaaaaattaccatccacctctaccaaaggagtcttacctttatggtcatgctgttttttgcacgctccacaaccaagaagggtaatcagtaagaggactaatattcgcattgtcaattgaaatctacttatttaaggtacgaagatagtgaataatcggttacatcagttattattaacggtttttaaaacctcttggtttatttcaaccttaccgaaatcctgcaattcccgcatccagaatgcgttaagatagcttcgataatccttccggacctgttctattacctctcgataatcatccgggcctttctgttttttgccgacaacaacagtaaaaggataagacattagaggttcaaaatcccccttcttaaaaaccagtttatctatatatttattatccccgtcggcaaaaattccctgttcaacttttatcttttcttctccggatgtattaaaagtttgccgaagtacttccgcccattctttttccggggttttcttcaatagttttttagcctgcttcgacgtttttttatcaacgcaatgaagaatagcacctttatatcgcggactatcccaacgataatccgaagtgtgaaatttaaaataagttgctagtcctgcccggtcatttatggcaggcaaatccactttctgacgagttacctctgctatgagatacttatcagtaactttctgcaaagcatagcggacttccggatgtttccgctctatattcttaccttcatagtccaataacgactttgctataaatccattcagttgccgcttcaccgcctgcggatgcgaagaagcaaactgcttgaacatctctcccgaatatacctgtccatcgattgtaaacaaagtctgctccgttctgccaattgtcaacaactcgttcatgccactcggattgggagcatattgccagtctctttttagtcgttccactatggtttccgtagctttatccaccccctccttacgtatcaaacgttctgccaacttctcataaacctctccatacgaaggattttctttccggtcaatcacttttataatatgaagcccttccggagtaaagaaaggatgggatatttctcctgttgacaaagaaaaagctacattttcaaattcgctcgttgtttgcaaacgttccaaccacatactacgcttatcctccgagtacatttccaccaaacgggcaaaatccaaatctgactgagtccttagcgactgccagatagaatctattcggtttttctcttcctccaaatgcttggcagttattgtctgaggcagatatttgaaaatttgcattatccgtacccgactccccaatcctttcaaacctctatcctgatacagaacacgaatacaactatccaatacctgcttatccgtcaaataagatttgagcaactgacttcgccacgcttcctgtagttttcggaacatagtagtcgtatcaagtcctgcaactttggccgcttcaaccttcaatttcgattgagcgaaaagttccgcatattccttcggagagagttttgcatctgcattaccagtccgatgccgatacgaatactcaaactccgaacgaagtatatcttttccattcacccgcatcagcaccgggtcttcctgtgcaaagaccgagataccgaaaaaccaaaaccaagctacaagcagacctcttttcatcatcaattcttattttccaaactctaaaaaccaaacattaactccataaacaacgaacggtgagcagcgaacaccctgcagatcgacacagtctgttcaccgttcaccgttaatagttcaccgtttatatatgctgttattccggacggctataattaggcgattcactggtaatcgtcacatcgtgcggatgactttccattacaccggcatttgtgatacgggtaaatttggcatcgtgaagtttttcaatattggcagcaccacaatatcccatacctgcacgcaaaccacctgttaattgataaacaacttcgaacaatgtacccttataaggaacacgggcagcaataccttccggaaccaatttcttcacgtcagctgttccactttggaagtaacggtcttttgaaccattctccatagcttccaacgaccccatgccacgatatgatttgaatttacgtccgttgaagataatagtatcacccggagattcttctgttccggcaaccaatgatccgatcattacactatacccaccggcagccaatgctttcacgacatcaccggaatagcgcaaaccaccatcggcaatcaaaggaatacctgtacctttcagcgcttttgctacatcatatacagccgacagctggggaacccccacaccggcaaccacacgggtcgtacagatagatcccggtccgatacctactttcacagcatcagcaccagcttccaccaaggccttagcagcttctccggtagcaatattacctacaacaatatcaatgcccgggaagcgtttcttagcttctctcagtttctcaataacgaatgcagagtgtccgtgagccgtatcaataacaatggcatccgcacccgcatcaaccaaagcctgcatacgatccaatgtatcgacagtcacccccacaccggcggcaacacgcaaacgacctttggcgtctttacaagccatcggtttgtcttttgcttttgtaatatccttataagtaacaagaccgatcaactttccgtccattcctacaatcggaagtttctcaatcttatgtttctgaagaatctgtgcagcagattccaagtcagtagactggttggtagttactaatctttctttaggagtcatgacaagatcaatatgttttgccatatctctttcaaaacgcaagtctctgttagtaacaatacctaccagataaccttcatcatccacaacagggataccaccgattttatattcagccataatatccaaagcatcacgaacggtagaacctctcttgatagtcacaggatcataaatcataccattctcggcacgctttacaatagcaacttgtcttgcttgttcttcgatagacatatttttgtgaatcacaccgataccaccttcacgagcaatggcaatagccattttcgcttcggttaccgtatccatggcagccgtcacaaaaggtatttttaactcaatgttttttgaaaactttgtcgagagatcgacagtgcgcggtaaaacttcagaataagcggggatcaacagtacgtcatcgtaagtcaacccatccattacaatcttatcagcaataaatgacatagggctatgcgtttaaaaattattgcgtgcaaatatacggtttttattcaaaaccgcatacctgcacgcctatttttttcgctttttttagtttgccatttcagagatgaacttaatacgtaccaaacgaacttcttcttcagtgaagtcatcccccagttcatcaagtgcatcatcaatcttgtctgtcgtagactccttaaaataatcgtagatgtcaagcaaatgatcttcatccatgatctcttccaagaagtaatcaatattcagtttggttccggaatagacaattgcttctacttcatccaacagttctccaaattcaatacctttggatagagcaatatcatctaaggctaccttacggtcaatagcctgaatgatagacactttcattttcgacttattagcaaccgtacgtacacgcaagtcttcgggacgttctatttcattctcttcacagtgacgtttaatcagtttacagaattcttcaccgtagcgtttcgcctttccggcacctacaccgggaatattctgtagctcttccagtgttaccgggtagatagtagccattgcttccaaagacgggtcctggaaaattacataaggaggaacttccagtttcttagagagcttcttcctcaagtctttcaacattgaataaagagcagggtctactgcacaagagccaccgccgcgtgccggtacttcctcctccacttcttcaaagtcattatcctccgttatcttgaatgatttaggtttcttcaagaacttgtgtccttcttccgtcactttcaaaagaccgtaatgttctacatctttgctcaaatagcctgctatcagagcctgacggattactgcattccatgttttgtcttcttcgcccatacctgagccaaatacttcgaggtcctcatgcaaatgagcctgtacctccgaagtctctctaccttgtaatatgtcaatgatataatctgccttaaagttttctttcaccgcgataatcgcttcaatcacggcacacaataattcttgagcctccacttgttttttagggtttaaacagttgtcacaatttccacaattttcttccgtgtactcttcaccgaaataatgtagtaatgtcttacgtcggcatacggaagattcggcataagcagcggtttccaacagaagctgcttgccaatttcctgttctgccacaggtttcccttgcatgaacttttccagtttctgcaagtctttgtttgtataaaaggttatgcactgaccttcaccgccatctctaccggcgcgccccgtttcctggtaatatccttccaagcttttcgggatatcgtagtgaatcacaaaccgcacatccggtttatcaatccccataccgaaagcgatcgtagccacaatgacttccactttttccatcaggaaatcatcctgattcttcgtcctcgtcaatgagtccatacccgcatggtaaggacgcgcgttgataccgtttgcctgaagaatttcagcaagttcttctactctcttccggctaaggcagtaaacgatacccgatttttccggattattcttgataaacttgataatatcacggtcaatattagcagtcttcgcgcgtacctcataatacaggttcggacggttgaacgatgacttgaaaacctgtgcatccaccattcccagattcttctggatatcgtgctgcacctttggcgttgccgttgcagtaagtgctatcaacggagcctttccgatctcgttgatgataggacgaatccgccgatattccggccggaagtcatgcccccattcggaaatacagtgagcctcgtctaccgcgtaaaacgaaattttcaccgagcgcaaaaaatctacattctcttcctttgtcaaagactccggagccacatataacaattttgtctttccggcaaggatgtcagacttcacttggtctatcgcgcctttgtttaatgaagaattaataaaatgggcgataccatcttcttcactaaaattacgcattgcatccacttggttcttcatcaacgcaataagcggagaaattacaattgccgttccttccatcaagagcgaaggtaactgatagcataaggatttcccgccaccggtaggcatcagtacaaaggtgtctctaccatcaagcaagttctgaatgattgcttcctggtttcccttgaatttattaaatccgaaacacttcttcagttcatttattaaattaatcttccctgccatcttaacttaggttgttttattcagttcatggtttaactttaagcaaagcactctttttcaagagaaccaaacaaagttataaacaacttcgtaattaccaagcaaaatacgactaatattttcaagaaaaaacagaagccttcatttacagtcgccttactttttgattttaagcggtttgcagccttgccatgtttgctttttccagttgctgcttcgcgtaatccagcgtcacttcatactcttttttgcttcccgaagggatttcaaacatgacatccatcataatcgtttccacaatggaacgcaatccacgggcaccaagcttatattcaaccgccttatcgacaatatattcaaagacagaatcttcaaatgtcaacttgataccatccatctcaagcagtttaacatactgtttgatgatagagtttttgggttcggtaaggatagcacgaagcgcatcacgatccagaggattgaggtaagtcaatactggcagacgaccgattatttcgggaatcagtccgaatgacttcaaatcctggggagcaatatactgcatcatgttattcttatcaatcctcgctgttgtctgcgaagctgtatagcctacaacatgcgtattcagtcgttgtgcgattttcttttcaataccatcgaaagcaccgccacaaataaagaggatattcttggtatttaccggaatcatcttttggtcggggtgcttacggcctccctgtgggggcacattcaccacggaaccttcgagcagtttcagtaatccctgttgtacaccttcaccgctcacgtcacgagtgatagagggattatctcctttgcgggcgatcttgtcgatctcatcaataaatacaattccctgttcagcttccggtacattataatcagccacctgaagcagacgggttagaatactttcaatatcctctcccacataaccggcttccgtcagtaccgtagcatccacaattgtaaacggaacatggagcaacttggcaatcgtacgagccagcaatgtttttccggttccggtgctacccaccataatgatgttcgatttttcaatttccacatcatctccactatccttttggagcaaacgtttataatggttatagaccgatacggaaagaaaacgcttggcgtcatcctgtcctattacatactggtcaaggaatttcttgatctctaccggtttgggtagttcatttaaattaagtttggtagctccggcgcttttcttgacttcgcccaacgcttcctgagtaatctcataagcttgggtggcacaactgtcgcagatataaccgtttactcccgtaatcaggaatccaacttcattctccgaccgaccgcagaagctacactttttctttgcttttgaatcagccatttttatttcttaatcaatacttcatcaatcatgccgtactctttcgcttcctgtgctgtcatccagtagtcacggtcagagtccgcccataccttatcaaaatcagtatgcgaatgatcggcgataatcgtataaagttctttcttcaatttttgaatttcacgggcagtaatttcaatatccgaggcctgtccctgtgcgcctcccatcggctggtgaatcatgacacgcgagtgaggcagtgcagaacgcttgccttctttaccggcaaccagcaatacagctgccatagaagccgccatacctgtacaaatcgtagccacatcactcgagataaactgcatcgtatcgtaaatgcccagtccggcgtacacacttccgcccggagagttgatataaatagaaatatccttgcccggatcaacagagtccaaatacagcaactgtgcctgaagcgtattagcagtataatcgtccacctgtgtaccgaggaaaataatgcggtccatcatcaagcgggagaatacgtcgagctgagttacattcaactgtctttcttccagaatataaggattcaaatacccggcttgcgatttaatcacatcgtccaaaaccatgccattcattcctaaatgcttggttgcgtattttctaaaatcatccatgttattgttcctttcttattaattaaaaataaacgtaagtacaaagaaacgaaaaagaatacagagacacaaaaaaacacagagttataattttataaaaactctgtgtttctgtgactttatattctgttcagccgaacgtttattcaaacatcttattgaattcctcgatagaaacgttcttgttctccaaagtaacctgtgccttcaaggcagcagccaacttcacttctacaacacgactcaccagattgttgatagtttctttcttcttcaacatttcctgtgcatagttgtcaagtacatcatcaggaatagaaagcataccatattgagcaaactgtgcctttgttgtatctcttgccattttcagcacatcttcctgttctaccttgatattgtttgcttctaccagctgttctttaatcaggtgccaagtcagttcttcaatactcttatcatagttttcagcaacatattcttcgcccttttcttcgttgttcagcaacataatacgtttcagcagtgcatccgggaattccagtttacctactttatccatcaataccttgcgaacatcaatcaagaacttataatcgctgtctgcaacaaatcttgcagcaatttcttctttgatcttagcgcggaattcttcttcagtcttcacaacgccctcaccgaatgcctgatcgaacacttcctgagtcagttcgcccggaacaaaacgagtgatttcttctacctgaaagctaaagttagacttaacatccttagcgatttccttatcgattttcaataaagaacccaactcagcagcgtgaccgtcataagccacattcgggttgaacaccagcacatcgtttaccttcgcattagcaaagatagctttctggtcgtcattcttcatataagaaggcatcaaaacagcaccttctacctgaataccgccttctttcgtgttaccttcttcgtccaactgagccaacaggcctttcagcatatcattatcttcgtaagcatctactttatcgtatttgccggtgcgttgagtatacatcttcacctgattgtcgatcatctcgtcagatacctcaatcgtataataatcgactttatctttagtgcttacttccgctttaaattcgggtgccaaagcaatatcgaacacgaaatcaaattcatccattgtatcgaagtcgatattctgctgtttttcttcgttaggcaacggttcgcccaacatattcaccttattttctttaatataattgtaagcagcttcttgcagcgtcttattcactacctctgcaatcaccgacttaccatacatctttttaataagacttgtaggaaccatacctttacggaatcccgggatctgtgccttctgacggagtgatttcaactctttgtctactttctcctgataatcggctttctcaagctttacagtaagctctgcgcttactttgtcaatgttttgtaatgaaacgttcattctgacaattatttatttgatttatactttgttctatactcaaagagggtgcaaaattagtgctaatctttcaaatttcaaaagacattgcagatttatttcagtaatgtaacatataaacaaatgaaaaatccttgtgaaagaacacgctgtacagttctccgttttacttttttttgtctttctgcaaataaaatctctaaaaagatggtcaatccaaaaattattcttttctttgctgcggattgatggaccattagtttctcgatttctattacaaggtttttacttccgttgaaaaaacgcttttgtaaactctctgtcgttttaatccttttattagtaaccatctatccagagagttttattcatttatttattttttatcattttcattatgaacatttatgttggaaaccttaactaccgcgttaaggaaggagatctgcaacaagtgatggaagattacggagcagtatcatcagttaaagttgttatggaccgtgaaaccggtagatccaaaggattcgctttcatcgaaatggaagacgatgctgccgctgccaaggctattgctgaattgaacggagccgagtacatgggccgtaccatggtagttaaagaagctagacctagagcttaattgccgacgctaatatagctaagaaaaaaagaaacttctgccactcgatgacagaagtttttttatagcctaatttccaactatatccggtctcagccctccatactttgtacttcaaggtctttcaccttgcgaagtaaatccgaagcaaagataaagttattcagacgttcgttggtagaagtgaatatatcgtctttagttccttcccattctttatgtccttcataaatataaatcaccttttcaccgattcccaatacagaattcatatcatgtgtattaataatggtagtcatgttatattcctgggtaatatcatgaatcagatcgtcaatcactaacgaggttttcgggtctagtcccgagttcggctcgtcacagaacaggtattgcggattcaaagcaatagcacgagcaatagctacacgtttctgcataccgccactgatttctccgggaaacttatcttttgcctcggtcaggttgacacggtccaagcagaacatggcccgcttagtacgttcgcgtaaggtgtcattactgaacatattcaaagggaacatcacattatccaacaccgacaaggaatcgaaaagtgcggcactctggaaaatcattcccatttccttacgaagcatcttcttctccttcttccccatcatcacgagatttcgaccgtcatacaggacttcacccttctccggagtaagcagccccacgatacatttcatcaataccgtcttgccggaaccactctgaccgataataaggtttgtcttcccattctcaaaagtcgcattgatatcactcaataccgtcttatcgtcaaacgatttataaagtcctttaacctcaatcatcccatcaaaagtttagttaatatcaaatccgcaaacagaatcaaaacactactggacactacggaatccgtggaagcctttcccacggcaatagaaccgccttccaccgtatatccgaaaaaggcggatacacttgcaataataaaggcaaagaaaagagatttgataatacctgcccagataaaccattcattaaacatatactgcaaaccatattcaagatcgacagcattcatgactccggcaaaccaacaagtacaaaaggcccctattataccggcaaagatactgaatgtcaccaatataggaatcacggtcaccatagccgcaatcttaggcagtatcagatagttggcagaattaactcccataatttcaagcgcatcaatctgctgcgtcacccgcatcgttcccaactccgaagcaatgttcgaccccactttccccgcaagaatcagacacataatagaagaagaaaactccagtaacataatttcgcgggtcacatatcccaccgtccagcggggcatccacggactttcaatattcaacttaatctgaatggtaataaccgcgccgatgaaaaacgaaatcaacaacacgattccgatggagttcacacctagctgctccaactcgttaaggtattgtcggaaaaacatccgcatacgttccgggcgggaaaaagtccgtcccatcagcatgaaatatcttccgacggttctcaatgcttttatcataactcacactatttgtctgcaaatgtacattatttcggcttatttttactacatttgccgcaaaataactagaatatggaagaaagcaagatggtgctccgcacggaagacttggttaagaagtacggtaaacgaaccgttgtaagccatgtttccattgatgtgaagcaaggtgagattgtgggtttgctggggccgaacggtgccggtaagacgacttcattctatatgaccgtggggttgattacccccaacgaaggacgcattttcctcgacgatttggagattaccaaatatcctgtttacaaacgggcacaaaccggtatcggctacctcgctcaagaggcttccgtattccgtcagatgagtgtggaagataatatcgcttccgttctggaaatgactaacaaacctaaagaatatcagaaggaaaaacttgaaagcctgattgcagaatttcgccttcaaaaagtacgcaaaaacaaaggtaaccaactatccggaggtgaacgccgccgcacggaaatcgcccgttgccttgctatcgacccgaaattcatcatgctcgacgaaccttttgccggtgtcgacccgatcgccgtagaagatatccagcaaattgtatggaagttgaaggacagaaatatcggtatcctgattaccgaccacaatgtgcaggaaacattgagtattaccgaccgtgcctacctgttgttcgaaggcaagattttgttccaaggcacaccggaagaactgtctgagaatcagattgtacgtgaaaagtatttaagtaacagctttgtattgcgccgtaaagatttccaattggagaaataagaatgactgaagattcacctctaacaataaagaaaaacacccgaaaacataatgttttcgggtgtttttctttattgttgtttatttctgtcgaatataaatattaatcggggtacctgtcagattccacttctcacgcatcttattttccaggaaacgcttgtagggctccttcacgtactgcggcaagttggcaaaataaacaaacgaaggaacttgtgtattcggcaactgcgtaatatacttaatcttgatatacttacctttgtttgaagggggaggatacgcctcaatcaacggaagcatttcctcattcaaacgtgcggttggtatttttgtcgtacgattctcatatacattacgggcttcttcaagcaccttcaagatacgttgcttggtcaatgcagaagcaaatataatcggaaaatccacaaagggagcaaaacgtgaacgaacagcttcttcaaacgttttctgcactttcacagatttatcctccaccagatcccatttatttatcacgacaaccaatcctttctgattcttttgaatcagggagaagatattcaggtcctgactttcgattcctctcgtggcatccagcatcagaatacatacatccgaaccttcaatggcacgaatcgaacggatcacagagtagtattccaaatcctcattcaccttattcttcttacggataccggcggtatccaccagataaaaatcaaatccgaacttattgtagcgggtatagatagaatcacgagtcgttccggcaatctcggtcacaatgttacggtcttcaccgataaatgcatttacaatagaagatttaccggcattcggacgtcccaccactgcaaaacgaggtatctcatcatccaaaatttccgaggattccttcttgaacttaccgacaatcaagtccattaaatcacccgtaccacttcctgtaatcgcagaaatacaatacggatcgcccaatcccaatttatagaattccggagcattatattgtaactcgttattatctgtcttgttggcaactacaatcaccggactgttggcacgacgcaggatagtcgccacctgcatatccaggtcggtcactccattcatcacatccaccacaaacagaatcacatccgcctcgtccacagccagcaacacctgctttctgatctcttcttcaaagatatcgtccgagtttaccacccatcctccggtatccaccacagagaactcacggcccagccattccgacttgccatactgcctgtcacgggttgttcccgcttcttcattcacaatagcccgacgcgacttcgtcagacggttaaataaggtagacttgcccacattggggcgtcctacaattgcaactaaattacccatagttcaataccttgtttttcacgactatcacagtcgcatgaatacttttaatctaactgataaccaaaattacgtaattccttatccgaactacgccaatccttatccaccttcacatacgtttccagataaatagtctttccaaagaaacgttccagttcacgacgcgcttcagtagccactttcttcagcgcctttccctgtttgccgataatgattcctttctgcgaatcacgctccacatagatcactgcccggatatggattttcttcgcttcttccttaaactcctctacggctacttccaccgaataaggaatctccttgtcgtagtacaatagaatcttttcgcggataatctcattcacaaagaaacgggcaggcttatccgtccactgatcctttccaaaataaggaggagaatcgggtagcaattccttaatccgcttcatcacataatctacattaaacttggaggcggcagaaataggaataatctcggcttgcggaagcaattccttccattcctccaccagcttaaccagcttttcttgatcggtgaggtcaattttgtttatgagcagcaggacaggtaccgtcatttgacgcaccttttccataaactcattattcttatccggtgtctctaccacatcagtcacataaagtaaaatatccgcatccgtcagtgctgaagtagaaaaattcagcattgattcctgtaatttgtagttaggcttcaatactcccggagtatcagaaaaaacaatctgcatctcatccgtattatagatccccataatccggtgacgagtagtctgcgccttgaaagtagcaatcgaaatacgctcacctaccaaagcattcatcaatgtcgactttccgacattcggatttcctacgatgtttacaaaaccagctttatgcatttctctttatattttattggttgagacaaaaaaacgcatcgaatcgaaataggatgcgtttttgagtgttatagttcagtaacttacgttacgattccttttttccgtcataaccccacttcacgtaaacggctccccatgtaaatccggcgccgaatgcagtgaaaataatgttatcacctttcttgagtttatcctcaaaatcccatatacataaaggaagagtagcagcacttgtgttaccatagtgttctatatttaccagtactttatccatcggcacttccatgcgatgagccacagcctcgataatccggacatttgcctgatgcggcacaatccagttgatgctgtctttcgtcagtccgttcttttctgcaatagcagccgacacgtccgacatactggaaacagcatacttgaacactgttcttccttcctgatgcagatagtgcattttgttgtctaccgtgaaataagacggaggacaaaccgaaccaccagctttcatgtggaggaaaggcaatcctttaccatcagttcttagtatcgaatccatgataccgtaatcttccgtagtcggttccaccataaaagcagcagcaccgtcaccaaagataggacatgtagcacgatctgtatagttaaccattgacgacatcttatcggcaccgacaatgataattttcttatatcttcccgaacgaatgaaattagcagccgtttccatcaaatacaggaaaccactacaagccgcctgcagatcaaaagcaaacgcatttttcagtccgagtttatcgcaaagaatagaagcggtagaagggaagtgataatcaggagtagtagtagcaacaacaaccaaatcaatatcgtcgggattagcaccagtctttttcatcaactgcttggcggccttgcgagccatgtatgagctacctaatccttcctcattcagaatatgtctttcctttactccgatacgagtcataatccattcatcgttggtatctaccattttagatatctcgtcattagtcaagatataatcgggtacatatcctccaactcctgtgattactgcatttattttttccatcaaacctattttaaattagcaatactataatacttaaagcagccggagagcatcaccctcaggctgtttttcagtataactgtactaattatacagctgcttctttctcaatagcgagcttacctctgtaatatccgcaagcaccacacactgtgtgatatacatgccattctccgcaattcggacaaatagccaatgtaggagctactgccttatcgtgagttcttctcttcgctgttcttgttttcgattgtcttctcttaggatgtgccattttcttaaaactttaattattatctaatattttttttaattcattccagcgaggatcaatttgttcctccacttcctcttcaattacgatatcgtctcctccagtgtcgaaaacttcatcgctatcctcgttcgcatttgtcttcaaatgcttgctcaatttactagtcatagctttattgcacttacccggagcgtgtacatgcttcattgggatggagagtgctataaactcatacatgaaccatgcaacgttgatttctccttcttcttcgggaatcacaatcaggttctcaccttcctctgcatattcatgtccaaacttcaccatcagtttatcagaagaactgatcggtagttccatatcatccagacaacgatcacacggtacccataccattccgtcggtctgaaagctcaattcgaaagcgcgagaggttcttttcacgttcaaagttacatttacttttcccttttgaacttcaggaccatcaatgtgagcgaaataaaggttatccaatacaaactcatacttagcagagtctgtctgcattcctttcagatcaattttgtatttatcaaattttcccaaagcttctctcttttttaaatcgttagcttacaattcgggcgacaaagatacaaataaatatcctcataacatacaaattatcagtaaatattcacttttttaataggtattatgaggtttataagcgttaaaatccgctgtcgttttt
